United States Patent Application Publication US 2007/0161031 A1 - sequence listing, part 11

SEQ ID NO: 13060 - DNA, 2300 bp, Homo sapien
gcctataatcccagcacttaggaggccaaggcaggaggatcgcttcaggccaagagtttgggaccagcctggataatatagtgagaccctgtctctacaaaaaatttaaaaattagccagacatggtggcacacacctgcagtcccagctactcaggagactgaagtgagaccctgtctaaaaaaaactgatgttctgggttttttgtggggtggggatctcacttcatcacccaggttggagtgcagtggtgcaatctcggctcactgcaacctctgcctccctggctcaagcaatcctctgacttcagcctcccgatgagctaggaacacaggtgtgtgccaccacacctggctaattttttctatttttggtagagacagggttttgccatgttgcctagggtggtctcgaacttatgagctcaggcgatccgcccgccttggcctcccaaagtgctgggattacaggtgtgagccactgcacccagctaacatcagcttttgaatcctgtttcagtgtcctggttcagacactgattaagactgattataagaaaatagacaaggtaagcctgcttgtcttattttggtgctattccaaaatgcagatggtccttgagcagggacattggttaaatgtttgactttcgcagagcctcctagttacaagcagaattagaccagatagagtatgaaatgtcaacaaagctagttattaagtgatattgactgcagtgtacttcaaagcaaggtaagccttcccatagataattggatagattatacgtactaaactgttattttttgcaagtactgagcctaggtactacagaaatgagatgggtggaacatacttaactatctaacctgggcaaacatctcatctatgaatcgtatccattgggttactgattccacaaatctggctcattttaatgatgagtctcagataattttgtagtttgaaacacagattactccagaatcacagtcctttatggcccaagtgctatatctgatggaatagttatctctgaatggaggttggtgtttatagaacattctgtatatggtaaaaggaatttaaggagatttaaaagaaagaatgttctgtataaactgtaagtggaaatgtttgtatttcccttggtaagcaaattgggctgtgtatattctttgtttgtgatctaatccagcaaggccaattaccagaatagagctttagggcatagcatgactaatcagcttaattaggcctgcttttctaaacaccaggcttccaggggtggccactatggactcctgcaaaagagtctttaatacatttccagactacccaagggtacattttacctttgttttttttttttcaagatagtttgataagactccaaaatgtgatgatgtaactatttcccagtgaatccctccttaatttataacctgagagcctacattttttgtccttgcttttatctgttttagttgctcttactatccttagtggcatcattggttaagttaacgtaaatattcatctcaacctgtgtggtatgtaaaaactagttccaatgcagaactccaggaatctcaattaaaggagcttgtcacacacgttctctggcatcagtggtgtttgagaaatctttagcatatgaactttgtcataaatgacagtgtatattgtgtcactgctactgtcccaaagtgttcatggtagcactagaataacagataaaaatgaagtgttttcgagccaatgacttgctgtgattctatgggtaagctcctctacctctctgagtctcagattcttgagctggaaaaggacagtgacaacaatacctgccttgtagggttgtgacactaactaaggtaacacgtgtaaaagcatttaacacagtgcctgccacagaataggcattcagcacatatcagctattagtaatacttttagccatcccttttatttcctctctcaggatgaaattgattctgcagtaaagatgttggtgtcattaaaaatgagctacaaagctgccgcgggggaggattacaaggctgactgtcctccagggaacccagcacctaccagtaatcatggcccagatgccacagaagctgaagaggattttgtggacccatggacagtacagacaagcagtgcaaaaggcatagactacgataagctcattggtacgtcctctgctttcttcccagaaaaagctgcaacttttagaagtggtcccattgagttgattccattgatgtttttaaattttgaattaatcataaatt

SEQ ID NO: 13061 - DNA, 2300 bp, Homo sapien
cgtgtaaagagcaaaactgcctactccacagcagatcacagcagaccttcaaggagaaagctaaaaagcctcttgaaaattaacccccagttcccccttttcaagaacttgaatcttgtgctcattctgaaagtttccactgtggtggaggagcataataggcacttaaagaaactgggtattgtattgggatgaggagtggaaaggactatagaattgtttaacagaacaacatgataaagacttgggttgcatcaaaatcatctcacagagatcagggcacgctgattctgcaatctggggaagggtggcatcaagacagccaattctggagcaggtgagaagagaatgtggcccaggagtgtttctggatccctggaataccaccaggaggtagaataccatcctttctatcttggccccagagtgtaggtgacaatacctttggactggcaagttcccagaggacaagaaaatgacttctttagagcaaggatttcttgacaccttttgggacccatcatgttccattttttttaaacactaaaagaaagattgctttccccgccaaataacagcatgaacattatcttaaaaggcaaagacattaatttctatgaagccaggcacgagacacttttgggtgtcacaataagaatgacaatacgttctgatgttgagcacagaaggagggtgcatcagtgaaaattatgacagacagcatgacggtgctgagaggcaagctacggatccaagcccgcgactgctcagccaggatctctgttccctatgggagcagtgaatcacctgaactttgggtcaatggaagaagtaaaatgcataacaccctaatcctaagacacaagtcctgaccccctaaaccaaggttttcagcactttgctaaaaacacgaacaagctctaagcctggcaaagatggcaatacatacccaggttgtggaagacactgcagaggtggccactggtcacgctgggcagttgagctgctgagagtgccctgcccagccagaaatggtctttaatactcttcccctctttctttcagtttcccttctgaaaaaagatgcttttgtctttcgttctccccaccctgcattcagctaagggtttcttataaatcacccagattctcagaaacacttgagctcttgaccaaccttcttgatgagactgtccaatcaggggtgggttgcctggggggccaggttgagaccaatgaaaccctcttgagaatcgagccattagctggtcattgcatcagccacccctcaccccccgctggcctccaaataacctccccaccctcttcccgttccccaccctcagcgtcagtgtgactgattttgtgtagtcgtgggcggtggaaagagaaactgtaaattccccgcatctgttcaccgaggcggcacagtgcagtggaaagatcaggagttctggggtcacagacgcctgggtttcaatcccagcttggacttattcgaaaccttgggcaagggtcgcattacttttctgcttccccttcggtttcctcatctgtggaatgggcatggagaagcctgctaacattaccgttgaggggactaagtgcaacactacgcaaagcctctggcacatggcaggcgctaaataaaaatgggggcctctctcctcgggaaaagcgaacaggcggagacgatgaagggtgccagtgggaaagggagacggggtgggtcggcggcgctcagaggaaaggggcgaggggtcggtggcaggctccgcgcctcacagtgccagaacgcggcgggcagcaagccgggctctaaggatactcccgggagggccaggccactgggcgccgcgccagcgtccctccatcactccctcccttgtttcctcactccgccccggccttactcccctcgcttaccctgcccagccgggccagtcagcgctcccggctcagcaaccggctgtctcctgggcgtccgtggaaacgccgtccggacggaacaacttccggcccgacggcgccgtcattggctgttcgcgcgggggcggggcagaggccgccactgattggctggcggccgcggcgtcgcgtcggaacgtgactggatggtagtgtgctggccggtctgcctccgggagaaccgagcgcttccggtgcgtgtggtgagcggcgggccccgggctggaggggccgggactgggcagcgcctaaagcgccccgtgccgcttaacgcggtctctcatagccgctcgccttcctttcacttcctgttccttcagaaagcgctgtgc

SEQ ID NO: 13062 - DNA, 2300 bp, Homo sapien
cttgaatcttgtgctcattctgaaagtttccactgtggtggaggagcataataggcacttaaagaaactgggtattgtattgggatgaggagtggaaaggactatagaattgtttaacagaacaacatgataaagacttgggttgcatcaaaatcatctcacagagatcagggcacgctgattctgcaatctggggaagggtggcatcaagacagccaattctggagcaggtgagaagagaatgtggcccaggagtgtttctggatccctggaataccaccaggaggtagaataccatcctttctatcttggccccagagtgtaggtgacaatacctttggactggcaagttcccagaggacaagaaaatgacttctttagagcaaggatttcttgacaccttttgggacccatcatgttccattttttttaaacactaaaagaaagattgctttccccgccaaataacagcatgaacattatcttaaaaggcaaagacattaatttctatgaagccaggcacgagacacttttgggtgtcacaataagaatgacaatacgttctgatgttgagcacagaaggagggtgcatcagtgaaaattatgacagacagcatgacggtgctgagaggcaagctacggatccaagcccgcgactgctcagccaggatctctgttccctatgggagcagtgaatcacctgaactttgggtcaatggaagaagtaaaatgcataacaccctaatcctaagacacaagtcctgaccccctaaaccaaggttttcagcactttgctaaaaacacgaacaagctctaagcctggcaaagatggcaatacatacccaggttgtggaagacactgcagaggtggccactggtcacgctgggcagttgagctgctgagagtgccctgcccagccagaaatggtctttaatactcttcccctctttctttcagtttcccttctgaaaaaagatgcttttgtctttcgttctccccaccctgcattcagctaagggtttcttataaatcacccagattctcagaaacacttgagctcttgaccaaccttcttgatgagactgtccaatcaggggtgggttgcctggggggccaggttgagaccaatgaaaccctcttgagaatcgagccattagctggtcattgcatcagccacccctcaccccccgctggcctccaaataacctccccaccctcttcccgttccccaccctcagcgtcagtgtgactgattttgtgtagtcgtgggcggtggaaagagaaactgtaaattccccgcatctgttcaccgaggcggcacagtgcagtggaaagatcaggagttctggggtcacagacgcctgggtttcaatcccagcttggacttattcgaaaccttgggcaagggtcgcattacttttctgcttccccttcggtttcctcatctgtggaatgggcatggagaagcctgctaacattaccgttgaggggactaagtgcaacactacgcaaagcctctggcacatggcaggcgctaaataaaaatgggggcctctctcctcgggaaaagcgaacaggcggagacgatgaagggtgccagtgggaaagggagacggggtgggtcggcggcgctcagaggaaaggggcgaggggtcggtggcaggctccgcgcctcacagtgccagaacgcggcgggcagcaagccgggctctaaggatactcccgggagggccaggccactgggcgccgcgccagcgtccctccatcactccctcccttgtttcctcactccgccccggccttactcccctcgcttaccctgcccagccgggccagtcagcgctcccggctcagcaaccggctgtctcctgggcgtccgtggaaacgccgtccggacggaacaacttccggcccgacggcgccgtcattggctgttcgcgcgggggcggggcagaggccgccactgattggctggcggccgcggcgtcgcgtcggaacgtgactggatggtagtgtgctggccggtctgcctccgggagaaccgagcgcttccggtgcgtgtggtgagcggcgggccccgggctggaggggccgggactgggcagcgcctaaagcgccccgtgccgcttaacgcggtctctcatagccgctcgccttcctttcacttcctgttccttcagaaagcgctgtgccttggaccaaccttacttcttactattgacagctcagctaactcctattcatccttcaaaacccatctctggtcgtatcttgtttgttgctttcatcgctctggggc

SEQ ID NO: 13063 - DNA, 2300 bp, Homo sapien
ctctagtaatgccgcccccgttcgcagcccattccaggcaggtaacaacttccacacgcaaagccagagtttaaataaaacgaccgggcgcggtggctcacgcctgtaatcctagcactgtaggaggccgagaagggcggattacctgaggtcgggggttcaagaccagcctggccaacatggtgaaaccccgtctctactaaaaatacaaaaaaaaaaaaaatttagccgtgtgcagtggtgcgcgcctgtaatcccagctactctggaggctgaggccgcagaattgcttgaacccgggaggcggaggttgcggtgagtggagatcacgccactgcactccagcctgggctacagagcgagacttggtctcaaaaaacaacaacaacaacaacaacttctaaagccagccagccagctcatctccaatggaactaatataatatgaaagactaattataaactaatggaaccgtgcactgcaaataatttggcatttctgttctctaaatgctaagcctggtcccgaggccactctcaactcctctgcccaggcaccacccaccatgcacccagattcccaccaccagggtgcccgtgctccctctggaaggagatgagggattaaacgaagaggaacagacagtaagatggaagggaaggcagggacactggagaagagtctaaggaaggagcgagtgactctgacagtcactatcagcaagtcagccccatgaggacaggactttctgtgttttgttcactattcaatgcccagcgtctaaaaatatttctggaatgcaaacgggtgggagggggagatgctaggaagtaaaagaaataggatattcccattcaacaaacatttcctgattacgtactctttgtcaagccctatgctgggtctggtgtgggtggaaatcaaacacaaaacacagatccccccggaggccccagagcgatgaaagcaacaaacaagatacgaccagagatgggttttgaaggatgaataggagttagctgagctgtcaatagtaagaagtaaggttggtccaaggcacagcgctttctgaaggaacaggaagtgaaaggaaggcgagcggctatgagagaccgcgttaagcggcacggggcgctttaggcgctgcccagtcccggcccctccagcccggggcccgccgctcaccacacgcaccggaagcgctcggttctcccggaggcagaccggccagcacactaccatccagtcacgttccgacgcgacgccgcggccgccagccaatcagtggcggcctctgccccgcccccgcgcgaacagccaatgacggcgccgtcgggccggaagttgttccgtccggacggcgtttccacggacgcccaggagacagccggttgctgagccgggagcgctgactggcccggctgggcagggtaagcgaggggagtaaggccggggcggagtgaggaaacaagggagggagtgatggagggacgctggcgcggcgcccagtggcctggccctcccgggagtatccttagagcccggcttgctgcccgccgcgttctggcactgtgaggcgcggagcctgccaccgacccctcgcccctttcctctgagcgccgccgacccaccccgtctccctttcccactggcacccttcatcgtctccgcctgttcgcttttcccgaggagagaggcccccatttttatttagcgcctgccatgtgccagaggctttgcgtagtgttgcacttagtcccctcaacggtaatgttagcaggcttctccatgcccattccacagatgaggaaaccgaaggggaagcagaaaagtaatgcgacccttgcccaaggtttcgaataagtccaagctgggattgaaacccaggcgtctgtgaccccagaactcctgatctttccactgcactgtgccgcctcggtgaacagatgcggggaatttacagtttctctttccaccgcccacgactacacaaaatcagtcacactgacgctgagggtggggaacgggaagagggtggggaggttatttggaggccagcggggggtgaggggtggctgatgcaatgaccagctaatggctcgattctcaagagggtttcattggtctcaacctggccccccaggcaacccacccctgattggacagtctcatcaagaaggttggtcaagagctcaagtgtttctgagaatctgggtgatttataagaaacccttagctgaatgcagggtggggagaacgaaagacaaaagcatcttttttcagaagggaaactgaaaga

SEQ ID NO: 13064 - DNA, 2300 bp, Homo sapien
actaaaatacaaaaattagccgggcgtggtggcacacgcctgtaatcccagctactcgggaggctgaggcaggagaatcatttaaacccaggaggcagaggttgcagtgagccaagatcgcgccattgcaccccagcctgggcgacaagagtgaaacttcgtctcaaaaaaaaaaaaaatctttctgaaattctgaaccatcatacacaatacatggttatcaattagttcccagaaagaagtgctttggtaattttttacttctgtgctgttagcaccaagcacaatccagagaaaaagaagggtgctaggcactcctaggacagcagagggcgcggtggaacagcacagaacgctcaggcaatagaccgacttccaagaaaacccagtgcacccaaccttaatcaaacacgccaagctccgcctccatcccccaacaggtggagtcaggtcagcatcaacagattccctccaagtccttttctaagtcattccagacagcctattacccatctcttcttctagacaatgggtttctatgtcccctggaatcaaccacccaacctcttccacacctttcccccaagtggcatcattcgcctgagggttccactggtctacaagtcaggtcatcattccataaatgtctgtagtcagcctcctctagtaatgccgcccccgttcgcagcccattccaggcaggtaacaacttccacacgcaaagccagagtttaaataaaacgaccgggcgcggtggctcacgcctgtaatcctagcactgtaggaggccgagaagggcggattacctgaggtcgggggttcaagaccagcctggccaacatggtgaaaccccgtctctactaaaaatacaaaaaaaaaaaaaatttagccgtgtgcagtggtgcgcgcctgtaatcccagctactctggaggctgaggccgcagaattgcttgaacccgggaggcggaggttgcggtgagtggagatcacgccactgcactccagcctgggctacagagcgagacttggtctcaaaaaacaacaacaacaacaacaacttctaaagccagccagccagctcatctccaatggaactaatataatatgaaagactaattataaactaatggaaccgtgcactgcaaataatttggcatttctgttctctaaatgctaagcctggtcccgaggccactctcaactcctctgcccaggcaccacccaccatgcacccagattcccaccaccagggtgcccgtgctccctctggaaggagatgagggattaaacgaagaggaacagacagtaagatggaagggaaggcagggacactggagaagagtctaaggaaggagcgagtgactctgacagtcactatcagcaagtcagccccatgaggacaggactttctgtgttttgttcactattcaatgcccagcgtctaaaaatatttctggaatgcaaacgggtgggagggggagatgctaggaagtaaaagaaataggatattcccattcaacaaacatttcctgattacgtactctttgtcaagccctatgctgggtctggtgtgggtggaaatcaaacacaaaacacagatccccccggaggccccagagcgatgaaagcaacaaacaagatacgaccagagatgggttttgaaggatgaataggagttagctgagctgtcaatagtaagaagtaaggttggtccaaggcacagcgctttctgaaggaacaggaagtgaaaggaaggcgagcggctatgagagaccgcgttaagcggcacggggcgctttaggcgctgcccagtcccggcccctccagcccggggcccgccgctcaccacacgcaccggaagcgctcggttctcccggaggcagaccggccagcacactaccatccagtcacgttccgacgcgacgccgcggccgccagccaatcagtggcggcctctgccccgcccccgcgcgaacagccaatgacggcgccgtcgggccggaagttgttccgtccggacggcgtttccacggacgcccaggagacagccggttgctgagccgggagcgctgactggcccggctgggcagggtaagcgaggggagtaaggccggggcggagtgaggaaacaagggagggagtgatggagggacgctggcgcggcgcccagtggcctggccctcccgggagtatccttagagcccggcttgctgcccgccgcgttctggcactgtgaggcgcggagcctgccaccgacccctcgcccctttcctctgagcgccgccgacccaccccgtct

SEQ ID NO: 13065 - DNA, 2300 bp, Homo sapien
gctcactgcaagctccgcctcccgggttcacgccattctcctgcctcagcctcccaagtagctgggactacaggcgcccgccactacgcccggctaattttttgtatttttagtagagacggggtttcaccgttttagccgggatggtctcgatctcctgacctcgtgatccgcccgcctcggcctcccaaagtgctgggattacaggcgtgagccaccgcgcccggcctgcctggaacattcttcccccaggtatcccatctctgtagcagccagctggacagacaggcccacagcacaaggctaaggtcctgaggtgtccgtctacccaagtgtgcagggagcaattctgagggcatgatccaaatccacccatttcactcccaacacacagattcacactgcaatgaatttctacttgttaaaaaaaatctttctgggcagggcatagtggctcatgcctgtaatcccagcactttgggaggccgaggtgggcggatcacctgaggtcgagttcgagaccagcctggccaacatggtgaaaccctgtctctactaaaatacaaaaattagccgggcgtggtggcacacgcctgtaatcccagctactcgggaggctgaggcaggagaatcatttaaacccaggaggcagaggttgcagtgagccaagatcgcgccattgcaccccagcctgggcgacaagagtgaaacttcgtctcaaaaaaaaaaaaaatctttctgaaattctgaaccatcatacacaatacatggttatcaattagttcccagaaagaagtgctttggtaattttttacttctgtgctgttagcaccaagcacaatccagagaaaaagaagggtgctaggcactcctaggacagcagagggcgcggtggaacagcacagaacgctcaggcaatagaccgacttccaagaaaacccagtgcacccaaccttaatcaaacacgccaagctccgcctccatcccccaacaggtggagtcaggtcagcatcaacagattccctccaagtccttttctaagtcattccagacagcctattacccatctcttcttctagacaatgggtttctatgtcccctggaatcaaccacccaacctcttccacacctttcccccaagtggcatcattcgcctgagggttccactggtctacaagtcaggtcatcattccataaatgtctgtagtcagcctcctctagtaatgccgcccccgttcgcagcccattccaggcaggtaacaacttccacacgcaaagccagagtttaaataaaacgaccgggcgcggtggctcacgcctgtaatcctagcactgtaggaggccgagaagggcggattacctgaggtcgggggttcaagaccagcctggccaacatggtgaaaccccgtctctactaaaaatacaaaaaaaaaaaaaatttagccgtgtgcagtggtgcgcgcctgtaatcccagctactctggaggctgaggccgcagaattgcttgaacccgggaggcggaggttgcggtgagtggagatcacgccactgcactccagcctgggctacagagcgagacttggtctcaaaaaacaacaacaacaacaacaacttctaaagccagccagccagctcatctccaatggaactaatataatatgaaagactaattataaactaatggaaccgtgcactgcaaataatttggcatttctgttctctaaatgctaagcctggtcccgaggccactctcaactcctctgcccaggcaccacccaccatgcacccagattcccaccaccagggtgcccgtgctccctctggaaggagatgagggattaaacgaagaggaacagacagtaagatggaagggaaggcagggacactggagaagagtctaaggaaggagcgagtgactctgacagtcactatcagcaagtcagccccatgaggacaggactttctgtgttttgttcactattcaatgcccagcgtctaaaaatatttctggaatgcaaacgggtgggagggggagatgctaggaagtaaaagaaataggatattcccattcaacaaacatttcctgattacgtactctttgtcaagccctatgctgggtctggtgtgggtggaaatcaaacacaaaacacagatccccccggaggccccagagcgatgaaagcaacaaacaagatacgaccagagatgggttttgaaggatgaataggagttagctgagctgtcaatagtaagaagtaaggttggtccaaggcacagcgctttctgaaggaacaggaag

SEQ ID NO: 13066 - DNA, 2300 bp, Homo sapien
tagccgggcgtagtggcgggcgcctgtagtcccagctacttgggaggctgaggcaggagaatggcgtgaacccgggaggcggagcttgcagtgagccgagatcccgccactgcactccagcctgggcgacagagcgagactccgtctcaaaaaaaaaaaaaaaaaaaaaaaaaaaaaaaaaaaaaagaatgttccaggcagagagaaaagagggaagggctggagcacagggaaagggtgcaggggaaagtggcaggcctttcccaccatggatcctggacgtcttttgatttcagtattttcagacctaccctcgttcatgatgatgagcatatgttctcacttgttgctaataagcagtgcggcaggttttctttatacatttatcttcatggatttatacatctagcaaacatatgctagtatttgtgtaggataaagttctacagtggggttgctggggtgaaaatgatgtgtttaaacttgtaacacatatgaccaaaatggaccttccaaaggcatttttaaagtcctgtctctttctctgtaggcattgtctcttcaggtcttctttttttttctttttttttttttttgagatggagtcttgctctgtcactcaggctagagtgcagtggcatgatctcagctcactgcaacctccacctcccgggttcaagcaattcttctgtctcagcctctcaagtagctgggactacaggcgcctgccaccatgtccggctaatttttgtatttttagtagagacggggctttgccatattggtcagactagtcttgaactcctgacctcaggtgatccaccaaccttggcctcccaaagtgctgggatttcaggtgtgagccatcacgcccagcctaggtcttcttttatgtccttcaataaaagttttagttttctttccttttttttttttaattttacttttttgagacagagtctcactctgtcacccagtctggagtgcagtggcacaatctcggttcactgcaacttccgcctcctgggttcaagtgattctcctgcttcagcctcccgagtagctgggactacaggtgcgtgccaccacgcctggctaatttttgtatttttagtagagatggggtttcactatgttggccaggctgctcttgagctcctgaccttgtgattccccccgccttggcctcccaaagtgctgggattacaggcatgaaccactgcacccagcgcttttttcttttcttttctctttttgagatggagtctccctctggcacccaggctggagtgcagtggtgcaatctcaggtcattgcaacctccacctcctgggttcaagagattctcctgcctcagcctcccaagtagctgggattacagttgtgtgccaccaggcctggctaatttttgtatttttacttgagatggggtgtcactatgttggccaggctggtctcgaactcctcacctcaagtgatccgcccacctcagcctcccagaatgctgggattacaggtgtgaaccactgcacccagacttactataagtcttcatgtaggtcttgcttattttttacagatttacccccagctattccatagtttcaatttcaaaaattttatcttctaactaattgggcctgatatgtagaaaagccttttttgtttttgtatttattctttttctttcttttttttttttgagtcagagtctcgctcttgttgaccaggctggagtgcagtggcacaatttctgctcactgcaacctccgcctcccaggttcaagcgatctcctgcctcagcctcccgagtagctgggactacaggtgcctgccaccctgcctcgctactttttgtatttttagtagagacggggtttcaccatgttggccaggctggtctcgaactcctgatctcaggttatccacccacctcggcctcctgaagtgctgggattacaggcgtgagccaccacgcctggcctgtgtttattcttatgagtgttgagttattggatttcctaggtgacatggtttcttataactacatacatattcttccatgcacattttctgacggttgaccttgtttgatcttaggtggtttggctttgaatgacagcaagaactctgtctttaatggcttcattggtagcgtatgatgattcggactcggaggctgagacagagcatgcaggaagttttaatgctaccggccagcagaaagacacttctggtgtggccagaccacctgggcaggattttgcatctggtacactggatgtgcccaaagcaggggc

SEQ ID NO: 13067 - DNA, 2300 bp, Homo sapien
cctggctaatttttgtatttttagtagagatggggtttcactatgttggccaggctgctcttgagctcctgaccttgtgattccccccgccttggcctcccaaagtgctgggattacaggcatgaaccactgcacccagcgcttttttcttttcttttctctttttgagatggagtctccctctggcacccaggctggagtgcagtggtgcaatctcaggtcattgcaacctccacctcctgggttcaagagattctcctgcctcagcctcccaagtagctgggattacagttgtgtgccaccaggcctggctaatttttgtatttttacttgagatggggtgtcactatgttggccaggctggtctcgaactcctcacctcaagtgatccgcccacctcagcctcccagaatgctgggattacaggtgtgaaccactgcacccagacttactataagtcttcatgtaggtcttgcttattttttacagatttacccccagctattccatagtttcaatttcaaaaattttatcttctaactaattgggcctgatatgtagaaaagccttttttgtttttgtatttattctttttctttcttttttttttttgagtcagagtctcgctcttgttgaccaggctggagtgcagtggcacaatttctgctcactgcaacctccgcctcccaggttcaagcgatctcctgcctcagcctcccgagtagctgggactacaggtgcctgccaccctgcctcgctactttttgtatttttagtagagacggggtttcaccatgttggccaggctggtctcgaactcctgatctcaggttatccacccacctcggcctcctgaagtgctgggattacaggcgtgagccaccacgcctggcctgtgtttattcttatgagtgttgagttattggatttcctaggtgacatggtttcttataactacatacatattcttccatgcacattttctgacggttgaccttgtttgatcttaggtggtttggctttgaatgacagcaagaactctgtctttaatggcttcattggtagcgtatgatgattcggactcggaggctgagacagagcatgcaggaagttttaatgctaccggccagcagaaagacacttctggtgtggccagaccacctgggcaggattttgcatctggtacactggatgtgcccaaagcaggggcacagcccacaaagcatggctcctgtgaagacccagggggctatcgccttccattggctcagcttgggagaagcgattggggatcttgccccagccagaggctacagtggcccgggaaggagcctcaagtcaccttccccatcaaagagccttcttgttcttctctgtggacgagccatgttccagccagccacatgcccctggcagctgcccgctttaagcaagtaaaactctccaggaactttcccaagtcatctttccatgctcaaagtgagtctgaaaccgtaggtaaaaatggcagctcttttcagaagaaaaaatgtgaggactgtgtggtaccctatactcccagaagactaagacagcggcaggcattaagcacggagacaggcaagggtaaagacgtggagccacaggggccccctgcagggcgtgccccagcccctctctacgtgggcccgggagtgtctgagtttattcagccatatttgaatagccattataaagaaaccacagttccccggaaagtgcttttccacctgagaggccacaggggccctgtcaacaccattcagtggtgtccagtcctttctaagagccacatgcttctctccacttctatggataaaactttcaaggtaagacttgaatgaaaacttctgctttcagatgctcttaggaatacactgctggaataatagtgaagtggagggaggttacaggctgaacttttttttgtgtgcagatttctgtaattccctttgttgcattccagaaagggtcatctgtggtcagctccgggttgtgggttccttctgccccaacccttccctgatgctgccttgctcaggttaccagaggatactgtttcttatccctctcggaggccgtgagggaggaggtgagagtgattagtgggagaagaaaagcaggcccaggaccaagccctggggactggggacatcctcggtgaccctgtggagcattgagccatgccagctctgtgcctggtgctgtgctggtttcaagggctgttgggagaggtaggtagacccagcccctggtgtcagggcttgcacagtgaggcggga

SEQ ID NO: 13068 - DNA, 2300 bp, Homo sapien
gggaagggaggccccggccgtgcagagtcagggcagaacattccaggtgcaaggaaccagtgcaaaggccctaagacagggatgggccaggtgagcctggagccagcaaggcagccagtgtggccagtgtgtgcctagcgaggggaggctgctgggcatgggggtcggatgatttggcagggccaggtcagtatttaccaacccctcatggaggcctgacaggtggcacagagtcaccccctccaccttgtctggggaggccctactgtgtgccagtctctgtgcccgggtgccacagggaagatagcaaggtccctggccccaaatctccaagctcttgcctataaactgcaaatgcacagctgatgagacccacccagcaaagctgctgtgacacttcaatggaactgatttctgtgaccgggcccaaggccaccctggggacacagcagcagaggaaagggtggacgggcatgtttctgacccgggcggccctcccatcgctagtaagaaaaggaagtagtaggtgggagggaggcagctgggagctccacaggcctcagcccatgcagggatgggcacgtcatcaggacccagatggccacaggtgggagtgaggagagagcaggggctagtggccaacaggcagggctcctgtgaggggtcagaagataaaggtggctgctgggctggaccaccagaaagaggtagggacttaaggcagacggtggggagaggtgtgttggaggaagaggcagcgggtgtgaatggggctggacagcgcccagaggcggggaaggactgtgccatgaggactgtcccccgagggcacccagtgtgcaccctggggtcccagcctccctaagggagatcccgccccctcacttcacagtgggaaccctggggcaccccacagactcctcatcctcatggcccccacccactggcccaagacccaggcagcgccgcggttctccagcccatcaggcaggcctcggctaacctcaggggacttgagcaagccacttcatgcgctggcctccgtttcctcacccgtagtaagggtctcacgaaaatcaccgagtcttgtggtcaatgaatggctgaatcaaaacttgcacccggggtgctgggcccgtgcaggagcctcatgggagactgtccccgagggcgtagcacctcggccaggggagcttccctgctatcttctccctagccacccataaagatgcctgtgtcactcctgcatggagagcatcaggcacaacccatcttttagtccccccgcccctgccaggtgctgggctggtccagggacacagagctgggacacagagtcctgtcccatctggtgtgggggtaaactcagtgactccccagagttcccacagagggccgcatggaggatacagcctccaagggggagggcagtggttgccccgaaggcaatgggtcagaggaggatttgagctacagcagcatcaaagccaggcttcaggctctagaataggcttgaagggcaggggctgcctgttccctgcctgtctcttgccctgcccagcccccactgctccaccagggcagctcagcaacctcccctgcctttccccccagttcccttctgggggtggggggaattcccatccaggccttttagaagggctgaaacattcaatgtaaataattaatgctagatttttaaaattaaattttaatacattcttattaattttagacaaactccctggcaggtcattcgccgtgagtgattgaggttggcaaccagagacagcctttgggtgggaaaggctcctgagcagtggggtccaggcgcagctgggccccttcagctgcgggatctccagcaagcctcttctctgttggagctttgctcccgcatagggggtccggggcttccatggcagagctgtggtgaggagccgtgggaagcgctatgatgtgtaaggggcggtggacgttattgttatgactaccgtggccattctgctgagggtggcctcccaggaccggaggggggcggagggggttttcctcattagcccctggagagcagagcttgcttcctctgctgtcccctctctgctttgtctgctgtcccctctctgctggagaacttagcccagagctagtgaacgagtgggtgtccgtggatggaggaacacttggatttcttgggtttggtttgatcctggttcaggtctgaccctctgagtggacggctcctcccaccctgcgctggctcagcgcaggccaagcctgctgggtgctgggggtgtcct

SEQ ID NO: 13069 - DNA, 2300 bp, Homo sapien
ttggcacacgtggttccacggaggggctccctggggcatctcgggaagtgcagattcccgggcctgcctctgcaggtctgactcaggaggccaagaggtgacggctaaagtggagaggaccacagcgaggcctgcagagggtaacgtgggggacttgtctgctcccccatattacagatgagaaaactgaggccctgcgtggggggccccccctgtccgtggcttcccaccaaggaggccctgcatgttctgtccatcctctgactgctcagcgaccaaggcagctgggtggtggtccgggtctgtggaggacggtaaccgggggctgttgtccttggagtcccggtctgcctgtatttatcctcctcatttaactgagggctgattattgtgctgggactggagctgggcaggcagcagtgcctggtgtctctggcttaattacagctggaggagacgggagcaatgaggcgtgagctgctggtgactccaacacaggaaacgctcctgcagacgtccttccctcctcatttttaagaaatacatgtacaaagcctccccgattgaaaaataatgaccccactggatggtgactttttggggggcagcagggtctgccctcagcctagcttctggagcccctcctcactctggtgctctcccctttagcctccatctcctgacctcctccctcagcaggcttccgactgtcccctgggctccagatggcagggatgggtttggagaggtggcactgtgaggtgtggggaggcctggctcctgctggtggtcctgaacagaggctgccattagggttacaggtgagacagatgggcacagatgggcagagccgatggctctggaagttcagggggtggcccagggtggcccatcttgctggggctgcagtttccctgggcagctggatgttggctggcagcactgggcaaagaggagacagaagcacagaaacggaatcaggcagcccagcccagccctctgtgtcctgctgcaggatagcctccagtcaggtaaaacaggtggtggcttcaggacttgcacagacagagcatgtgctatgtcactgggaaggagctcaccgggagacagatggggccttgggaaagcgggttcctgctgtggagcctcagtttcctcatctgtgacacggggctttggtgagggttgctgtgagaatgaagagtgagtgatttgtgaacagccagctcacggctgagaggtggagaaagaagatggggctgttctcttccccagctggagtcttggaggacagcagctgcccagaggaaatggaaagttaggtccgaaggctgctttgaaatggttggaggctggttaccctgaacccagctctggtttggctgctatcagctggctcactggtgaaaacctcagagcttttttttttttttttggtgggaattagagcccatgatgggtgcatgtatttggaaaccataacactccattggcacatgcgagagtggtttgcgatggaactcagtcctcacaacactgaggaaacacagttgggagactgaggcacacagagaaggtggctcacccagggccacacggcagggagatgtggcagctctgatggggacgtccagcctggtggcatctcagcatacacagttagggggttcctcttagagagaaggaatacaaaatcctgcggcggtggatattcagacatgtgtggagtcccagcaagtggtccattctatattaggcaaatattagagacggcaacgcagccaggccctccctgccaggaagtgtggaaaccctgaggaatcagcacccgctgtcactcgaacccaggcctggactcctgccccagtgctctttccaccaaagcaccttcctcgaatgcacccggtttcctgggagtgagcttctttgccactggaatgaacaaaaaatccagatgaggatttcagggtggctctgccctgcctgcctcacaccgccctttccagaacaggcgggggagcgcgaggcagggcggttctcgcttggagacgggtgggtggactggagggcagaggcaggctctgggttctgcacccatttacatatcccctgcgcactgtccggagcactccttcccttccctggttcctcaaggcacggctcccccaggcagatgaaagcttaatagagttttgcgacatgaaagtcagtcggaggaaagagccttgaacagttgtgcgtgagagagaggcaagcgcccgaaattattttacgacaaaggcagctctctctgccacaga

SEQ ID NO: 13070 - DNA, 2300 bp, Homo sapien
gccccagggctacccagccctgagatcctccacccctccttggcttctggctgagaactcagctcttccaggtctgcctgctgttgggataattttggaggctgaagtcaggggcctcgaagggagggaagagaggaaccctggtcaggaagaccttggcgatcaccatgcagtggacattggcacccagggttgggcctgtcagccagacactctcgttctaggccaagggccttgggcaaaggaccttccatcactgaagttggtttcttgacttgaggaaagagtccacggaagaaagtagggtcacaggaatgcaagggcatgtggcaggcacacagtgggcaccccaactgctccctacagcctgtccccaaagccgttcccagcagcccctacctatctgggcattctgcagataacatcagggaagggatatcttccaccaggggctgggagtttccctccagcctccttggagccagcccagagcagctctggtctctgtccatccctgtacccatcccgagtgccttactggagcactgacttaggggtggtgggcctggggatgcccatgggcctgccttcccacatctatggctaagatgggaaatctgtgctcagacctgccagggctggactagagggccaggaggtcaaagcatccagcctccaggttcacagtggtgagatcacacccccctgcagcactgtgaagaaggggaggccgcgagctgggtgggcacccactccctgcatctaggatatgtatgcaaattaatatatgcaaattaagtatcctaaacgacccacccaaagattgggacgcctgggacccttcccccaggaggtgaaatatctttaatcccctcctacccctctccctccctatctttctgagcctcccccatccagactgggtgcaggggtgcagagctttcctctccagcagggctctaagcctaagccgggggcaatggggaggaggggtgtctgaggagcactccctctccctgggagctctgcagaggaagagggtctctggcaatcagcatcctctacctccacctctccagcgggcgacccctcagagaaggtctcccagtgagtctggaatacgtgccgagtgcctggagtgctattgtgtgtatgtgagagcacattggtgaggctgcccatgcatgccactgtggacaaagacagatgcgatcgtgtgtgtgtggggactgcgtatatgtttttgtcagtgtgtgtgaccacgagtcagctgggtatgtgtgcttgtgggtatcaggtgcatggctgtgcgtacatgtgtgcgtaagagtcggtgcatttgtgtttcagcgcggctaaggccctgactgagatgctgtgtgtgcgggggtgggtgtgactgaatgcgggcacgggtgtccgtctgtttatacgtgtgtttgcgtgtttgggtgtgcaggtggctctgcgtaagcgtctgtgtgcagggggtcggcacatgggggaggatgcccatggttgggtaaccgcaggtccgcttgaccctctgccacctaggactgtgtctatacggcgtctgggctacagtgtgtttgagttgccgtgtgcgtttccgttgcggggtgtgggttgccacggggcaactgcatttttctgcgtcttcatggccaggggtacagggggcgtcgggcttttcctgggggtttttctgtgtgcgtgtgtaattatgtgcttagttcacatcttcatagtgcgcctttgtgttttcctgggtatctaaccattgcacgtgtgcccgggacttcagcgataagtgtttcggtgttcctgcgtgcggatttgtgctctccggggaggtctgcggcccaggttcgattcctgcgacttgtcctaggcaggcctgtatgtgcgcggcggccgcgtgctgtacagtgtgagggaacgtgtaccaaacgctcgcgggatacctgtgcccgtctagccaagagtgcacccgtgtgcgcgagcgggcttctgggacgccgccgtggtcgggggcggccctgcgaggggagggggtcacagggactggccggcgccggccccgtgcgcacggaggcgggggcggggggcgggggccgcgaggggggaggcggtacgaaaagggcggcgcgcgcggcggcggcggcagctccccggcagcggcggtggagagcgcagcgcgcagcccggtgcagccctggctttcccctcgctgcgcgcccgcgccccctttcgcgtccgcaaccagaagcccagtgcggcgccaggagccggacccg

SEQ ID NO: 13071 - DNA, 2300 bp, Homo sapien
tgggaggctcaacttcccgcaggggcgccaggccctgacaggagagactggacattaggtgtctggaagtttctccttctaggggctccaggagcatcccacctgaggcctggggctcccaccggaacgtcaactcatgcccttgtggggctgcagggctgacgcgggctggcactgtgtctacgacagcctcccgggcccccgggtgcgtggctgcggatgctctctggcggccaccacagttcccacgcgcggcgggtgaatgcgagccccttgtcaatgcgtgcccctcgcctctgcccccgagaggctagcaaccgggcctgccggcgtctgattggccgtgggggcctgacgacaggggctcctggttgctgattggccccggccagctctggctgtttcctagctattaatactgtggctaataaacgttctcctgttgacgcgggtgctcggagccatgattttttgaagcgttcttgacgtctgtggctggtgcgggcgtttctgctgtgcaaggcctgcttccggggctctagtccctggggctcctggcaagctccacaggctgtaaagggggtgttttctttctccttcgtgttacctgacatattaaagcagcgccccatgaggaccccaacgtcccacgtctctatctccccaacagtgcgcctgtttatgaaaaaacgagccccccacacgccgtcccaaggctcggcgcctctagtgacctgacggtcaatgttcacctccctagtcattagctgtggacgtagaaatagcctttctcccttcttttcagccctggaatctcccgtctgctttacagtcaccttgtgggatcgttgggcatggggggctccctctgacgccgcttaaaccccccaaagaagtgcgggggagcgattctgacttgatgccctcggcggggcctctctgctgtcctctttggggccccttgctcatcctcacctgctttctgtcaccgagcactccatccttgtcctcctggctgccacccacctgtcaccctaagatagatcctcggtccctttcaacagcattttgacctttgcgagaggacatttgattgacggccctgcacgctctgccactcagagccgggcagagctgccgagggctcccacctgttagggattaactcccatgtgccagctccggagccgaggccgcggcagggctcggcgcaacatgtgtcgctgcctgtttttcggggcgctggggctctttcaaagggcatgtgtgtggggatcaccccaactttgaggggtagctcaggcatctccacatgggacacagtccgccctctaaaagtactttccttagagggcacggctcctgtctggattcttattacaaccctggtgtgtgtggtggggggtacccctggttaaggtggaggaagcggacccagtggaagaggaaggggcatagcgggttccgcgaacatgagttgtaagcggcagagcccgggactccacagccagggttttctgactcggagacgcggagctctgtctcccatgtcaaagagaaccagtcagaaacgcacgggtgggctgggagggggtgacagcctctggcttacatctgggaaccagttatgtcgcccgggcattttattttcctgaacaataagagaaagcatgattttctttcgctaagcccgcatcctccgatggatgttccgaaaccgccaggtgtgggatctgcgccccgacagccccaccttggccatcggccgcctgaggacggccagccatcggggcgattccccccacacattgtgcctgaattcaccctgcctggcgagccgggctcacgcagggaaaaagcacccgcgaccacagggtgttggtcatggcggccaggggcactgcggcagaattttttcctcccttctttgctgcaatctgggtgcggctagagcaatttgtcatagaatctggggggctcatttttccggccaatcacttttagagaaatgagcgcattgcagcagaatgcgctgacgtcagagaccaccccttctgcgcctccatataaaccccacccagccagcccctagcgcagacggcggagagcagagagggagcgcgccttggctcgctggccttggcggcggctcctcaggagagctggggcgcccacgagaggatccctcacccggtgagtggttggccatccttgccgcaaaggatgtgcaaaaggaagacggcatccgcttctgggatgggctctgtcctcctggacatgccgagagcctgcctgatcct

SEQ ID NO: 13072 - DNA, 2300 bp, Homo sapien
agaggcacgttagttgatttccagtggtttttggtttcgggggtcttaggaaggtgtggctcatttgagcaggatggagagagaggctgtgacaaggtcagtgaggggccatcgtgcgggggctagaaattgttgttgtggcgaaggagggaggcacgactttggaggcgtgatgttgatgcctgggggcgaaggcggggagcggcgtggtggccccctttgcgttactttccagcgatgtcacaggttctgtctctcgttccgagaccacccacatgcgtgacagcggtgcctggaggactgggtctttctgactttagtgaacgtgtgtttaattggattgacgaaggtgggagtcgggatttctgcttttccctgtagcaggcggagcggcgctccagaggggcctggcgcaggtccgctgggtggcccaccttcctctggggctggggcccggtggctgggggcgcaggaggcgcctggtgcgggcgggaggcgctgcgccgcagccacaggtgggctctggctggtggtggctggagaggcgtccagggggcgtagcgacctggcgcggtggcctggggtgggctgtggagcccttcctagcctgagacctgttgggcaccccctgtccatccaggcccgccgggcgcgggccggggcgccgcaggtggctgctgcactcctgggttacgggtgcgggccgcgcgccccctagcggtgtgtgccagccccgctaccttgggttttgagttgcgcacacgcacacagctaacacttgtgacctgtcagtcaaatcatccttaccccctcccactcctctcctccacctcccatttctcctctccctccaccctttctcatttcctcgtccctcctccccctcctatttttcttctccctcctccctctttcctcttccctcctccctcttcccccctcattttcctcatctctcttttcccctccccttctctcctcccctctccctgcccccctccttcctccctccatacccctccctcttccctcccagcccctccctactgccttcctcagtcctcccctttgccactcctccctgcctttccctctgcctgcccccttttgctctctgctgttccggtgctggccgttagaggtcacgaagatggtttctaacctgcccccctcccatgccatagggtctctcctcagggatgacatcatccgtccacctccttgtcttcaaggaccacctcctctccatgctgagctgctgccaaggggcctgctgcccatctacacctcacggtacttcaaccctcctgctatcatttcataaccaacgtggcgggcagaatctcccaaccccaccaccatccttgcaccacccccagacccactagcaattaaaagacaattttaaattttaactaatcagctttaattgtaattaatgaacttaaactgtaattatgatctaggcttgggcttttaagcaggttctctaacctttgatcaattgcagagggcactaggagcacggtttcctggatcccaccaacatacaaagcagccactcactgacccccaggaccaggatggcaaaggatgaagaggaccggaactgaccagccagctgtccctcttacctaaagacttaaaccaatgccctagtgagggggcattgggcattaagccctgacctttgctatgctcatactttgactctatgagtactttcctataagtctttgcttgtgttcacctgctagcaaactggagtgtttccctccccaagggggtgtcagtctttgtcgactgactctgtcatcacccttatgatgtcctgaatggaaggatccctttgggaaattctcaggagggggacctgggccaagggcttggccagcatcctgctggcaactccaaggccctgggtgggcttctggaatgagcatgctactgaatcaccaaaggcacgcccgacctctctgaagatcttcctatccttttctgggggaatggggtcgatgagagcaacctcctagggttgttgtgagaattaaatgagataaaagaggcctcaggcaggatctggcatagaggaggtgatcagcaaatgtttgttgaaaaggtttgacaggtcagtcccttcccacccctcttgcttgtcttacttgtcttatttattctccaacagcactccaggcagcccttgtccacgggctctccttgcatcaggtaggggctttgcagagaccatcgacgggctgacttgagtaagaacacgaattatgcatgtggccatttccaga

SEQ ID NO: 13073 - DNA, 2300 bp, Homo sapien
ccctctccctgcccccctccttcctccctccatacccctccctcttccctcccagcccctccctactgccttcctcagtcctcccctttgccactcctccctgcctttccctctgcctgcccccttttgctctctgctgttccggtgctggccgttagaggtcacgaagatggtttctaacctgcccccctcccatgccatagggtctctcctcagggatgacatcatccgtccacctccttgtcttcaaggaccacctcctctccatgctgagctgctgccaaggggcctgctgcccatctacacctcacggtacttcaaccctcctgctatcatttcataaccaacgtggcgggcagaatctcccaaccccaccaccatccttgcaccacccccagacccactagcaattaaaagacaattttaaattttaactaatcagctttaattgtaattaatgaacttaaactgtaattatgatctaggcttgggcttttaagcaggttctctaacctttgatcaattgcagagggcactaggagcacggtttcctggatcccaccaacatacaaagcagccactcactgacccccaggaccaggatggcaaaggatgaagaggaccggaactgaccagccagctgtccctcttacctaaagacttaaaccaatgccctagtgagggggcattgggcattaagccctgacctttgctatgctcatactttgactctatgagtactttcctataagtctttgcttgtgttcacctgctagcaaactggagtgtttccctccccaagggggtgtcagtctttgtcgactgactctgtcatcacccttatgatgtcctgaatggaaggatccctttgggaaattctcaggagggggacctgggccaagggcttggccagcatcctgctggcaactccaaggccctgggtgggcttctggaatgagcatgctactgaatcaccaaaggcacgcccgacctctctgaagatcttcctatccttttctgggggaatggggtcgatgagagcaacctcctagggttgttgtgagaattaaatgagataaaagaggcctcaggcaggatctggcatagaggaggtgatcagcaaatgtttgttgaaaaggtttgacaggtcagtcccttcccacccctcttgcttgtcttacttgtcttatttattctccaacagcactccaggcagcccttgtccacgggctctccttgcatcaggtaggggctttgcagagaccatcgacgggctgacttgagtaagaacacgaattatgcatgtggccatttccagagcactttctatgtgatatgaacatgtgatttttatgtaatatgtgtatgtaaacgaggcagcctcatttccaggtgaggatgcatttggtagtgttgatttttgtaatttaaagaagctgaaagggagagaggacccgtgaggactgaactctctgtcccatggggtagggcttacatttacattaaagaaacagaaacttgctgggaggtgtaagtatttggtcacattgctggcaacagaaggggttggagttggacccagggtgccacgctagctgccctcaccccttcttcccctctggcccagagttatactaagagtccttttatttcaaaccaaatgtttgacaatgggacagtctgtttgaaatcccagctgcctggggtggtcttgggggtctgggtggccccagtgctggtaccatgtgctggcttcaccttttaataacagtgtgaccttaaacaagtcgcttaactactctaagtttcagtttctttcatggtctaaatggagattaaaacacacacacacacacacacacacacacacacacacacaccccctcgtgtatctaccccacagggcgcttttgaagaccaaatgctgtaactactatgaaagtgctttgtaaattgctgtggaaagtgtgagctactcaagcacccgaggctgtccctccttgctcacatgtccagcccaattctcccttagtgagaacagcactcagtaggtgctgtgtgtgtttgtgttcaattaagaaattccagaataaataaaaatgaattaattcaacaaacattttctggggcaccgacaatctgcccagtgcaccaggctaggtatctgatacaaagataatgaaaacagtctcttggaacctaattggggtcctcatttgaccaggaatttctttcgtcccgttttaagccaaccagttttgtccggacaagacaaaaacaacttgggctgctttagagaa

SEQ ID NO: 13074 - DNA, 2300 bp, Homo sapien
ttctcaggagggggacctgggccaagggcttggccagcatcctgctggcaactccaaggccctgggtgggcttctggaatgagcatgctactgaatcaccaaaggcacgcccgacctctctgaagatcttcctatccttttctgggggaatggggtcgatgagagcaacctcctagggttgttgtgagaattaaatgagataaaagaggcctcaggcaggatctggcatagaggaggtgatcagcaaatgtttgttgaaaaggtttgacaggtcagtcccttcccacccctcttgcttgtcttacttgtcttatttattctccaacagcactccaggcagcccttgtccacgggctctccttgcatcaggtaggggctttgcagagaccatcgacgggctgacttgagtaagaacacgaattatgcatgtggccatttccagagcactttctatgtgatatgaacatgtgatttttatgtaatatgtgtatgtaaacgaggcagcctcatttccaggtgaggatgcatttggtagtgttgatttttgtaatttaaagaagctgaaagggagagaggacccgtgaggactgaactctctgtcccatggggtagggcttacatttacattaaagaaacagaaacttgctgggaggtgtaagtatttggtcacattgctggcaacagaaggggttggagttggacccagggtgccacgctagctgccctcaccccttcttcccctctggcccagagttatactaagagtccttttatttcaaaccaaatgtttgacaatgggacagtctgtttgaaatcccagctgcctggggtggtcttgggggtctgggtggccccagtgctggtaccatgtgctggcttcaccttttaataacagtgtgaccttaaacaagtcgcttaactactctaagtttcagtttctttcatggtctaaatggagattaaaacacacacacacacacacacacacacacacacacacacaccccctcgtgtatctaccccacagggcgcttttgaagaccaaatgctgtaactactatgaaagtgctttgtaaattgctgtggaaagtgtgagctactcaagcacccgaggctgtccctccttgctcacatgtccagcccaattctcccttagtgagaacagcactcagtaggtgctgtgtgtgtttgtgttcaattaagaaattccagaataaataaaaatgaattaattcaacaaacattttctggggcaccgacaatctgcccagtgcaccaggctaggtatctgatacaaagataatgaaaacagtctcttggaacctaattggggtcctcatttgaccaggaatttctttcgtcccgttttaagccaaccagttttgtccggacaagacaaaaacaacttgggctgctttagagaagcccagctcagtgtagacaatagctgcccagcctctgaaaggggctgattggattatgtggcaaatggaggtgcaaggatgacttggacggtgacaaatgaagtgggcggagacctgctttgagttaatccaggctattaggaggggaccttttgtcttccagagactggcaggagcttttaccagtggtttttacatccttaatgttcaggacgaataatttatggtcagtgaaaatccaggccccagtgagattcgagtgggctgtaaaatcgagagtcctgctcccagtgagtaatggtagtgaatgtttctgtcactttttgcaaccgtccattcatttgatcctcacaactccctgtcctgagccaggaccggccactgccactcccagggaaacagaggctgtcaagaggctccacagattgggccccactggatcattgaacccctgttccctgagttctagaggaagaattgtacctgtctcagtcccggccacctccagaaggcctccctctgcatttctgactttgctgtgccggcagcctggagcctcccaggtccctgctgtcatcttttctagccactacagtctctgtctttcctttcacagccaagcttcttgaaaggcctgtctacacttgctgtcttccttcctcacctccaatttcctcttcaacccactgcttcctgactcgctctactccgtggaagcacgctcacaaaggtaaagacttttctgtggcttaatccttgtcatgttttcggctcatggacacaaggacacattttcatgccttctctcacagggctctgcgtctccggttcacttctgtgtctttacactcccttcacagagacacttgctccccc

SEQ ID NO: 13075 - DNA, 2300 bp, Homo sapien
atggaggtgcaaggatgacttggacggtgacaaatgaagtgggcggagacctgctttgagttaatccaggctattaggaggggaccttttgtcttccagagactggcaggagcttttaccagtggtttttacatccttaatgttcaggacgaataatttatggtcagtgaaaatccaggccccagtgagattcgagtgggctgtaaaatcgagagtcctgctcccagtgagtaatggtagtgaatgtttctgtcactttttgcaaccgtccattcatttgatcctcacaactccctgtcctgagccaggaccggccactgccactcccagggaaacagaggctgtcaagaggctccacagattgggccccactggatcattgaacccctgttccctgagttctagaggaagaattgtacctgtctcagtcccggccacctccagaaggcctccctctgcatttctgactttgctgtgccggcagcctggagcctcccaggtccctgctgtcatcttttctagccactacagtctctgtctttcctttcacagccaagcttcttgaaaggcctgtctacacttgctgtcttccttcctcacctccaatttcctcttcaacccactgcttcctgactcgctctactccgtggaagcacgctcacaaaggtaaagacttttctgtggcttaatccttgtcatgttttcggctcatggacacaaggacacattttcatgccttctctcacagggctctgcgtctccggttcacttctgtgtctttacactcccttcacagagacacttgctcccccttctctcgttcttagcatcccctaggaacttgcacacccaggtctctcgacttctggacctgcttcttaccatgccgtcttaagcagtcaggagtcgctgcctgggttcgagtcctagttaaattacttagtgctgagaccttggggtaggtaaacttttccaagccaggtttatctcagtttcaaaatagggttaatcgtctttatctggcaggtcaggtgggatgtctcacaggtaagcaccagatgccatttgaaaggcttgaagcaaagtcaataaagcattcatgggaaaatacaactggaggcaccactagattttcgtatacattaggttcccacggggaggaccgaagagagaagaaagaagtggaaagggaggagcgtgcaggagagacaggagaagagaataactaaacaaagacattaaagacaaaaaaaaagtaggaaagggagacttagaaaatattaaaagccaccaaaaacacatccaaagacggtttccccttacgttagttgggctaaaagaaagcaaatgggaagaaggttttaaattgattatcccagtgacaaatcccaggaagctttcacatcaaatcaccctattctgggtttttaactccttccatcgagtttaacctctttacctcccacatcctggtaaaccctgccccctccctaccgccccctttgctggtgattaaatcctgaaggtacacgaagtatttcagtgaatgaatggctaacagaaaagggcctcccctcccccttaccctggcggtgtttttcagttttattccactttccgcccttttcccttaatgaacacagggctaatctcgggccttgtcgaaggaagaggctgcagacgttaatgaggttagctgctggattccagtattcgtcgcataaggatccttctttgtctgcgaaggaaaaacacactgattatcataatgaggtgaactggccaccgccgggccggggcgatgtggcttcttaagccacacttctaattttggtgatggagccgacatttctttggcttctcatttaagtctttgcctctgtcccagtgcgaagtccattcagcggggttgaaagttgcaggcagctttgggaaggggggcgtcggacagggttgcattgtagaaagtggctttgttcgatccttcgcacagatgcaaatggccagagcattcattccctttcttcaagagctgaggactgggggggccactggtgatcagttcccaactctagctctcctctgactcatctcaggacccattgaggacatccaaaactcactcaagatcaccaagtggtaggaaagtactaactcctgggcatagccctaggggagtgactacaatgtgaatactcatggaatgcctagccaggtgaagaagtgaatgcatgttggcatcccagagggaccccccttaagagggcatagtttggggttcagatttgactccagcatac

SEQ ID NO: 13076 - DNA, 2300 bp, Homo sapien
cttccttcctcacctccaatttcctcttcaacccactgcttcctgactcgctctactccgtggaagcacgctcacaaaggtaaagacttttctgtggcttaatccttgtcatgttttcggctcatggacacaaggacacattttcatgccttctctcacagggctctgcgtctccggttcacttctgtgtctttacactcccttcacagagacacttgctcccccttctctcgttcttagcatcccctaggaacttgcacacccaggtctctcgacttctggacctgcttcttaccatgccgtcttaagcagtcaggagtcgctgcctgggttcgagtcctagttaaattacttagtgctgagaccttggggtaggtaaacttttccaagccaggtttatctcagtttcaaaatagggttaatcgtctttatctggcaggtcaggtgggatgtctcacaggtaagcaccagatgccatttgaaaggcttgaagcaaagtcaataaagcattcatgggaaaatacaactggaggcaccactagattttcgtatacattaggttcccacggggaggaccgaagagagaagaaagaagtggaaagggaggagcgtgcaggagagacaggagaagagaataactaaacaaagacattaaagacaaaaaaaaagtaggaaagggagacttagaaaatattaaaagccaccaaaaacacatccaaagacggtttccccttacgttagttgggctaaaagaaagcaaatgggaagaaggttttaaattgattatcccagtgacaaatcccaggaagctttcacatcaaatcaccctattctgggtttttaactccttccatcgagtttaacctctttacctcccacatcctggtaaaccctgccccctccctaccgccccctttgctggtgattaaatcctgaaggtacacgaagtatttcagtgaatgaatggctaacagaaaagggcctcccctcccccttaccctggcggtgtttttcagttttattccactttccgcccttttcccttaatgaacacagggctaatctcgggccttgtcgaaggaagaggctgcagacgttaatgaggttagctgctggattccagtattcgtcgcataaggatccttctttgtctgcgaaggaaaaacacactgattatcataatgaggtgaactggccaccgccgggccggggcgatgtggcttcttaagccacacttctaattttggtgatggagccgacatttctttggcttctcatttaagtctttgcctctgtcccagtgcgaagtccattcagcggggttgaaagttgcaggcagctttgggaaggggggcgtcggacagggttgcattgtagaaagtggctttgttcgatccttcgcacagatgcaaatggccagagcattcattccctttcttcaagagctgaggactgggggggccactggtgatcagttcccaactctagctctcctctgactcatctcaggacccattgaggacatccaaaactcactcaagatcaccaagtggtaggaaagtactaactcctgggcatagccctaggggagtgactacaatgtgaatactcatggaatgcctagccaggtgaagaagtgaatgcatgttggcatcccagagggaccccccttaagagggcatagtttggggttcagatttgactccagcatactgttgaaattgggcacagggggctagtgattagtcaggatcaatcagtggagaggagattaaaactcacatctgggagtccggaatcagaacttgtagttcttttttttgaaatggagtctcgctctgtcgcccaggctggagtgcagtggcgtgatctcggctcactgcaacctctgccttccgggttcaagcaattctcccacctcagcctcctgagtagctgggattacaggcgcccaccaccacagccggctactttttgtatttttaggagagacggggtttcaccatgttggtcaggctggtcttgaactcctgacctcatgatccacctgccttagcctcccaaagtgctgggattacaggcgtgagccaccatgcccagccctatagtagttcttcttttgccccttaatatcttcacccacatgtcctgtaccctgcctgaaccctcctcctctttttgttctgatctttgagctccctagagcccataattctttagagcaggtatgtcccgagtctgaaacatgcccttatttgtcccaagctctggacatttctcaccccaaggcggatcaatca

SEQ ID NO: 13077 - DNA, 2300 bp, Homo sapien
tttgctggtgattaaatcctgaaggtacacgaagtatttcagtgaatgaatggctaacagaaaagggcctcccctcccccttaccctggcggtgtttttcagttttattccactttccgcccttttcccttaatgaacacagggctaatctcgggccttgtcgaaggaagaggctgcagacgttaatgaggttagctgctggattccagtattcgtcgcataaggatccttctttgtctgcgaaggaaaaacacactgattatcataatgaggtgaactggccaccgccgggccggggcgatgtggcttcttaagccacacttctaattttggtgatggagccgacatttctttggcttctcatttaagtctttgcctctgtcccagtgcgaagtccattcagcggggttgaaagttgcaggcagctttgggaaggggggcgtcggacagggttgcattgtagaaagtggctttgttcgatccttcgcacagatgcaaatggccagagcattcattccctttcttcaagagctgaggactgggggggccactggtgatcagttcccaactctagctctcctctgactcatctcaggacccattgaggacatccaaaactcactcaagatcaccaagtggtaggaaagtactaactcctgggcatagccctaggggagtgactacaatgtgaatactcatggaatgcctagccaggtgaagaagtgaatgcatgttggcatcccagagggaccccccttaagagggcatagtttggggttcagatttgactccagcatactgttgaaattgggcacagggggctagtgattagtcaggatcaatcagtggagaggagattaaaactcacatctgggagtccggaatcagaacttgtagttcttttttttgaaatggagtctcgctctgtcgcccaggctggagtgcagtggcgtgatctcggctcactgcaacctctgccttccgggttcaagcaattctcccacctcagcctcctgagtagctgggattacaggcgcccaccaccacagccggctactttttgtatttttaggagagacggggtttcaccatgttggtcaggctggtcttgaactcctgacctcatgatccacctgccttagcctcccaaagtgctgggattacaggcgtgagccaccatgcccagccctatagtagttcttcttttgccccttaatatcttcacccacatgtcctgtaccctgcctgaaccctcctcctctttttgttctgatctttgagctccctagagcccataattctttagagcaggtatgtcccgagtctgaaacatgcccttatttgtcccaagctctggacatttctcaccccaaggcggatcaatcatgattaaatcactccaattaaactttaggctccagtcagaccttcagccaaatggaaaaaaaaactaggggataagggaggtagttggagcaagaaaatgttattagttgaaaccttacgggaccttcctcccttagtgagtctgttggctaaaggttctctggcttcgtgaattagaatcggatactgtttccaagttagcaaaaccaactctaccccagcaccccacgaggaagaatgtggaaggatctcccattggccggttggggcaaaagcctgaggcaatctttcatccccttttgccaaggcgagactttcccagtgacggtgatgtagttggccactctgactatgggtggactcgggtgtagacctctgaagctgagatcacacgaaaacctggcctccccgccatgtagctgttggagagtagaaaaatagagcacgcctgatgtttctaaatgagaagactttcaatagtaatgaagaatccatggcactctcctcaccctcaaacacatggcagtcattcacatacaggccccaaagccactgttagtgctgcagtagctcctgtggacattggaaagcccggagagggcgtggaagaaatcagctggcccccggcaggttctctggggttttgtgcccaaggctcctggagccctaaaaactttcaaaagttaactccccacgtccccatcctgcttgggtttctggacttttctgaggcaccggcagaggggtctcgttgctcccttgagtgtaggggcagccctttaacctggctccttgagtccctgctttttctgcttctgttgccttcttcctcgtcttcctctctctcaatatctccctctctttgtccctccccagttcctgacctggccatcccggggtgcccttgaccagcc

SEQ ID NO: 13078 - DNA, 2300 bp, Homo sapien
tggagtctcgctctgtcgcccaggctggagtgcagtggcgtgatctcggctcactgcaacctctgccttccgggttcaagcaattctcccacctcagcctcctgagtagctgggattacaggcgcccaccaccacagccggctactttttgtatttttaggagagacggggtttcaccatgttggtcaggctggtcttgaactcctgacctcatgatccacctgccttagcctcccaaagtgctgggattacaggcgtgagccaccatgcccagccctatagtagttcttcttttgccccttaatatcttcacccacatgtcctgtaccctgcctgaaccctcctcctctttttgttctgatctttgagctccctagagcccataattctttagagcaggtatgtcccgagtctgaaacatgcccttatttgtcccaagctctggacatttctcaccccaaggcggatcaatcatgattaaatcactccaattaaactttaggctccagtcagaccttcagccaaatggaaaaaaaaactaggggataagggaggtagttggagcaagaaaatgttattagttgaaaccttacgggaccttcctcccttagtgagtctgttggctaaaggttctctggcttcgtgaattagaatcggatactgtttccaagttagcaaaaccaactctaccccagcaccccacgaggaagaatgtggaaggatctcccattggccggttggggcaaaagcctgaggcaatctttcatccccttttgccaaggcgagactttcccagtgacggtgatgtagttggccactctgactatgggtggactcgggtgtagacctctgaagctgagatcacacgaaaacctggcctccccgccatgtagctgttggagagtagaaaaatagagcacgcctgatgtttctaaatgagaagactttcaatagtaatgaagaatccatggcactctcctcaccctcaaacacatggcagtcattcacatacaggccccaaagccactgttagtgctgcagtagctcctgtggacattggaaagcccggagagggcgtggaagaaatcagctggcccccggcaggttctctggggttttgtgcccaaggctcctggagccctaaaaactttcaaaagttaactccccacgtccccatcctgcttgggtttctggacttttctgaggcaccggcagaggggtctcgttgctcccttgagtgtaggggcagccctttaacctggctccttgagtccctgctttttctgcttctgttgccttcttcctcgtcttcctctctctcaatatctccctctctttgtccctccccagttcctgacctggccatcccggggtgcccttgaccagccccgtgtctcctcagggtgtcccagcaccagcctggcacagagtggggctcagttagagtatgtgggatgttggtttcgccaggtgagtgaatgaaaggactcgaccaccacagctgagccactagctgggccatgcgaagagttctaggtgcaaaggctggagggtggaattcatttttgagaggtgtgtgagcagcttccgacccctgccccatttgaacgggggccttgctggtcgcgtccctgcattcacccgcgcggccatcccgtcatccaacagttgatcctaactgagcacgcccacggccctggtctggcctgggcaccggccaccgtagcccatcccttgatggcctctgtgtccccaggagggcgggccggggggttgcccaggggctggagcagtggactgtggctccatagaggtaggccggagggtgtgagggcagattcaagctatccccagggctctgctctggtcggagccagccccttctccctctctgccttccccgccccattcctgatgctgaactgttctggacccctggccctgagtctctcaggaccaaagtgggcacgggaacagctgtagtgtgtgcccccccgggctttggccacaggtctccctctcgaggtgtggttgtgactgcgacccttcccttgccgtgatgccttcctcccccggggcttggtccagctccttcactctctagcagctgctggggcccacctcccatgccgaggaccagcaggggaaacctccagggagcatctgcaggctctgcttctgcccggctgctggcttgctctccctggtggctctccagcggccagcttcctcacccacccggcactccgctttgctctgtctcctgaggtgggcctgaccaacctccccttctctgcctc

SEQ ID NO: 13079 - DNA, 2300 bp, Homo sapien
tttcaatacttattcttttatttatggacctcaggtgcacagaattggattaaccataatctgcggttcctggagccttctgcacactggtccgtgtggggctgtcttttgtttgttaatttctccccctggggatttggtgcaggatttatttaactatctcaggaacccagttttgaattagtcataattcttgctgccttctctcctctttttgtccttgcgtggtccactctcccacatatttatgtctttatttattcattcaatatgtttgtattgcttatatacatcctgtcatacgtttccatattctctcctctcttgctttctcttttgggccttgagtgcacaggatagtgaaaatcatccattctcattcgttcggctgaacgaattctattcaggtcactcctctattcaggtatctgtgcttttattgatgaacctcaacgtttactgtttattatatttaatgggtaaaactgtctcattatatttcagtgcttgtccaagaagtgccttttctttcatatgcctacttcacttttcctttcttttcttacatctctccctctctcgttcttccaattttcccattcctcactccttttcttgcatcctatggaatgcacgcatttattctttcattcagtcttacacttgtggtcatttaaaaaacaaacttcagagccacaggtttgaattaatgtggatggcttgtgctaaaccagtcccctttcatcaacttatttgatctaattatttattatctctttcacttccttttttctattttcattttttcccatcctattgtttctttccaccactccctctttctttctgtcattcttttggagatctgcacccaggatcaatgaccctcatccctgtctacaatgccctcctcatcggtcaatgcaaatcttttctgtcgttcaatcattcatgcattcaccgtgcatccattcagtctttctttctatgtaaatacttatttttacacttctcgaaggcaggtgcacctaactggatacatcgtaatctgcaactaatgggccctctctctgtggccccactcctccctcccatgtgtatgctttgagccgttccttagttgagtaggtgattgaccataccagcagcactggtgccaattaagcggtctgcttggttcacacagcctttcattcctgttctagcatggctctgtcttaaatctgcatgcatgtatttattccttaatatattacctctcttcctttcttcctttttacatttcttcccattttttattgtttctctctctctcactctctcactcattctctcttgcactttgtcttcggagctcattgccatggagtggcttggctgtacgcatcaaaaagccacccgcaaacgtccatccttggccgtgcggttccacgtctcactcattacttccttcctgcattcatagcatccttccttcctgcttgctctctttttattaggcatttattcctctattagtggagtcaggtgcccttatgacaagtcctagcctaactcttctcgtggatctacccatttatccatttggttgttatttctttttaccgttcctttctctcttctgtcatagctttccatacctcctgtccttcattttcatgcagctggggtgcccaggggggaccccaacaccctcatcaggaggacccatggggccatgtcttctcattcacctcatccttgtctatttaggtactcactgacttgttcacttagatgttcattatttaatggacagcctgtggttttctagaagtggaccagccatagcccttaatctgtgatgatcttttgccaccatcgatcgcattgccttcttttacatctttatttaccacccattaatgtatttctgtacttaacatttgttacattgtttcctatttctttatttaccaatattacctttctcatatcctttcatctaacagacctcagtgcccaggactggatgactcaaaacccctcacaacatcttgtcacctggcgctgcactcccactgctcattcatccatccacacacgcaatgtagactttttggcctttttttctttcttttgtcatttatttatttatgtgcagacttcaagtgctcaggcttagataacttttggtaaaagtacactctcatctttcgcccactgggtcctctttctttctttgctattctttgaactcgttctctgtggtttatttttctatgccaggagcatatattatttgtatcagtcctaatgct

SEQ ID NO: 13080 - DNA, 2300 bp, Homo sapien
tccctcacccacatgtttagcttggtatccgagtttgggaggccggcaatgactttcaacatgaattgctccatctacccatccatgcatttggcctacttatcttgaccccgtgcttttggccttttcttctcctgaaagcaaaccctttcattttgggtgggctgtgtagcgccatgggctgtggttatgaagcaaacaccctttcttgtagctgcctcctccggggttactgccctgagcacgtcccagctggatctcgtctgccactgtcacccatagcttcttccccatggtgctttccatgtgtcacacaccacgactgtgacccagggtcggggtcaagagtagcctggggccaagccctcccacccatgagcggagaagtcctccccaggcctcaccttgcctggcgcatggtccctcccatgagctttgctttcagcctttcagcttcctccacagggtggcagtggttgtaactcatccattcatcccttcatcccttcattcattcactcacagccaacagacgtttttaaaaaattagccagtgctatactagagctggctcccaaggacccgctgccgcattgccttttgaaacaaaacaatgaacacgttggtaaaggggccgtgcttgtgtgtcggtgacaaggcgagatccctgagtcaggtcaggcttgtagattcgagttctgttgcgagtttgattgcccctctgactttgtcccctgtacaactaggttgattaggaatcagccaactgtgttccctgggtgctcagaaatcacagcccatatcctcgagaggccaaaatgagagccagggggttccaagatgagtggctgcttctggccgggagcaggttttcaagtcattagaacactctggcctttcctggaggtgatcttggagccattcctgcccctttcaagaggagttaatgcccagctctgtttagagaaaattgggggagatgattgctcatgtgggtgataagaatcacctcccgtgcaggggtctgcatagaacactccataggcaaacctgggtgtccaaggcacgtggcattttgcaaactctgggtgcagctccgagctgtcctgcaggtcccagaccaggtgagaactccctgagttcctgctgcctgggtcgggggtgaggcataggtcttgggggttcaacctggaattctgaatgtcattcattgcattggagaggaaggagagtaggcaaagccaagaccctggaactggacaaactcgtgtggtttaaagtcactgtgagagctggagttgagtctgcctacgggggaggactgcggcacctacctcgcagggctgttgtgaggagcaatgtaaccgtgattttgaactgtgattctggaagggcggtgtgcgtgtccccgggggtgtgccaggggagtgaggagaaaaggccagggagacagcctcactcaggcagctgagtgggagagcatttatctctaaacctggaggggtatatggtgggacaggaggaatttgggcaggaactttcatgctaggggtttgggggactcgctggacaatgcccctggaccccccgggggtacgcgttcacgctcacctctgagaggctggaaacgcctggctgtgctttctgaatgctgtgtgcttcctgcctctgtgcctggcctgtgtgcagcacctacttgtgtccgccttcaaaaggcccttctgggtggcgtccttttccccaaaatattaggcaccagccatcaaagatactgcattgttgcctcccccacccctccccccaactgacaacatttgggctcaaatgcagcaggctgggtgcccaacacagtgcctggcgagtggtagcgcttacgtttcttttctgttgaatggatggatagctaatgaaattgtaaccaatgacaagccttgatgtttataacctttactaagagattattattttgctcttcatggacctgttaacaaccaccatattgtatcttacggacgtttgtatgccacgtttgaagagcaggagccttgtttcggcgtcatgttgatggaacttgagctgtctgatgcgaatctgtgttttatgttagaaagcgcgtagccttaggatctggcagacccaggggccacttaattaaccctttgcctctttgaccctcaatctccttttctctaagccataggtcacctgaaagcctacctcacagggctgttgtgagggccgagggtgggtgtgtttcaacagtgtgcagatgctggctttccctgggaatgggcatatgt

SEQ ID NO: 13081 - DNA, 2300 bp, Homo sapien
caatgcttcacacgaatcatctttatttagttatatatttgttgattcattcttttattgatccaattataataacagaatgaaaatacatgagcagaaagaactggttttcttttctgatggacctcagagttccagacacgtattattcatcatccaagactcatacgccggtatttgtcatcattggtccaggaagggcccactttctcttcatgcaattcgacattatttgttgataaattcagtaattcatgtataataattataaaaattttatggttcacataattcaattctatcaccaatattcgttatatatacatacacattatttgactttttttattttcagtaacatagtaaatatccttaaacaaaccacccaaacaacacaagaacttggctgttactcacactggaatctttcatatcatgacagcaacacaagtcttcatcagggctaaattcataatcagctcagtgcatccattctgaagagtgcaaagtggagaagatgataaaaatattgagacattctttgcatcaatccatacatttcaccattcatttacattgtcactttggcttttattaattaatggtaatatttattaataaaatagacttcaaggttgcaactaactgacagtaataactataacctatcacaatctatgttatttttggtccaagacataacacctttcatccatgcctatattatccattccaatttaaattaaaatccatttttcttaacacgtattttagtaataaacaatgcttcacctccttatcttcttcatttatacactgatttattcatcctgcccttgattcttttacaataatatttttttaaattcatgagcacgaagatcatgaagaagatccttctatatcctgtatcctgacatctatttataagggggaatggaccagatcccattgtattggacctcagagttccagacacatgatattcactgtgcatgactcacacaccaccagtcaccatcactggtccaggatcagccctctttctctattaccatctaaatttgtttgttgactaattcactaacaaggaaatacacctaagtcttcaaaaaaagaatatgattcttgaatatccctaacattcatccatataatcatttccacgaagaccatatttctttcattaactgagctcaatgtttcacatatgcattaattaacctaaagtttttaatccagattttaaatattgcatatttccccttcttttattgtgtttaatactttttaataatatagcaaataacattttaaaatggtcaaaacaagaaggagcattaacgattacccacattggtcttcatgctcctaacacatagatgcagctatagagcttgtaaccatggaatcggctggcaaacatccatcctgaggctcacagaggacggcagatcacaaacagataaaacagtcctccatgatctgtgtttatcatcttccctttaggaaaacatttgagaaatcactatctgaaggataattatttcattttctcttaagaaaatgaacactttgtgcaactttccttgacccagaggttgaccattatctataactaccacctgtatcatccttagtcaaagacgttacagtggggtaccatttatttcccttaggacttcaatgctttaatataatattttaatatgttatcatatttaatatatattaaatattgcattaattatatattaatattagatttttatttaatatattaaagctttaatataatgctttaatataataataataatacatcttgcctcaccacttattttataattggacaatacttcatccccttcatatacgtacatgtatacgtataaattatttcattgatccaattataataatacagtgaagtgaacaaacccaaagaccaaaagcaaacacattgtatattcataggatcacctgaatcagaaggaatgggccagatttcttttgtgatggacctcagagtttcagacatgtattcatcatgtgtaactcatacactaacagtagtcatcattgatcttctttttttttgctattcatttctaccttgtctattgattatgtcatttattcattaataatactttcaaggcccgtgattcacaaaacccagtaacactcttgatattccctatcagtatacagaatcactcaaacattgggtgtttcattaactatcctgttttttatatatgcatcatcaatataatacttcatgtcactcccatatc

SEQ ID NO: 13082 - DNA, 2300 bp, Homo sapien
tttccacagtcctctgttcacacctgccctttctcactcctccgtactcatgccagaacccacatcacattgtctgctatgagctgccaatttatcccaaagggctatgagcttcttgaggacaggtgttctttttatgtcattatagcccacagaaggtctagacatcagggaatgttaggtgaattaggtgttcatccagtcattcatttatgcaaaaggtatcgggccctttctgtgtgctacaggctgggtggtagaaataagtaacctatcttaaaagaagtaagagagacaccacctctgctcttatagagctccaagtcttgggtgagagattttaagcaaatgtttctggcaaaagaatttaattacactcgtgataagtgctatgaagccatggctctagggactgtcattcgcttggccagctgggttggtcctgatgctcacaggaagttccccttgcttctctccttggctttgaggagagactgagagaaggacaggactctagccatggtcagagatggccagtggctttggccctctggggtcaggtccgtggggtgtttggacatctaggaggaaagagaaatgactggacctgggggtttgtgcttggctgttacttgagttctgcttgataatgacctgggcggttgtgagccgtcaaaccctgcccttcactcaagcacctcacttgttaacaaaatctctgctgagtgtcagggtttgatcttccctggtcagcttccaagtatttctctcagatattttgccaaatgacaaactaaaggtagactggaatatgagttgaccttttctttttcttccactgcatttcattctgagtttcttaaagtggttgcctgagaaacagtgatatcctgcaggcagccgggccactgggcatgtgctgttccaggcatcatcccagctgcctcctccttctgcctttgctgttcagtctccaccaaagcacccatctctcctctgtagcacctccagtgagctcgcaggtcccttttctcatctggaccaccatgccgcccaggcttccctcatcttgggctggtctttctgctcccacctccactctgttctcttcctgggcgatggagttagagcggtctttctagaatgcatgacccagagtccctgctcctgagagcccgctcatggctcccacaggccccaggatggaggcccagttccttccctcctgccacgcctcccactacatgccccctgcccttgtgtgctgcctggcagagcctccccgggtctccgggcgtgtgtgtctctatgcctttgtccctgatcccctccctgtggtcaccctcccactgctccatagatgcaagacttctcttgcttccctccccaaggtgggctatgttgccccacactctgaactgttacaaggccatgaacttgaccttcattcataacatctgttgtttggtcatgatttgtttaggtgtctgcttccacaaccagaccttcagctccctgggtataggtgctctgtcctgggcacctcagactcccccactgtccagtacacaacccagtgcagaggagctgatcattaagaacgttagttgaattgaaggaatgagtggatgcacaaaaggatagttgtatggtcatactggggcacaaattatatccctggcagagaactggggtccctggcatggcggaatagcacctccttctccagccaactccactttgccttccacctgcgactcattaagagatatgtaaccttaatccttgaaattgcctgggacggagcatgttttcactcaatggcatgaacatggggatttttttcctttcttaaataaatctcactcccccaggaagcttggacaggatgtgggcaatcgaactagctcttgaaactgaacgttttgcaaaaggcccctttcgaaatttgaaaccctgtggccaccggccagagctgagtctggcttgtggggttcgcgggggcctcctgaaagaagggaaggaaagattgaaaataaacctaggctgatggtttgtgagacagaattccgaggtctggttttgcttctctgatgaaacttgagtgagcttggctatcctctttagctcttctttcgaacctttggccgaaggctccaaccctcccaaaggcagaagggagcttaatttgtcctgaaatggatgggacaagtgtgcaggcactaggtgggatgggagctttatctcagtttgggaggagagggaactcagggccagggccagcgattgtacagtcccac

SEQ ID NO: 13083 - DNA, 2300 bp, Homo sapien
tctgtcacagggttcccctgtcctcctctgcgaccctggcccctggcccactcatttgcgcgcagctgtgctctacattcccaccccctgctccctgcaaaaccccactgccctgcaggctacaaatccaaagattgggtgctcatcagagttggagaagccatattggaggggaggggtcccaaaggtagcagcaacccctttaaagccatggagttgggtgccaagggccacccggggccctctggtcccctgctgctgcattaaaggtctcctggcttcttctccttccaggcttcctccttgccatcctttctcggggactgtggcttggtcatgatgtgtggcctgggtttggatttgtattgtgaggaagaggagacagagtggggtgtgtcacaaaggctgagatgagcaggaaatcaagccttgctagttggttttctggagtggaattgagccttaagaaatgagatttgtgagggccaggtgtggtggctcatgcctgtaatcccggtgctttgggagaccaggtgggaggctagcttgaggccgagagaccagcctgggtaacatagcaagacccagtctctacaaaaaataaaaagatgagctgggtgtgttggtgcatgcctgcggtcccagctactcaggagtctgaggtgggaggatctctggggtccttgggatgcccccctacccccacatctagcgtggctttgtgccactgcactccagcctgggtgatagagcaaggtcctatctctaagaaaagaagaaagaaaaaaaaatgaggcatgtgagctggaaacaagggaagcagaggtgcttcatgttccccagcgcaaccccgcatgaccccccagggagctgtccctccttccctgcttccctgacatgggtggcgtctgtgctgccacactggccactttgctgaagcctgccagtgttgccggcggagggggggttgcggtgccacttgccttctttacagagaaggaaactgaggctcagatgagtgcagacagcccaagcctgtatcaagtctggggcgcatctcacatccccacacctgcctccagtactgctcaccgcacccgggacacacaggtaggggtttgaagcagaagctggcagcggctctgtctgcagaggctggttgccttgtctcgcacctgtgggcttgggtcagggcctctttcacgtgaaggtttccatcccgagagcactgcagcacatgttcatggtttgctcatcaggacgaaagaacttacaaaactttcctgtccaagttgaccaacttggtgatttttcataaagccccgcagcaaggcatctggaaagctcctttcctgctcctgacagtcaccccgaacggcatgtttccaaatccacagaacatatgggctgcagagctcagagccttgctcctggcccagccaacaggatgctctcttctttccctggcgtgggtacaggggccactctcagctgcctgggcttgcccccagccctagagccttgcctttggtacccactcgcttgcctccaaattcctgcgtccatgacctcagggacagccccccttggtgctcatctgttatgaataccagcccatttttttcccagcaaggaaagcctggctgagtcagttcctgggccaagattggcatggaaggaactctactgataggagcaggcagtgagcatgcaaagcacagctcctaaacccagggtcaggtcatagccagtggctgtcagagcctcagatggaagagccagcgggaagcccccggcccacctggctgtatgggacattgacccggcacagggagaagacccagggggatgtaagttagttactcttctagctctgggttggaggctgggcttatgcatgggcactgaatccttaaaaagttaaatgaagatactaaaatagagccactcatggactcatgttgattggtgtcagaataaagactataatcagtccaattctgtgtatatttcagtttgaggacaatgatagtaataacaaaatatagcaataacttgactggtctaaacctcagtgcattgctctacttggccaaacctatataccccccttcccccatgttcctttatctcaatgaatggcctcagtaatcctgaaaccaaggtcggctgcatcttcttcctccctgcaccctccaggagcaatccatcagtaagtcctatcagcgtgacaccgtgaatgcctctcctcctcgcttccttccagttgcccctgcctggtcacaggcctcatcctccct

SEQ ID NO: 13084 - DNA, 2300 bp, Homo sapien
ctgtccaggctctggcccttccttccttaaaggcccacatcctttgcattttcctttcccaggggttcacaattcccaaggggatggaatggctcttgttcagcaaggtcatccctgataaccctataaaagcagctccccttgcctcttccctatcacattctaccagttgccccgttactgttttcttcctagcttacagttctctgaaattgcctaatgttaatgtctaccttctttgtgccctagactgtgagatttctcattggcagaaatttctctctctctctctctctctctctctctctctctctctctctcatcccctgctgtgttcagtagcagaacagtgagtgtttgttgattgactaatggagtccccaaaggcagggaccggatcagatgaattcccaggcaggtgctgggcacaaagcaggcagtcaataagatgtggtgatggagtacatgaatatgttaattgatttttagaaattcttcccatttgttcaaagctgtttggttttctagctttttctgcccttccaggatgaggctgagattagctgcaggaggcacgagtcagttgggtctgggttctctcttccacttgtcggggggtgggggcaccaaagccccagaggaagtgacaggccctgtgttcccctgcagatgccgactgatcgcgcccccgcccctccagcaaacgccccagcgctgagagccaaatgctctggggaactccatctgcaacgggctggagcgtggtgttagggctcatattttatgcatggggctgactaaatgggaacatttggagatgaaaattgctgttaatgcatctacacatctttggaatatattaaatgtgtgtgtgaggggaagagtgacattagccttatttaatagcttcaatataaccatccccgcacaccacggcgttaacaggcacggcccccccgccgagtctcccaggccaccactcaggaagagtgctgggtgcatcacgcgccacttgagaattagggggtgagtccggcgtcggcccggcatgcagcagcgtgcatgttccccgccgatttctaacccaaacacagtgaccctgtgccacttgatgcagaatttcattaaaagcaaaaatgattgatttatctattgtttgcggagaagaaaaaataaacaaagggcctttctcatcagataagccaaataagaacgtgtgccccacaggtggccaggatgaaagtctccatggacccttcaaccagaggctctgtgacttgtcccgtcttcagtgcggtgtgtaaaccctgccgccggtccaagttcacgaggtgtgctcccttctccagtgcaagggcccggtttatccccactatgtctcctggacgtggttgggaaattgaacaacctggacctccgttcccatttccttgttgtttcagcgggagataagaggagaagtaatagctgtcgtgttggggcgcttgccttggtcctgggccccatcagctgctgtgaggagacagtttcttttccatagttgaggaaatggagcgcagagaggttgagtgagtcaaccaaggtcacccagctggaggtggggcagggtctggctccaggctgtgtgctctcacccaccctgcttgcacgggctttaggaatagcccctgtgtcctggaagacagatcgctcaccgaatgggcctcttttcttggtatcatatgatgaggtaggctcactttcccccagacttagcttgccagaatattcatggttttttctctgtactcacctgtcatctctccaacttggtgccatcacccatgaagtgggatgctttggtgcgtgtctggcctggggagagggctgcttgctttgtcagaagactcaaagcatgatgggcatccaaataccaaagacctatgttgacctgtgtttttcactccgcttgatggcagttgagggctatattcactgcctcagttgcatggagtgaacaagacctagtgaaggtggtgggtgcgctgagaccatctggttgatctctcctgggtgggaccaggtgctcccctcaccacccccacccttgtctgtgtaccaccactctgcacagacacgttggctggtgcagtcctggagacccacggagctcacggtcgtcaggggtcctcaaggattcagagaacccccaaatgtcagggctgctcccttcttgtcctgcctctctgctcacacccttggacaggtaagaaaactgaggtccacagagggcagggtgcattgctgtggcttttgttctg

SEQ ID NO: 13085 - DNA, 2300 bp, Homo sapien
tctgtataacgacccactccaacagagtgtcagggcagttgaaaagttgatcagatcttctcactctccagcctgtggccagatcttagaacttctaaagttatgaagaagaggataaccagggccgggttcccccgctgaagctctgcattggtcagcttgagtggggctacgctccagaaacaggcagcccccagagttcagtggtttccaaccacctctgttgctttctcactcaccccacaatccatattagtggccctgttgtccctgctctggatatgggtggtcctcacagtcctcatccccacactgctggccttgaggccgtggagaagcacccactggctctggaagccgctccctgaaagtgaaacacaatgtacccacccacacgtcgttggccgagccaagtcctgtggccagccttgacgtcaacagcatggagaatgtaatcttcctgcagagaggaacagcagatagttggaacaatataaccacctgccacaggctggaagcttgcctcccccaccttcctctcgccccccagggaaggtcctttccgtagagtcctctgggagggaactgcacccagcctgctagttccagcatggaggaatgcccacggggacacagctgagggttagggacgcagaggtggctttctcagagcagtcgcccagacctctggaaggagcagcgtccgtggagaccaaccatcacatatcctttatttatatatgtttgagatgtgcacttaagttcagacagctgaattcaccctactccttactctatggcacaacattaccaattgcctatcatattttatgtcaccaattctcaccttctgttccccatcctcatccccaccatactcgtgggaaggtttcatatatgttcttgaatgggtgtttaactttgaaacacatgtagcttgtttttgtgtgtaagtactgcttccaatgtgagtatgttttgttgtgccatcgagctcctgcttctcacttttttcattcaacaatatgccttaaaaatctgtctgtgctgcttgtggctgtgtagacttctagttcagggattttgacaatttcacggaattctgcactgtgcatcttcattgtacttacccatgccccgggggtggacacttaagttgtcatctctgcaaaaggagctgggacaatgatgcctttggtgtcccctggcccctggatccgtgcttgagtttctcaggggcatgttttaaggagggggattgttgagtcaagagccacacaaagtaacgtgttaagtgcagccagatcactatcagctgctcccagcaacaatgagttaggctcctgtttcctcacagctcggtcaacattagtgttacccaacaatgttttgttttttgcaaaattggtatcttattatttttgcatctccctcccaaattgctattgaaattgagtatcacttcacgtacttgttagcttttcagatttcccttctccgaattgcccactgttttctgcaggtctcccatctcttcctcattgatttctgacagtcccttgtatgttctagatagtaatcctttatcaatgccagcgttgtaaatagcatattacagtccgtagccctccattaactttgagtctattttctgcggatgaaatatttaattctgacttagtcaaccccattagcattttattctataggctgtgctttgtcaaagaccctatttaagaagcctcgcctccacctgaaaatcacagggtattctgcacacttctaattaatattatagttttatcctcacacatagtattttaatccatttatatttaacccatccagactctctatgtgtgtggtatgaggtgttaggaaatcaatctaattctctctctgtacagtgagtcagttttccctacatagacaataaaataatgtatcccctcccctctggctggtgactccacctctatcacacactatgtttcctgtgtgaaggatacggctttaagccctcgattctgttttcattactatgatgtggtaagtggaattctaagatgccccctagaatgcatatgatctcttctccttgagcgcaagggccccctgtgacctctggaggggtatcctcctttgattaggtgactaatcgggtgacttggagttaataaaaaaaggagacaatccctggagcctgcatcaggtgagccctgggccctccctgaaagacatttgaggtgtgagagggctcagatgagaggaagcatccccatgtttggcttttgggtttt

SEQ ID NO: 13086 - DNA, 2300 bp, Homo sapien
cttctctctctactctcctccccgcaaaaaagaggccagaaaagaggatgattggctaactcagaggtgccctgatggaggggagcaaacaaggggacttccaaggagaattccctagcccacctgaaagacccctacccagagtggtgaggggcagcttaggagcactgacgcaagggggagagaccaggctggcttccctctacgtagtaagttcctggggtgtgcgcccctgccccagacagcagagaaatcgcctgactgggagatggagaagaggggccaccttctcatgccaccccgccgccaatcctccaggcacactcgggcgcttgacctgctgaagcctgtagcctcaggtccagtgaggagctcacgggacagagggccctaccagagccacgaaaaccggagggggggacctccgcccaaggcaggcgtctctgcgcgcccgctggggccctggtcctgcagttggcttctcccgacacgttccttcgctgccgaaagcgattcgcccgcgctctaccgagcccagccagctcctacctcggcccgggcggcgagcgctgtctccgtcccgagaagaagtttcgcggctggtcccggggcggcaggcgcacgggacgctggcggcggcggcggcttccgacttgggctcagaccccgccgctccagacaagtccccgcgactgcgacagtgtctcgggcagttcagctccccagacgggagacagaccctcgcgacctggttcaggccttgccctgggggacactgcagtccaaggcgaaaggagacttgctcccggcctctgggtccctaggtcaaggcacctccccgccccgccgcccctgagcccaagtcgccaaccccgcgccgcgcgcagcgagggatcagaaggtctcggacgccgcggcagggccggccagggccccacgagttagggagttgccccgcacccctaaacgctcagcacccatttacggttgaaagtacgcacttgacgcgtccgggcgcctccgcggtgagtcgcgccgccgctctcggggtccgcgaaggtggctcagttcgggcgctccagtctcgacgttcccggggtagagagcaacgtccggggacgaacgggacgggtgcgcccagcggccggggctgcgctgggcgaggcaagcggcgagaggggagcgctccggcgttcaggcaacagctacccctagtgggagagccgcccggggccggcgccgccccgcgcccgctgccccgcgccccacgcccgtggcgccccgcgcccgggtcggctgggggcgcagggccggcgccgctttccccagctctccggtctccggcgcccggcggtaacccgcccgcgggctctgccctccgcacctctcagcccggccccggcggccgctgacccaggaaccgcggcgccccgctggaacgagatgggacggggcgggcgcggccagggcggcgcgggctggggcggcgcgcggcagcctcgggcagcggcggggggcgcggagcgcggtgtgcgtggcggggcggtgcggggggcggccgtgtgcgaggcgcgagtgtgagcgcgcgcgggaggcgggcgggcgggctccggcaggcgagcggcgcccgcgggcgagccaggaaggcggcgggaacgcaaagttgcctcctcgctggcccgcgtcctcggtggggcgggagccggggccaccgaagcggcggccgcggacccggcctcccgcggcacctgggcagcggccccgcacgagcggcagcggcgtgggcggcgttggcggcggcgcgcgggaagcgaaccggagctccggcgcggctcggcggccgccggggagctcggctcaggtgcgcggcgaggggggcgcgggccggagccaggcggcggggaccagggcggcgcgcagcgctcgcgccagctggaggacctccccagcggacgcccaggtccctggtcgggctcccggtccccagcggcagcggctgccggagtcccccgcccccgagagctggctgcggggcccgggcccgcccccaccggccccaggcccggccgctccgccctccgcccgcctgcgcccgccctcagcccaagatttctagggcattggccgcgctgctgggtgatccctccgggctcaagttgcaagggggcgggccgggccggaggtggagtctcccgccaattgaagcctccgctataaattgaactccctgcactgctgaagcccagatgcctcgccaggccacgtcgcggttggtggtcggagagggcgaggggtcccag

SEQ ID NO: 13087 - DNA, 2300 bp, Homo sapien
cctcgccaagcgtgacttggtttgaggcgcttgcacgtgggcttcgaaggctcgaaggcccagcccaccaagttcagtcaattgtccgttggatgtttacaccctccggggccgagcgccgtgcagttgctcatcatagcgttccaaccaagtgcgcagctcagagacctggtagccgtcggggccacggccgccctggtacataatagtgccactctggatgacatagagacgctcgaagtaggcgccataggccgagctgctggagttggccatggtgtcgaggaccagagcgcagccgggtgcaccttgctgcagtaccctcgctgcgctgacccggtcctccaggctccggtgctgtgggatgatgtagggagagtccgtggtgacccagccgtcggaggggtgcgcttcctcgatgtagatgatgaggaagtcgacgtcgcgctggtacttagtgaccaggcgctggaaggcgctcatgcgcgccatgaacggtggtcaggtgcagctgccgaaattgagaaccagcgggcggttcccttgcgcgtagtcgaggatgtgctggctctggaagccgtcgggcagaaccacctcggagttgggcgccggaccgccctcgtgcgcctgcttgaagaaatccaacttctggccatgccacaccgccttgagcgacgccagggtgcacaggcggttgtcgtcggacacgcagatgggcgggtcatcgggaggcacctcctcgccttcactgttgagctccacttcgggctcgggctgcccccggcggcggcggcccaggaaatgcttgcggatacacaagaaatcgagaagccagagcatgaaggccgtgccgaggaagcgcgggaagagcacgaggcacgaggcggtctgggcgcagagcctcaaggagtgaagcagcagggagcggagcatggtggctgcaggccccgaagccccctgggacccctcgccctctccgaccaccaaccgcgacgtggcctggcgaggcatctgggcttcagcagtgcagggagttcaatttatagcggaggcttcaattggcgggagactccacctccggcccggcccgcccccttgcaacttgagcccggagggatcacccagcagcgcggccaatgccctagaaatcttgggctgagggcgggcgcaggcgggcggagggcggagcggccgggcctggggccggtgggggcgggcccgggccccgcagccagctctcgggggcgggggactccggcagccgctgccgctggggaccgggagcccgaccagggacctgggcgtccgctggggaggtcctccagctggcgcgagcgctgcgcgccgccctggtccccgccgcctggctccggcccgcgcccccctcgccgcgcacctgagccgagctccccggcggccgccgagccgcgccggagctccggttcgcttcccgcgcgccgccgccaacgccgcccacgccgctgccgctcgtgcggggccgctgcccaggtgccgcgggaggccgggtccgcggccgccgcttcggtggccccggctcccgccccaccgaggacgcgggccagcgaggaggcaactttgcgttcccgccgccttcctggctcgcccgcgggcgccgctcgcctgccggagcccgcccgcccgcctcccgcgcgcgctcacactcgcgcctcgcacacggccgccccccgcaccgccccgccacgcacaccgcgctccgcgccccccgccgctgcccgaggctgccgcgcgccgccccagcccgcgccgccctggccgcgcccgccccgtcccatctcgttccagcggggcgccgcggttcctgggtcagcggccgccggggccgggctgagaggtgcggagggcagagcccgcgggcgggttaccgccgggcgccggagaccggagagctggggaaagcggcgccggccctgcgcccccagccgacccgggcgcggggcgccacgggcgtggggcgcggggcagcgggcgcggggcggcgccggccccgggcggctctcccactaggggtagctgttgcctgaacgccggagcgctcccctctcgccgcttgcctcgcccagcgcagccccggccgctgggcgcacccgtcccgttcgtccccggacgttgctctctaccccgggaacgtcgagactggagcgcccgaactgagccaccttcgcggaccccgagagcggcggcgcgactcaccgcggaggcgcccggacgcgtcaagtgcgtactttcaaccgtaaatgggtgctgagcgtttaggggtg

SEQ ID NO: 13088 - DNA, 2300 bp, Homo sapien
taactaggggcatcgctctatcctcaaaattgttttggagacaccattaacccacttaaattattaataaaaaagccacttattccgcacaaatagttgagactgtcctgcttacctacagatattcgtctaagagccggcagacattcagatacccgcagacagaacttactttctggacctcccacaacattcctccctttagatcttttttttcttaccccgtctttcagctttctcattgcagaactgctgagaataatggaaaatgctttgcctggaaacttccaagaacaaaactccgggggctaagagaacgcgatgatttttaagctgccagttaagatgcagctccttcatcatcacaggtgaagcaccaatgcctctcgcacgtgaaatccgtacgctcctagagtcttactacctaatgcatttctgcaatctgggacgcctgtccttagcgtcttcaatagttttgggcacgaggtggaccgcggaagtattgtattgaaaagttaacgtttttcccttggacaccctctcctcacagctattaacaagctgagagaaatcaggtgactcccagtcatgcagaggtttcctcaccatttatgatcaagccaaattaaagaataaaaataaaatcctattggcgcagcggccaccaagtctttgaggcctcgcctcggtgggcggggccgacgccggaggagaggggctgcgcatgtgggcgtgacctcgcggaaggagctgcggagggcggggccgactggagaggggcggggctgtcgggtgggtgggacctcgcggcaaaagctgcggagggcgggaccaaccaggaaaggacgggactgtcgggtaggcgggaccttgcgggagaaactgcggagggcgggaccaaccagggaggggcgggctgtcggatgggcgggacctcgcgggaggagctgcggaaagctgagctggtgaggggaggggctggtcgaggggaggggctggtcgaggggaggggctggccgagggaaggggccggccgaggggaggggccggtcgaggggaggggccggtcaaggggagggcccggccaaggggaggggccggtcgaggggaggggccggtcgaggagaggggttggtcgaggggaagggctggccgaggggaggggctggccgagggaagaggaggggaggggacgggctggtcgaggggaggggaggggagggcaggggacgggctggtcgagagaaggggagggcaggggacggggtggtcgaggggaggggacggaggggaggggagtggagggagaggagggaaggggaggggagggaagggaggggaggcggggcccagcggtgtcccgcgaaactgccgctcgctcggttcccgggcctccccgtgcgcctcagtgcaaagcgtgccaggcactcttgactgcaacgagagccgcggcggtgagggggcaaggccaagaggccacggttcgcgtttcgccggctgcagaagttgttgccatacatttcaaatgtgcatttcctacgtctcacgctctgtcttgcgcctccacagcgggccacggccctgtcaccgcagtcgcagccacatgctccctcccctgagtcggctcagctctgctcagcggtcagccccgcgccaggaggccgcggcctgcctgaggccggctcgcagcgactcgggacggagggcgggggcgtgaacgggtcgcgcggagagggtggggggagcggggagcgttagggtacgtgggggcgcgtcgaccaatggcagggcgctgttgagtgcagcggggcggggccgggcgcgggggtggggcgagcggcgggcggggcggggcggccggccggggggtgggaggagaggggcggggcgggccggccgggggaggggcggagagacgccgccgctgccgccgccgccgccgccgccgccgccgtggctgccgcagcctctgggagtctggaaaaggggaagcgagagcaagcgaaagactcagtccccgggcggcggcggcggcggcggccgcgggggcgcgacggccggggcgggggcgctgctgctgcgggggcaggcggcggcaggggcggcggcggcggcggcggcccgctccagccatgccgaataaaaacaagaaggagaaagtgagtccgggcccggccgcgggacggagggagcagggagggactgccgggggagggcgcgacggcaccggggtcctgcgcccgggccccggctcagttccccgcctgacgccgcgggcttcgcgtccccgagggcggccg

SEQ ID NO: 13089 - DNA, 2300 bp, Homo sapien
tagggtttcaaaagagtgtggggtaaatcactaataaaggcaagatcctttgatctgagatcattaggaaaaatacatcaaaaagtgtcttcactgtttctttgactcctattccgtatattatatataaagctcttaggagcctttcccccttatttctgtattcccactcatcagcacagttgtaggataggcacattttttcatcttatctcgtatgaaatattaaatcattggagggcaggtctctgtctccttaaagcccagatcttcaataagcatctgctcctgggctccttcctgagcccctgaacgcctcgttcctaattgtgtctgagttcatctggcatcactcagaggaggaggaggaggaggaggctggggtgtggggcagtgagagtcatcaacactgcttcctagtggtcgttggtgatcggtggccatcccctccagacagacaacccacaggtcagcagtgaaggcttagaggcaggagggcagctaagatctaaattcctcttacccaactgaaagcacgtgctctttaaaaaaaaaattaattctgctgttcagatagcagcaaagtcagagcaggtgtgaggccggcagcctgctcaggtggtgcgtgcccactgcccacttgtgttagaaatcacatcatctcctggccggccatggaatccagcactgtctgtcagctctggggaaagagggggaagggtgggatttggtttgcttttatctatttattttagttgctattgatacacacaataaaagctacattcttgtgagggaggacttgattagcagccctgaagggcggtagcagttcccttactcattgaatgtatctggcgctaaaccctcagctggaactgcgagccctagctgtatttcaggtgtttcttactctactgtgaattatgtttaggaactaaagggcttttgtatccttcacaagtggggggaagagagcaggggaattgtgtgagaaactattaaaaatgaggagccatggtttggacaaacttccttgttggtgtgaagaaaggaggaatttttttcagttccacctgccgaagaggcttttcttatagttcgttttcatttggaactactaataacactcatttttgtagggaatcatctcaccgcaccccctcatgggatcctgcaatactccatccaattcagaaataatgtttttctccttggaatagctttttacattaactgtatttgaagatagaaaatttagatctgaatagcagcttttaatagccccataaaaataagtgaaaatatctttaattttaaatttaaacaaaatatctaaaacttaaaaggtatttaatatgtcagcatatttgcaatacaaaaataaacatgctccatttcatttttttgctttcttactcccacggccaggtgatataaatatttcaatttgtgtcactttctagctatcgaatttataaagcggctttcattttctacgtaagtttttaagcttaattttttcagggaaaaaatagatctcaagaaaaaaagtgtttgggatcataagttaataactcatcctattggtaagggaagttgaataagagtccaaactaatggattagaattgtgtaatatttgcttaaccatttgttaaaaaaaaaaaacaaaaaaaaaacactgggttgccagaatcctacctaagatgcagatattaattagaactagcaagtcgaagttgcacaggtgggtataaaatgaatttgggatccctcactgggaaatgctaaagttcacacagacatatacacacacttttttttttttttttttttttttttggtggctccctcgaaatcatttgtttacagtctggccaaggttgtggcctccagtattccccctaagagatgggatctttgcctaaaagttactgagaaacgaaggctgcaaaaagccggaaaatatcccagcttttaaggcacactgacagccaaacagaacgctctttccgtttgcagtttttttagtgtcattttaagttgcagcttccggccaatcagcgagcttcatgcctgctgacatcacgaaccagccagttccctccagctgcagagagcttcagtttgtctttttttttttaaactaaaatggaggctggtttcttgccttaaggagcccattgcctttcccgctgaagtctagatgttgacatgtaataaagcgggcagcaggatggtggtggatgcggccaactccaatgggcctttccagcccgtggtccttctccatattcg

SEQ ID NO: 13090 - DNA, 2300 bp, Homo sapien
ggatgggtctgcgtctcccagtccactgactcaaatgttaatctcctttggcaacaccctcacagacatacccaggcacaatactttgcatccttcaatctagtcaagttgacactcagtattaaccttcacaccagctttttccttctacctgtgcatcacctcattcttcccgtggagtctcagtgagaggaggcggggcaagaagtgatgtcattcatctgtagaaagcctgagatctgtgcacctcggttaaaggtttggagactcccactgtgcaccaggggagggaaagccccgctggagcagccggtggaggaggacagagtccagtggcaggcccacctccaggcccgcccctccccagccagcctctgctcagctccaggctccttccacgccagggctctgtagccagtgttggagcctcctggaatgtcttttttacaccagcccttccctcagcctcccaggcttcctgaaacatcccttcactgggaggctctgcctgacttggcggtgggtctggtctcccgcaagggcagccaccatgtcagttgatttgtcgcacgccccaccccactgccagtttcgtgctccccactgcggtggcaccaagtgaatgtcaatagaggaaacagttcctgttgtttctttttgttcctggaaagttcactaaatgagcagtttcttctacaagttacagcttctctggtcagcttgcctctaaggcatctgactccaggatgttgcgaggtagtgacacatcctggtgatggtggggacggtatgatggcgtgtctctgtgagataagagcatgagcaggtcccacacagcctcgctgcagggccagggtgtggacagagcacgggccatggcctggagaaggggccaggtgtcagccacgcccaacacgggcctcggggtcctttcttagtcacagtgaccacgggaaaagaaaaggggcatctgagacagacagatggcagatgagaccccccctgccaaaacccacagccctggcccctcccatcccgtgccggcttgcacagcctgcgtcgggagcaccctgcctttccgtctgcagtcattagggcccgcagccccggcctctcccatcccgtgccggcttgcacagcctgcgtcgggagcaccctgcctttccctctgcagtcattagggcccacagccccggcctctcccatcccgtgccggcttgcacagcctgcgtcaggagcaccctgcctttcccctctgcagtcataagggttgcattccctcctgacctgcacacctgatagggcatttcggcgtgagagcctttgattttgcgtgtggctttcctttgaactccttccaagtaccccacatctcgtttgtaaaatggagcccggtgctggacatagcccagacctgacacattaactataacagagaatgatgtcactttcctaaatgttatgtttctattttatgtttcttggtatcatgattcctttttaacaagatcattacttgcctggtatacttatctatgaaaacataatatacattatttaacatacaacaggtacaatttaaatttccagtcttcttgacctaaaattaaagctctacctaacatatttctgttttcttaattctagtaggttttgttcagatagcagaatcacaaatctattgaacatctgcatttaagaagtagaaaatgggccgggcgtggtggctcacgcctgtaatcccagcactttgggaggccgaggcgggcagatcacaaggtcaggagatcgagaccatactggctaacacggtgaaaccccatctctactaaaaatacaaaaaattagccgggcgtggtggcgggcacctgtagtcccagctactcgggaggctgaggcgggagaatggcgtgaacccgggaggcggagcttacagtgagccgagatcgtgccactgcactccagcctgggcgacagagcaagactccgtctcaaaaaaaaaaaaaaaaagtagtagaaagtgttttgtaccttaaagaaccttaggaaatacttaaatagattagtattccaaagttattacgcataatttacttgagttctcactaaaggcttggtgctagaatatggcatttgtgtctgtgtgcatgcttttgatagtcttttctgtaattgtgtgcatgcttttgatagtcttttctgtaattgtgtgcatgcttttgatagtcttttctgtaattgtgtgcatgcttttgatagtcttttctgtaattgtcctgatacgcgcagtcaaaagcaag

SEQ ID NO: 13091 - DNA, 2300 bp, Homo sapien
acactgattgttcgggttctttcagttcccatccacttagaaataacaaacatgtttcattttgagcctatcctacagggccgcaaatccggagcctgcagtttgttctcttggcctggggccaggttgcagatgtttgagtcccttggatccctgagtggctgcgtctcccagtctggtgctgactcatggtgcagccagcatgcagcctgcccatcggccaggtccctgcaggtttctgagtctcagatggtggatggcctattcagagttcacagatctgcacctaatagactttcctctttgtccctctttctacccctaaagtacatgtgaggggaaaccctctgcatggtgcctagcacgcagtgaacactcagcgttcgctgtcagtggtgtgttattattattcattaccattaggatccttgcacaaactcatcgcagttgcctatttattttttccaggaagattactcggaactgcttaggcacatcacaccagggcggactgatggagagcaggaagatggggtattcatctgtcccctcttccacatgctccttaaagacaagaatcatctgattagtctccgtgttccagcaaccccctgggacccagcaaccggtaattaggcaaggaataagcttattgtatgtttcacagtttttcaaagatgatttgggagaatcaaatcataccatcatcattccaccaatcaggactcggcactctgacagtgcactttgatgtttaaaaaaaacaaaaaaaccaaaaaaaaaaaaaacgccattggcttccctctctccacccaacttaagaaagaagttatgaatgtgaactttcaaaggccaattactaccccttagaagaacctaccatctctaaactacaaagatgggcagcctggattctattatttttattattttacaaaattcttaatttttaaatacacatagatatagggtctcgctaggttgaccaggctggtcttggaacttctggcctcaagcaatcctcccatctcagcctctcaaaatgctaggattacaggtgtgagccaccgcacccagctgggcagcctggattctggctcttatgtagtcatggtgtaggggaggaggtcgtggtgggtccgaactagggggaaacttggtgggcaggcaacccagcccctgccttgtacggacccagatactgaggcccacagaatgacagtgccagctctagggggctggaggagagccattgctggaggtagctgttctcagtaggtctccctcttggtcctcacagcgtcctcggggacaatgatttttgtcattaggaaccagatcccatcacagcttggctttacgtacagtgaaggtgtcattcctggcttaaccttacactgccccgaaggccccctccccagctgtccgtttccagcctggcaatgggactctctgagcacgcccctcatctcctccccctctgaaaagtatcctcaatctcccggtctatatctaataacacatctgtcgtgcctatattttggtacctgatacgtagtcattcattcattcaatgagagaacatttaatgagaggttaaggggcttagaacaacgccgggcacaggctaagcgctcactaaacgttagctctcgccaataacatcactgattcactataaagtttctctggctgtgtgctattcgctgcgtccacagcagtgaagaagacagacgcagcccctgaccaacctcgccaagcccgggcgccgagccaggacgttgagccaagtccccatctcctaggactcgcagtgcggaggctgcgggccccgaccagcgccgagactacaagtcccagaagggcgcgcggcgacatcgccgggcccgccccccgcgcacgcgcggcgccgtgacgctaaggccgcgagcgagcgcgggtggctgcggcggctgcggccggcggggcggggcggggccacctggcagtggctgcctttagggcggagccggctcccgctctcctcagtctgcggtgggctagcggacggtccggcttccggcggccgtttctgtctcttgctggctgtctcgctgagtcgcggccgccttctcatcgctcctggaaggtcccgagcgcgacaccatgtcggagcccgggggcggcggcggcgaggacggctcggccggattggaagtgtcggccgtgcagaatgtggcggacgtgtcggtgctgcagaagcacctgcgcaagctggtgccgctgctgctggaggacggcggcgaggcgccggccgcgct

SEQ ID NO: 13092 - DNA, 2300 bp, Homo sapien
gcaatgggccggatctttgtgggcctttgccaggtgggtgcctggggctgctttgacgagttcaaccgcctggaggagcggatgctctcggctgtgtcccagcaggtgcagtgcatacaggaagcactgcgtgaacattccaaccccaactacgacaagagtaagacacctcttcttcaaaaattacttagagaatgtagagggaaattccctagtgaactaattttctacctcttggattagaaataagcaagaatttagctcacaggagctcactgttacaggcagtgtagtgagctgtggttaaagacggaaggtaagaaacccaggccaggcgtagtggctcacgtgtgtaatcccagcactttgggaggctgaggcggacagatcacttgaggtcaggagttcaagaccagtctggccaacgtggtgaaacccatctctactgaaaatataaaaattagcctgacatggtggtgcacgcctataatcccagctattcggaaggctgaggcagggagagtcccttgaacccaggaggcagaggttgtagtgaactgagatcatgccactgcactccagcctaggcaacagagcaaaactgttcccccaaaaaaagaaacccaggactgtattgcatcacagcttttagtcctcattctagggcagcagcatagaggtttctatgtcctaggacaaccaaaaacctgagcagtccttcctcagccagccagatgcccccgtgctcccttagagcttgtgtgttccctccatggtctttgccacgggatgagcgtgtcctctggtgcgggcccttggtgccccctcttcattctcacatcgtcagagagccagcctccccagccacctgtctggccagtgttctgccatctgtctttggaaacaagccctttatcacgataggagcagctgtcggagaggccccagggaccacttcccttcccagttcaacacaaagtcccagcatgtggggtcagggagggtgggatgctgaaggaggcaaacatttgggtattgggtaagtgtgaaattctgtcttatgtgcacagcgtagcttttaatgtttccttttattgcataataacaacttgccttatggagaattccccagacctcctaaataaaacaaaaggagtgtggaggaaagcaatacttgcctttgtgatcagtattctcttaaggcgagaatacactttgttccaaagtggctcagaggtgcttggaggtttgggttttttttattttgatgatgctaggagcaggtaattcccatgatgtaagccagtcagtgtcgcggcatttattccttttttttttttttgcacaatttgttggactgcatctctatctcgagttctccatgacactcaggtgtggtgttgcccaaataaaatagtggtctctgcctctggtggcttgacctgggacacgtgcacatgaggtacatgggaatgggtccacctgggctgggagaatgtggctggtggtccccgaagaaaggccaaagagcagcccccgaggaagcgtctacttcagctccctgggagaacgagagctttgtctgttgttttagagacattttagaatgcattttgttttttttttttaacatttctagtcttaacgctatcatctcattctcagcctctgcccccattacttgtgagctgctgaacaaacaagtcaaggtgagcccggacatggccatcttcatcaccatgaaccctggctacgcgggccggtctaaccttcctgacaacttgaagaagctgttccggagcttggccatgaccaagcccgaccggcagttaatcgcccaggtcatgctgtactcacagggtttccgcactgctgaagtgcttgccaacaaaatcgtcccgttttttaagtaagtagcctagaattcttcataatcatgtttcttgcatatgttaaatgtgtccatttaaccttaaaatttttatatgtaatgatggtacgtctttcaaaatatccatctctggtttcttgacacttgaccctattattgcttaaagtatactgttattaaagatagcctttttttcttcttttctagactatgcgatgagcagctctcttcccaaagccattatgacttcggtcttcgggctttgaagagtgtgctggtgagtgcaggcaatgtgaagagagagagaatccagaagataaagagggagaaagaggaacgaggggaagcagttgatgaaggagaaattgctgaaaatctccctgaacaagaggttcgttacaaacgtttt

SEQ ID NO: 13093 - DNA, 2300 bp, Homo sapien
tgctggtgagtgcaggcaatgtgaagagagagagaatccagaagataaagagggagaaagaggaacgaggggaagcagttgatgaaggagaaattgctgaaaatctccctgaacaagaggttcgttacaaacgttttgatcactcaaaccttatacgttatttaaatttacctttttaacatttaagccatgacttgtgagttcttcttgcagttcacatgtcttgggatggctgaaatagactgtaatgttgacccagtgagtcgagtgcacgaatgtgggcgagtggtgctcgcaccctttgttcaccaacagttactgatcacgcacctcctggggatgcagcgggcagtacttgagccatgctgcgctgctcacagcccagccctctccccgtagattctgatacagagcgtctgtgagacgatggtgccaaagctggtggcagaggacatcccgctgctcttcagcctcctgtcggacgtgttccctggagtccagtatcacaggggtgagatgactgcccttcgagaggagctgaagaaagtgtgtcaggagatgtatttgacatatggagatggagaagaagttggtggaatgtgggttgaaaaggtaacttggattgtttcactggccactgccctcacagaccctgctggctttagtgtctggtaatgacaaccgtgggcccttcgatgaaactgtccacaaaggctgtggaggtgcataatatgctttatgaagatttgcccaaggcctatttgaatttttgttgttgttgtttaaatgaagaggaaacaatacttaacctgaaaattttacatgatacagttcaatttctgaaaatgctaagtgcatgactatattggaaagttgtttatactgataaaaattctgcttaccagactttccagtgccagagatgaacaacctgaatcgctgatcaatacgtagtttacattctgtattggcttctttccttcctctatgtgattcatttaagaaaaagtttattgtttacacaagctgtgtgtgtttggcctgagagatgctgtacgggattgaacacatagctcatccattgggtctcttgttgtcctcggcgggatctgatgtgtccttgttgaggctgctcattggtgtctcctgtcccactggctccagccttcctgacttactaaagaactcgccacagtttggaaatgtttgttttacatgtgacctgtgtaacatctctccagctggggagtttcagtacttgcctttaataatccatagataggcgcttgtaaagccagctacttgggagagtgaggaaggagaatcacttgaacctgggaggtggagcttgcggtgagctgagatcgtgccactgcattccagtctgggtgacagagagagactccgtttcaggaaaaaaaaaaaaatccacacataatgtttcttgctcactttcacaagaggtggctgggcgaggagctgtccccattcctcctctgggatggtcactgtgctggtctgttgggccctgcaggttctccagctctatcagatcacccagatcaatcatggcctgatgatggtggggccctcgggaagtgggaagagcatggcctggcgtgtcctgctgaaggcattggagagactcgagggtgtggaaggtgtggcccatatcatcgaccccaaggccatcagcaaagaccacctctacggaaccctggaccccaacaccagggaatggacagatgggctcttcacacacgtgctgagaaagtacgtcttctttgatctgtgtttgtgttctcctggatatgggcgctaagtactttgctctcacaagagcagagtatacgttatttttcaaccaaagtctgagcaaattaaaggtcatttcagaaaccatcatcggtaaacatgcctaatgttaaaatcttgatttaatcagcagctattttaaaatccttcccaaccaggatcatcgacagcgtgagaggcgagctgcagaagcgccagtggatcgtcttcgatggcgatgtggatccagagtgggttgagaacttgaactcagtgctggatgacaataagctcctaactttgcccaatggagagcgcctcagtcttccacccaatgtaagtagccttttgtatgtcgtcaactgaataattccttttggccaactaaacttcgtgtgctagctaagtgcagctctggagtcatggacccagattccatggagtagtgatcattgtgtaagtaattttcaaagatagcatctcaactgctagattttttttccatt

SEQ ID NO: 13094 - DNA, 2300 bp, Homo sapien
gctaaccgtgatcctgtgctttccccattcggtgtttcaaccttctcttctgtggcctcatcctcaggtatccgctgatcattgacccctctggacaggccacagaattcattatgaatgaatataaggatcgtaagatcacacggaccagcttcctggatgacgccttcagaaagaacttagagagtgcactgagattcggtaacccccttctggtccaggttggtgttggcctttgaattcttgaaacactgcattcaagagtgaattcctttttgggggctgcctttagttttcaactttgtaagacttcattttgtatcagaaggataaagctttgcggtggttctgtaatagataaattcaacagaatcattatttgcatttaaaattctattcagtggtcgggcgaggtggctcacacctgtaatctcagcactttgggaggccgaggcgggtggatcatctaaggtcaggaattcaagaaaagcctggctaaaccccatctctacaaaaaatacaaaaattagctggttgaggtggctggcacctgtagtcccagctactcgggaggctgaggcaggagaatcacttgaacccgggaggcggaggttgcagtgagccgagatcatgccactgcactccagcctgggagacagaaagagactgtatcttaaaaaaaaaaaaaattatattcagtacagccataaaaagcaagaaacagccaggcgtggtggcttatgcctgtaatcccagcactttgggaggccaaggcaggcagatcacaaggtcaggagatcaagaccaccctggccaacatggtgaaagcccgtctctatttaaaatacaaaaattagccgggtgtggcgatgcacacctgtagtcccagctactcgggaggctgaggcaggaaaattgcttgaacctgggaggcggaggctgtagtgaaccgagtttgtgccactgcactccagcctgggtgacagagcgagactccatctcaaaaaaaaaaaaaaaaaagaacaagaaaaatgttcaagaaacaagaacaaggaacatgttcctttgcaggaacatggatggagctggaggccattatcctcagcaaactcatgcaggagcagaaaaccaagtaccagatgttctcacttagaagtgggagctaaatgatgagaacacatggacacacagaggaacaacacacactgggacctttcagagcatggaggtttaggcttataaccagggtgatgaaataatttgtacagtaaaccccatgacaagtttacctatgtaacaaacctgcacttgtatttctgaacttaaaagttaaaaatgtgtttttaaataaagcatgtaaggtcactaggaagcatcagatttgcaacgagatgaattcattatgcaaatggaaaaaaatttttaagaaatgaaataaaatgccattccaagggtctgtgtcagcactgtccccagaactttctgcaggggcaggaatgccttatggtccacactgtccagtgtggtagccactagccttgggggctactgagcacttcccatggctagtgtgactaggaactgagttttaattttttattttatgtttttttgagacagagtgttgctctgtcccccagtctgaacctcccaggttcaagcaattctgtctcagcctcccaggtagctgggactacaggcatgtgccatacacccccagctaactttcgtatttttagtagagatggagtttcaccatgttggccagtctggtctcgaactcctgacctcaagtgatctgcctgcctcagcctcccaaagtgctggaattacaggcgtgagccaccgcatctggctgagtttttaattttagttcatttaaatgtaagtagccacacatagctagtggccaccacacgcaagtggcgggtggcttttgggaaggtatgcttatccagagtaggacagcaacatagcatttgggtgaagataaagttacaaagccctgaccatcaagttccacccgtgtggaatgcaggatgtggaaagctacgatccagttttgaacccggtgctgaaccgtgaagtgcggcgaacaggggggagagtgctgatcactctcggggaccaggacatagacctgtcgccatcgtttgtcatcttcctgtccacccgggatccaactgtaaggaatgggacccttccccagggaaatctggcaggatgtggttttgaaactggattaagacagactgttctgttacctattttggcaggtcgagttcccaccagatctctgt

SEQ ID NO: 13095 - DNA, 2300 bp, Homo sapien
aagtacctgatattaagtgattttttaaaaccattcatcttccctagaattttttagcagtctttgtttccttttcacttacttacaagatgttttttaagacttcaagtgctgtgagccagaagggagctaagaaattctctaagccagtggctctcatagtgtggctcccaaaccagcagcagcagcagcctccccagaacttcttagaaatgcaggttcccagccgggcacggtggctcaagcctgtaatcccagcactttgggaggccgaggtgggcggatcacaaggtcaggagatggagaccatcctggctaacacggtgaaaccccgtctctactaaaaatacaaaaaaaattagccgggtgtggtggcgggcacctgtagtcccagctactcaagaggctgaggcaggagaatggcgtgaacccgggagggggagcttgcagtgagccgagatggcaccactgcactccagcctgggcgacagagcaagactttgtctcaaaaaaaaaaaaaaagaaatgcgggttcccaggccctgcccaggcgcactctatcaggacaggggatgggcccagcaactggccttcacaaagcctccaagcactacacgtggggttgacagcagctgatcaaatctcaactttttcttatgggaaaaagtcacgaaaagctaagaagacaagaaaagctaagaagacaagggcattgctgaaactcacagctggttaacaggacagaatcaggagggataagccaggcgagctgggcgggtctggagggaaagccaaagccaggcgagctgggcgggtctggagggaaagccaggcgagctgggcgggtctggagggagagccaggcgagctgggcgggtctggagcacactgcaggcaccacaaggctcggggtaatcccagccacatggtggcagtcacaggccaagggacactgtggtgaccagttttctgagttaagagggcaggtggcaccccctcctggagcgcctctcgagcacgcactcattcatggtcgggctgaaagccggccggggcttggcccaggtctcacagtgaacccaaacccagggtcctgaagagccttccttgagtctttggactcgggctgctggttccgtttttttttttttgctttgagactgagtcttgctctgtcactcagactggagtgcagtggtgcaatcagagctcactgcagcctcagctttctgggctcaagcgatccccccacctcagccttccaagtagctgggaccacaggtgccaccaccacacctgcctttctaattttttgtagagatgagggtctcactatgttgcccaggctagtcttgaacccctgagctctagagatgctcccgcttccgcctcccacagtgctgggactgtgggcgtgagccactgtggctgtcttgctggtgctgggactgtgggcgtgagccactgtggctgtcttgctgggtcagttttaacagtcatgttctcgacctggtaacaattcttattctgtatctgtctccttagctttctggtcaggccattgtctgtgctttaaaaacatacatgactggccaggcatggtggctcatgcctgtaatcccagcactttgggaggccaaggcgagcagatcacctgaggtcaggagttcaagaccagcctggccagcatggtgaaaccctgtctctactaaaaatacaagaaaaaattagccaggcgcggtgccacatgcctgtaatcccagctacttgggagcctgagtcaggagaatcacttgaacccaggaggcagaggttgcagtgagccaaggtcacgccactgcactccagtctgggtgacagagcgagactccatctcaaaaatatatatatacacacacacacacatatatatatacatacacatacgtatatatatatacacatatatgtatatatacacgtgtgtgtgtgtgtgtgtgtgtatatatatatatatatatatatgtacacacggctgagcaccttccagattttgctgcagttcccagtgtggactcactcaccatgtggcctttacgttcaagtcccttttccctctgtgatttcttgcccgtcccctccctccttcctgctgcgactgtgggactgtggcccaggtgtggacatgatcagtaaaatgctgaagatgcagatgttggaggatgaggacgacctggcctacgcagagactgagaagaagacgaggacagactccacgtccgacgggcgccctgcctggatgcggacactgcacaccaccg

SEQ ID NO: 13096 - DNA, 2300 bp, Homo sapien
gggaccgctgcggtttccgcaccccgcttcaggaatgggccgggcggccgcgggctccccgaggctctgcagcagcgccagagctggcgccgcacgcgaacagagcggccccgccgcgggggtcccccgcccggccccgctgggggcgcaggcggaggaggccgccgtggcggagccgcagcccgcgcgggagggcacccggggtgttcgttggggaccgcggcgggggactgggcccgggcctgcggcggcctcccggaagcgcgcacacgctcgtggtagttgccgcgctccgaaatgaggtcatcctttgtcagccgcccttctattttcggtttacttaaacttcgcaaatctccaattcggctttaaaaatatttggagaacgcgatggaatttcgtgttgcctctgtagacgtcctgcaaggttttaaaccggcgcggtgtcgttccagatgcctgaggaaacccagacccaagaccaaccgatggaggaggaggaggttgagacgttcgcctttcaggcagaaattgcccagttgatgtcattgatcatcaatactttctactcgaacaaagagatctttctgagagagctcatttcaaattcatcagatgtaagtcacttattaacccagaatcggattttggtttcagtgtgaacttcttgggggtgctgtatgcttaaattaatattttttgttaacaggcattggacaaaatccggtatgaaagcttgacagatcccagtaaattagactctgggaaagagctgcatattaaccttataccgaacaaacaagatcgaactctcactattgtggatactggaattggaatgaccaaggctgacttgatcaataaccttggtactatcgccaagtctgggaccaaagcgttcatggaagctttgcaggctggtgcagatatctctatgattggccagttcggtgttggtttttattctgcttatttggttgctgagaaagtaactgtgatcaccaaacataacgatgatgagcagtacgcttgggagtcctcagcagggggatcattcacagtgaggacagacacaggtaggcacctgaacattcactggttaagtgagcggtggaagggtggggtgctgcaacccttggacccctggggatgcggtgaagcttacagaatttgtgtttgcccaacgatcaggaacaagctagagcacttaattagtgtaatggcatgacttggtgggcggttcttttgggcgaggcaccttgcccaaaaggttctgctgtggtggcctttgcatctgtagtaacggcaaaccttgctttatagacacgttataagggtgttaggcatggcgttgagcactaaattgaatgtattaagtcaatttttctttcttctcttgcaggtgaacctatgggtcgtggaacaaaagttatcctacacctgaaagaagaccaaactgagtacttggaggaacgaagaataaaggagattgtgaagaaacattctcagtttattggatatcccattactctttttgtaagtttttatgtaattgcagagtgaatttctgtctgtaggtgattggggtgactgtactacatccttagtccctagatctgttcaactagtctgaagcctggggaacctaagctctactacctaactctgtaaaagttcctcgggctattaagtggatgtatcaaatattgatgaaaagctgggtgcttctcaagttggctaatttagacttgggccttaggttgaaaatagtggtgcagcgctgtcgcttagttctggagtgcagcagtgatgtgatttcgtgttttcttttgaaggtggagaaggaacgtgataaagaagtaagcgatgatgaggctgaagaaaaggaagacaaagaagaagaaaaagaaaaagaagagaaagagtcggaagacaaacctgaaattgaagatgttggttctgatgaggaagaagaaaagaaggatggtgacaagaagaagaagaagaagattaaggaaaagtacatcgatcaagaagagctcaacaaaacaaagcccatctggaccagaaatcccgacgatattactaatgaggagtacggagaattctataagagcttgaccaatgactgggaagatcacttggcagtgaaggtgagtgactgatgggtgcttcaagcttgtccttagattatcatctttctccaccaccccaaatatcttctataatgcattgttcattggtacttagtgtatctgttttattacagcatttttcagttgaaggacagttggaattca

SEQ ID NO: 13097 - DNA, 2300 bp, Homo sapien
acgcacgaccctccctccaggcgcgcctcccaccccggccccgcgttccgctcagcccgggtgaccaactacacctcacttcaaaggcccccacgcccgggcgtgccctccgcccgcccgcggcaggtgggggtgcagggcggagggcgcgggcggccccagaaggcgcccggaccttcccgagaattccgggccgcgcaggcgcattgaggccggcgcgggggcgtgcgagaggcgcgcggcggcgattgagggaaggttgcccgggccgggccacgagcagggcctgcgcgcgcccgcaggaaggcgcgggggcggggtgccgcggcaacggcgcatgcgtaggcgcgcggccgcggcggcggctggggagggttcttccggaaggttcgggaggcttctggaaaaagcgccgcgcgctgggcgggcccgtcgctatataaggcaggcgcgggggtggcgcgtcagttgcttcagcgtcccggtgtggctgtgccgttggtcctgtgcggtcacttagccaaggtgacgggtggttgtgggggcctgtggaggtggactggggaccgggactgggggcggctggcgcggggcggaggctgtgggggccggaccagatccctgaagcagccagggccgcgctcccgggcggccgcgctttctattccggaggcctcgggaccgctgcggtttccgcaccccgcttcaggaatgggccgggcggccgcgggctccccgaggctctgcagcagcgccagagctggcgccgcacgcgaacagagcggccccgccgcgggggtcccccgcccggccccgctgggggcgcaggcggaggaggccgccgtggcggagccgcagcccgcgcgggagggcacccggggtgttcgttggggaccgcggcgggggactgggcccgggcctgcggcggcctcccggaagcgcgcacacgctcgtggtagttgccgcgctccgaaatgaggtcatcctttgtcagccgcccttctattttcggtttacttaaacttcgcaaatctccaattcggctttaaaaatatttggagaacgcgatggaatttcgtgttgcctctgtagacgtcctgcaaggttttaaaccggcgcggtgtcgttccagatgcctgaggaaacccagacccaagaccaaccgatggaggaggaggaggttgagacgttcgcctttcaggcagaaattgcccagttgatgtcattgatcatcaatactttctactcgaacaaagagatctttctgagagagctcatttcaaattcatcagatgtaagtcacttattaacccagaatcggattttggtttcagtgtgaacttcttgggggtgctgtatgcttaaattaatattttttgttaacaggcattggacaaaatccggtatgaaagcttgacagatcccagtaaattagactctgggaaagagctgcatattaaccttataccgaacaaacaagatcgaactctcactattgtggatactggaattggaatgaccaaggctgacttgatcaataaccttggtactatcgccaagtctgggaccaaagcgttcatggaagctttgcaggctggtgcagatatctctatgattggccagttcggtgttggtttttattctgcttatttggttgctgagaaagtaactgtgatcaccaaacataacgatgatgagcagtacgcttgggagtcctcagcagggggatcattcacagtgaggacagacacaggtaggcacctgaacattcactggttaagtgagcggtggaagggtggggtgctgcaacccttggacccctggggatgcggtgaagcttacagaatttgtgtttgcccaacgatcaggaacaagctagagcacttaattagtgtaatggcatgacttggtgggcggttcttttgggcgaggcaccttgcccaaaaggttctgctgtggtggcctttgcatctgtagtaacggcaaaccttgctttatagacacgttataagggtgttaggcatggcgttgagcactaaattgaatgtattaagtcaatttttctttcttctcttgcaggtgaacctatgggtcgtggaacaaaagttatcctacacctgaaagaagaccaaactgagtacttggaggaacgaagaataaaggagattgtgaagaaacattctcagtttattggatatcccattactctttttgtaagtttttatgtaattgcagagtgaatttctgtctgtaggtgattggggtgactgtactacatccttagtccctagatctgttca

SEQ ID NO: 13098 - DNA, 2300 bp, Homo sapien
tggtcctctgcccacgctcgtcccagctactgggaaagctgaggcgggaggatcacctgagcccgggagggtcgaggctgcagtgagccgagattccgccgcggcaccccagcctgggcgacaaagcgagagcctgtccaaaaaaaaaaaaaagaaaaaaaaaaaaaaaaaaaccttttagggcaagttaatcaccaaagtgttagatacttaatttggagaccgcaaatcggtcggcaaaacgatgggcttttcaaaatcatgccgggtgtagctgggtaagcatgaatttgttcaccaagtccccgattcccaagctaagggacccttaagtatgaagcacatggctttcggggaacccaaaagtagggagcgctcccgagccagcggtgggtctggagaatccccgagcgcgcaggccgcgggacagcctccccagtgcgcagcagcctgaggctaacagcccccagagggcagagccccgcgatcccggcgccgcttgcggctggattctttggcagcgggcgcggcgccagtcaggacgacggctccggaagtctcccgggcgcgtgagacccgggccgctctccgtccacgcacgaccctccctccaggcgcgcctcccaccccggccccgcgttccgctcagcccgggtgaccaactacacctcacttcaaaggcccccacgcccgggcgtgccctccgcccgcccgcggcaggtgggggtgcagggcggagggcgcgggcggccccagaaggcgcccggaccttcccgagaattccgggccgcgcaggcgcattgaggccggcgcgggggcgtgcgagaggcgcgcggcggcgattgagggaaggttgcccgggccgggccacgagcagggcctgcgcgcgcccgcaggaaggcgcgggggcggggtgccgcggcaacggcgcatgcgtaggcgcgcggccgcggcggcggctggggagggttcttccggaaggttcgggaggcttctggaaaaagcgccgcgcgctgggcgggcccgtcgctatataaggcaggcgcgggggtggcgcgtcagttgcttcagcgtcccggtgtggctgtgccgttggtcctgtgcggtcacttagccaaggtgacgggtggttgtgggggcctgtggaggtggactggggaccgggactgggggcggctggcgcggggcggaggctgtgggggccggaccagatccctgaagcagccagggccgcgctcccgggcggccgcgctttctattccggaggcctcgggaccgctgcggtttccgcaccccgcttcaggaatgggccgggcggccgcgggctccccgaggctctgcagcagcgccagagctggcgccgcacgcgaacagagcggccccgccgcgggggtcccccgcccggccccgctgggggcgcaggcggaggaggccgccgtggcggagccgcagcccgcgcgggagggcacccggggtgttcgttggggaccgcggcgggggactgggcccgggcctgcggcggcctcccggaagcgcgcacacgctcgtggtagttgccgcgctccgaaatgaggtcatcctttgtcagccgcccttctattttcggtttacttaaacttcgcaaatctccaattcggctttaaaaatatttggagaacgcgatggaatttcgtgttgcctctgtagacgtcctgcaaggttttaaaccggcgcggtgtcgttccagatgcctgaggaaacccagacccaagaccaaccgatggaggaggaggaggttgagacgttcgcctttcaggcagaaattgcccagttgatgtcattgatcatcaatactttctactcgaacaaagagatctttctgagagagctcatttcaaattcatcagatgtaagtcacttattaacccagaatcggattttggtttcagtgtgaacttcttgggggtgctgtatgcttaaattaatattttttgttaacaggcattggacaaaatccggtatgaaagcttgacagatcccagtaaattagactctgggaaagagctgcatattaaccttataccgaacaaacaagatcgaactctcactattgtggatactggaattggaatgaccaaggctgacttgatcaataaccttggtactatcgccaagtctgggaccaaagcgttcatggaagctttgcaggctggtgcagatatctctatgattggccagttcggtgttggtttttattctgcttatttggttgctgagaaagtaactgtgatcaccaaacataacgatgatgagcagtacgc

SEQ ID NO: 13099 - DNA, 2300 bp, Homo sapien
atcacctgaggtcacgggttcgagaccagcctggccaacatggtgaaaccccgtctctactaaaaatacaaaaattagccgggcgtagtggtgggtgcctgtaatcccagctactcgggaggctaaggcaggagaatcgcttgaacccaggaggtagaggttgcagtgagcaggttgcagtgagcagagattgtgccattgccctcgagcctgggggaccaagagtgagactttgtctaaaaaaaaaaaaaaaagaaaagaaaaaaaagaacgtcagagttagggccctggatggctcctctatatctcaaaccccctgggcaatggcagaaactgcggtaggaaaagttcctacaagtgaggagagcggggacagtggctggtggtgacaggaaggaaacaggcaaaggcggcagtcgccagggaagaccttgcgccccttcagcgacccgctcaccgctcttcctgcttccggattcctccccgccagtccaggctgcagctgtaggaaagcctgggccgggggcgcgcccccaggctgcgcaacagctaccacaggaccaggcacacacccggtcaccaccgctggggcccgcgccacgtggctgctagtttccttccacttcccccgctttgtaatgccaggcaagacgctttatgttgatttcacacgctcttaagggggtcccaggccgcagtctgaaaacccctgctcctgagcaagttgcgtttccctaaagaccaggaagcggaggtagttccatcgtttctttacacggcaaggagctttcagattattccgagggcctggctatgagtctaggcaggaggcggcccaatcatgggaggcgccagagacaaagaggaagaggacatggactaggcagggaagccaggtcgaaggaaccccaatgcctccaaggttcccacagctggccttggccaaaatatccgaaaattcccatgtagaaactggcttttccagcctgggcaacatggtgaaaccccgactctacaaataaatacaaaaactagacaggtgtggtgtccgcgcctgtggtcctctgcccacgctcgtcccagctactgggaaagctgaggcgggaggatcacctgagcccgggagggtcgaggctgcagtgagccgagattccgccgcggcaccccagcctgggcgacaaagcgagagcctgtccaaaaaaaaaaaaaagaaaaaaaaaaaaaaaaaaaccttttagggcaagttaatcaccaaagtgttagatacttaatttggagaccgcaaatcggtcggcaaaacgatgggcttttcaaaatcatgccgggtgtagctgggtaagcatgaatttgttcaccaagtccccgattcccaagctaagggacccttaagtatgaagcacatggctttcggggaacccaaaagtagggagcgctcccgagccagcggtgggtctggagaatccccgagcgcgcaggccgcgggacagcctccccagtgcgcagcagcctgaggctaacagcccccagagggcagagccccgcgatcccggcgccgcttgcggctggattctttggcagcgggcgcggcgccagtcaggacgacggctccggaagtctcccgggcgcgtgagacccgggccgctctccgtccacgcacgaccctccctccaggcgcgcctcccaccccggccccgcgttccgctcagcccgggtgaccaactacacctcacttcaaaggcccccacgcccgggcgtgccctccgcccgcccgcggcaggtgggggtgcagggcggagggcgcgggcggccccagaaggcgcccggaccttcccgagaattccgggccgcgcaggcgcattgaggccggcgcgggggcgtgcgagaggcgcgcggcggcgattgagggaaggttgcccgggccgggccacgagcagggcctgcgcgcgcccgcaggaaggcgcgggggcggggtgccgcggcaacggcgcatgcgtaggcgcgcggccgcggcggcggctggggagggttcttccggaaggttcgggaggcttctggaaaaagcgccgcgcgctgggcgggcccgtcgctatataaggcaggcgcgggggtggcgcgtcagttgcttcagcgtcccggtgtggctgtgccgttggtcctgtgcggtcacttagccaaggtgacgggtggttgtgggggcctgtggaggtggactggggaccgggactgggggcggctggcgcggggcggaggctgtgggggccggaccagatccctgaagcagccagggccgcgctcccggg

SEQ ID NO: 13100 - DNA, 2300 bp, Homo sapien
gggaggccaaggtgggtggatcagcaggtcaagagatcaagaccatcctggccaacatggtgaaaccccatctctactaaaaatacaaaaattagctgggcgtggtggtgcacatctgtagtcccagctactcgggaggctgaagcaggagaatcgcttgaacctgggaggcagaggttgcagtgagccaagattgcaccactgcactccagcatggcgacagcgagactccatctaagaaaaaaaaaacaaaactaaaccaaaggctatgcatgagacaaagtgaacagtttattactgtgattataataaaatgttgaatttatatagggtaaaatcttgatagaatgcttgaattatataggtattatgggaaatacaatgttatggttaattgaagaataatacaaaattttgttttaacttttgctcgctgggtttttttccccccccaaaaattatactttttttcctcttgataattaggaaacacagataaattatttttagatgattcaagatgccactatccttcaagttgattattgtaaaatacgtgttttcaatgtaaaataacacagttatggagtttgggatatagccatggtaacgacagaacataccctggtgttttaagattagggaaagtcggataacatcaaaacaattctaagaaaaaattttaagtatttttcaggctctattaattaagaagtacttcagtgcttttttttcttttttttttccaacactacaaaggctaaagatgttattatcaaatgtattactacatcattggcacagtttctattggtatctacttgctttttaatacggaagatgtttatgatttacactcctcctactttagaaattctctccattcacttcttttgtgcccctccagatataatctgaacttccaggaatagatcattcttggtgttacaaatgttggcttcccccctccctggaattctattagaatgtttctgtcactttagaagctttcttattctggtgtaacatgccaagaaacccaggtataaaatagtgattgttgaatcttactttgacacgtgtgcccgtccttataaatctagaccctgtacattacatgcatacaactatccctatggatctactagtaaataatctcacagactccacctgaggcttctggaaaaaaaaacaattaccttaaattttattaagagctcttcgtaacctactgagcaagatcagtgaatcctaaaaagattcagtccccggttcccaaagcgcttccccgccccgtgtttctgaacagctggagaggacaaacctccgctaagaagcggaggccgccagtgctcatcacacgcaggaattaggatatctggcttgagaacacctatgctgtaccacattcttctctccccctaccccgcctgaaataaaacatagtgaagcgtaaatcttgagtcccttggtaccttctcagaaacggcggcgaggaggcttcagaggggcttcctgggcggggatccagacggtcgcgcgggtattcagcactctgggcgggacagtccctgtcccgaagggagggcccaggaggggtggagccgtccccgcccgaacacgggggcatccgcgctccccgtagggtaccccgcgtgctggctccgaagcggtggccgtcggggtggcgctcttcctccgctctttggggtcccggcgcccctcagggcagggcgggagaccgctgaggaggcaccctcaagttcacctcaggctcatgacaccagccccgccgcggttccccctgaccggctttccgctggccctggcggctgcggaacggtcaactagaccccactagctgaagccggcatcacctgggaagcagccatgccgcccggaggccacacccgggggaggagcctgcggacgcccagtcgggtggagcacgccaggtgagcacgcctgcgcagtcgggccgtaaacaagcccaccccttccctttggcccgccctcgcagggctggcccgcgggtgggaggggcgagaaggaagaggcagggggtgggggaagagggagcaccaggaacagcgcctgcgcggtgggcgtgatccgggcacttagggcaggatgaacgctgctttccaagatggcgacggagggaggagggaaggagatgaacgagattaagacccaattcaccacccgggaaggtctgtacaagctgctgccgcactcggagtacagccggcccaaccgggtgcccttcaactcgcagggatccaaccctgtccgcgtct

SEQ ID NO: 13101 - DNA, 2300 bp, Homo sapien
tcctttcactctgattatcaatgtcaagacagcagcttcttatttgacagtcagtatttaactatattttacatctactgagtgtttcagggccttaaagttcattatgattattatattattaattacaacgtgcactgtaacattccctttttaaagaggtgcaaatagaagttaaataacttatccaaggtcacccaaacaagtcagtgacaaagttgggagtaggagtaaaacttcagcccctagactgaagactacttcgagcttttgcaattccaaacgaggaaaaaaaaaaggtcaagcgatttacccttaataacttccaacagcataccctaaatacagtggtacacttattatcataaagactaagaaaaaaagattcaccctgaatcaaagaaacaactttgctacatttagataccactgtcatttccctagctcttgtaacaagcgaaaatcctgtactggatctggctatattaaatcctgaagaatgttcactcttcaatatgaacaatttattttcatgctaacatgcatttacgacttaatcttttatcaccttgtcctatttggaggtgctgtgggatgcattaatttcctcactcttccatgacatcaagtcaaagactacaatctcaaaaataagcaattctcagtgaaaacatagttacatagccaatgaaagaaaaactctaataaatggctgcttttaaagagatacttttaaaggatgcttacatgtttcacagaattaccggtaactcgcccgccaagaaggatggtccctttaaagcagcttttaaagcatatcactccctgtttgggacacagtctgacttgttggacaagattaatctgggcactctcacacaacccctctgaaccagcttagttcactggaaacatcatttcaactgtagtactcagcccttcgcatactacaagggacaagatgactctccttaacaatctttcagaaggtccccacggcggagacagtgacagccgtcctcccgcggatgtttttggaaatagaaatgttaacaccaggagaggctcctaggaagtgtcagtgcggcagcaggtggagtagccctgcgtgccgagcaggttctttctgacctagtctcaatgctccgcttcccggccccggttccgccttacagagatcttgttaagccgtcttgcgtccctgttctctaacccagggcgagacttccaaccctccagggaggcgaggcaatcgaagcagacaagacggccacctcacctcttccggggactcgcaggcccgctccctggccatgtcagagcctgatggaccaggctggaggggacgcagccggctcccccgggagcctcccagccagaacccccgcgccccacggtccctttccactgcccccaccccttcgaaacgccaccgccaccaccctccttactcctgaatcccctctcctcaggagtaccccagtggagttaccggcccactcaaaagtaagagcgacggccacccctctcggtcaccctggccccactgtcaccgccctgctcccggcctctgcctacgccgctggctggctccggtgacgcccgggtcggtaccttgcggacccccttgtagatatagaagtacagctcccggcccacattgaagcagaggcggtcgccgttgccagactggtcgttgaggtttacgaaggagacgcggacagggttggatccctgcgagttgaagggcacccggttgggccggctgtactccgagtgcggcagcagcttgtacagaccttcccgggtggtgaattgggtcttaatctcgttcatctccttccctcctccctccgtcgccatcttggaaagcagcgttcatcctgccctaagtgcccggatcacgcccaccgcgcaggcgctgttcctggtgctccctcttcccccaccccctgcctcttccttctcgcccctcccacccgcgggccagccctgcgagggcgggccaaagggaaggggtgggcttgtttacggcccgactgcgcaggcgtgctcacctggcgtgctccacccgactgggcgtccgcaggctcctcccccgggtgtggcctccgggcggcatggctgcttcccaggtgatgccggcttcagctagtggggtctagttgaccgttccgcagccgccagggccagcggaaagccggtcagggggaaccgcggcggggctggtgtcatgagcctgaggtgaacttgagggtgcctcctcagcggtctcccgccctgccctgaggggcgccggg

SEQ ID NO: 13102 - DNA, 2300 bp, Homo sapien
gtttcattttttgtaaatagagatgagaatatctgtcctgcctacttcactgtttttttaggattagtgagataattatataaacactctttcagaaatggtaaggtactgtcaaatgtaagatatttcttttagttatacaaggatataccaaagggctgcaactgactcattctactatctctcacatgtgacttgctaattgactgctgttttctttcatctggagccctgcaaggataagggggaactgggtaagaatggggaaaggagagcagccttagagagaccagagagagattactgggagagcagtgtgggaattttcaaaggttgaagagactctggggagaagggaaagcagatataggagctcagcattttccatccctttgtagatgtgcagactatgtctgctctattagacagcattgactcattagggctccttagcctgactagaatttagagggtagcctgaatgggaaaaatatttcactttaaaaaatttatttatttattttactaacttctgacatttaacatgttcctcagttatgaatatagacatcacaataataatgggacctgtggcaattatcaatgaaaatcacagacattttttccttttttttttttgagagggtctccctgtcacccaggctggagtgcagtggtgtgatgtgggctcactgcaacctccatccccgggctcaaatgatcttcccacctgactttctcaggtagatgggtctacatgaagcttggctaatttttaattttttttttttttttttgtggagacaaagtctcactatattatagcctaggctggtgttgaattcctgggctcatgcgaacctcccacctcggcctcccaaagcattgggattagaggcatgaggcagaggcagcactccctgcccacagatgttttcatatcacattgtggttgttgcatgtgtgtcaaatatcatttacatccatcactactttgaaattaccattagatcttttttttttttttgagacggagtcttggtctgtgccccaggctggagtgcagtggcatgatctcggctcactgcaagctccacctcccgggttcacgccattctcctgcctcagcctcccgagtagctgggactacaggcacccacccccacgtccagctcatttttttgtgtttttagcagagatggggtttcgccgtgttagccaggatggtctcgatctcctgacctcgtgatctgcccgcctcggcctcccaaagtgctgggattgcaggcgtgagccactgcgcctggccccattagatcttgttattcaatatgtaattaagaaatttttgaaaagttatagttatttagtataatacaactgtactttaatgtagaattttttttttttggaaaccgggtctcactgcagccttgacttcctgggctcaagtgacccttctgctctggcctcccagagtcctgggattataggtctgagccaccatgcctggccatagatttcttttatagatttatgcatttaaaaactattggggccaggtgcggtggctcatgcctgtaatcctagcactttggaaggctgaggtgggcggattatctgaggcaggaattcgagaccagcctgaccaacatggtgaaaccccttcttaaaatacaaaaactagctgggcgtggtaacaggcacctgtaatcacagaaacttgggaggctaaggcaggagaattgcttgaacctgggaggcggaggttgagtgagcggagatccgcgccgttgcactccatcttgggtgatagagcaagactccgtctcaaaataaaaaataaataaaataaaaattattggggctgaggtgggaggattgtttgaggccaagagtttgaggccagcctgggcaacactgtgagacccccatctctgcaaaaaatttttaaaaattatcgggcattgtggcacgtgcctgttgtcccagctacaagaggctgaggtgggaggatcacttgaacccaggaggttgaggctgcagtgagtcatggtcacaccactgcactccagcctgggcaacagaaaccctgtctctaaaacaacaaaaaacagttgtaaggagtccatggcacagaaagtttaagcaccctgatttaggtaagtcttcccttaacttctttagtatctcatgtgtgattgaatataagaagggtgactagtttcttatgtcctgtgaagtgtaacttttagctccatgaagagctctcttgtggtactttcactcagcagttgctc

SEQ ID NO: 13103 - DNA, 2300 bp, Homo sapien
ggtgagctaggagggcaaagttgggaatccatattctaaaaaagcctgctagttctaggaaggaaagaacttcgcttttggaggagggcgagggcagattatctattagtgctgctagggcaggggtcatagcccgggtcccaggggaaagttgaactcctaggtaagttactatggaggtggaaagttgagcttcggagggggagactctataccctttgatggagagaaagttttaagagagtaactgtgtgagtttgagagtcttctagagaggggctgcaaaggagaagattgtccacgtattgaaggagacggctagggaaaaggtttaaggaagtgagatcttgagctaaagcttgtccaaagaagtgagggttatctctgaagccttgagggaggacagtccaggttagttgttgtgactggagggtgtcaaggtcggtccaggtgaaagcaaagaggttttgggaatcagggtgcaggggaatagtaaaaaaagtcatcttttaggtcaatagcagtgtagcaggtggtgttggagggaatgagacagagaagtgtagaggggttagggactatgggatgaataggaaagacagcctgactgatggctcggaggtcttgcaggagtcggtatgagccgtctgattttttaaccaggaggatggtggtgttatatgaagaacgtgttggcctaagaagacggcgtgaacagagcttgtttgtgatgggctgtaagcctttttggtgggttagggagatagggtttttggggatgctgggaaatttagagaggtcttttaactggattttgatggggtcgtggtgagtagctagggaaggggtggtggtgtcccaccctgttgggtttacaaaagaggtgggaagtgggtactggggagaggggtcaggggctggactcgcatagaggagtaggagggactccggttgagggagggagaaaaaggtgatagaagctttgaatttggccaaaatttgaatttgaatttggctttgaatttggcctaggatgggggtagggcaacgaggcatgataaggaaagagtgtgggaaaacagtatcaaacagagagcaagtaaggggtctggtggcgcgtggacgcaagatgagtccatcagcccccacaactgagacctgagagggatgagtgggtcctgaaaattcaggcaaagctgagtaggtggccccgctatcaatttaaaaagagatcggcttacctgctactcgcagagttaccctgggctccaatgcagtgatggcagatggggccgggggccctgggcccggtcagtcctcagcggctaggctgaggagctgcgggaatgcaagcggttcttcactttttgtcttgttaaaggggtggtggctctgaggagcaggcttgtctgtctgttgagaggacagtcggacttccagtggcctgtctgctggcacactggacaaggactctttggcactcaagggttaggatacacccatgcccagtggccttctttgccacacttaaaacaaggcccggagggttgctgctatcgggtcttttgtgcccttgggtgatacggctgggttgatggacagccgctgctagaagctggtatttagcacgatctctttgggctttatctaatttattttgctcatccctgttattaaagactttgaaagccaagttaaggaggtctcgttgtggggtctgaggggcatcttcagcctttttaagtttgcgccagatgtcgggggcagattgggaaataaaatggatgtaaagaacaatagttccttcccgggaggcgggatcgacacgcgtgtatttttggagagtctctgtaaggcgagaaaggaattgggcagggttttcattggccttttgggagattcctttgagtttttcgaaatttacagccttatgggcagttttgttaaggcctgcagtgaggcaagtaatcatatgattacaggaggtctggcaggggcctgtgggttgatacgcccaggtacgctcttctcagggaactgcagcggcccctactggcctagtaggatcttgccgatggaggtcatcggcatgggcctgggctgcaagccacactctttccttttcttccggaaggagggtagaagacaaaataatatagagatcatgccaagtaagttcataagactgggtgagatatttaaattatttgatgtaagtgtcgggatcggagaagaacctggacgtttctcaatttgggaaacattagagagggaaaatgggacgtggacacggaccatcc

SEQ ID NO: 13104 - DNA, 2300 bp, Homo sapien
cggtttttggacagggaaaatgggggaattgtaaggagagtttataggctttaaaaggccatgctgtaacaggtgagtgataacaggctttaatccttttaaagtgtactgtgggatgggatattggcgttgagtgggttaagggtgattaggttttaatgggatagtaaggggtgtgtgatcagttgccaggggagagtagaggtgtcccatacttgtggattaaggtggggagatacaaggggaagatgtgaaggaggctttgaactgaggaaaagggcagcaatgaggtgtggctatagtctaggaatagtcagggaagcagataatttagttaaaatgtctccacctaataagggagctgggcaggtgaggataactaaaaaggagtgcacagaagaatgttgtccaagttggcaccagagttggggagttttaaaaggtttagaagcctggccgtcaatacccacaattgtggaggcaagggaaaagaaggtaatgtggagtgggtaagctccgtattgattaagaaggggatggacttaccctccactgtaagagttacccaaagcgtctgtgatggtccaggaggcttccgaggcaatcaggtagcattagtcttcagccgctaaagccaagaagatctgggaaggagtcagtcagagagccttgggccagagttccagggactctgggagtggctgctgggcgagttggacagtccgatttccagtggggtcctgcacagatgggacatggcttaggaggaattctgggctgtgggcatttcttggcccagtggccagatttccggcgctagaagtaagatccttggggaggcagttctggaggaacgcctggccactgcggttcagacgtttggaagttcttgtgtcctggagatgtggctggggtttgtctcacagtggaggcaggaattgcaattcagaaattcattgctacttggctgcctctactctattattgtacaccttgaaggtgaggttaattaagtcctgttgtggggtttgagggccggaatctaatttttggagctttttctaatgtcaggagcagattgggtaataaaatgcctattgagaataagatggccttctggcccctctgggtctagggcggtaaagcatctaagggttgttgccaaacgggccatgaactgggttgagtttttatatttgatgaaaaagagcctaaacactgatttgggagaggtcagataaagaaaaaggagcattaaccttggctaagccttcggctccagccacctccttaagaggaaattgttgagcaggtgcgggagggctagtctccccacgtgaaactgtaagctggaccctgtgtgaggatgggaggtgattaaaggattatagggtgggggagtggaggctgaggaagaattgagacctggctcagcctggcgaggattagcctggggaggaagggaggggtcagatgggtctgtagaaaaggattcaaaggactcagagcttggagtggagactgaaggaatagacaggagagaaagaagaaagatttgggatgagttgcattgggagcagagactagggagggaccgatgtgtaaaagaatgcctggacgtcaggcacctcagaccatttgcccatttttcgacaaaaatcatccaggtcttgtaaaatggagaaatcaaaagtgccattttctggctgtttagaaccattatcgagtttgtattggggccaagtggtgttggcgaagacacttaggttttaggtcaggcaagagttgaagaggttttaagtttttgagaatacagcctaaggaagaagaagggggaatggagggtggaaggttgcccatagtgaagcaggcaagcccagagaaaagagagggtagagacacagataaggagggtggtgagcagccctgggctgcaatgtgggtgagcagccaaagcaggcatccccgcagttgacttgccaccaagggaatgtgggtgaatgaccaaggcaggcatcctcgcggtgatcagacaccaatggagtgtgggtgaataatcaggcaggcatccccgcagtgattaaacaccaagagaagactattcctgagtctgtgactggtgctggagttttgagtccacagataaaatgtgtctccttcgtctctactagagaggaaaaagaactggaattggaagaacagggagactgaagggtagcaagagaggctggagaagagagtgaaaagaccgcttacctgatttgaaattggtgagatgttccttgggctggttggtctga

SEQ ID NO: 13105 - DNA, 2300 bp, Homo sapien
tagccaggcatggtggcgggtgcctataatcccacctacttgggaggctgaggcaggagaatcgcttgaacccgggaggcagaggttgcagtgagccaagatcacaccattgcactccagcctgggcaacaagagagaaactccgtttcaaaaaaacaaaaaatcaaaaagagtatagcatcattaaagataagaaagaggccgggcacagtggctcacgcttgtaatcacagtactttgggtggctgaggcgggccgatcatttgagcctgggagtttgagagggcatagtgggatgcacctgtggtcccagctactcaggaggctaaggtgggaggatcacctgagcctggaaggttgaggcttcagtgagacatgattgcaccattgcactccagcctggatgacagtgaggctttgtctcaaaaacaaaaaaaaaaaggaggggtgggtcttttcttggaactttgaaatgctcattttcagatagtgtatctataaactgaagactaaatcttaattattaatcttattaattaatcataagttttaatgtctacttttatgtttgttaatatgtaaaataaactaccaagtattctttcaggatcttagatgggaaaaattttaacgtatgttctagctataagaaccttgattttttaatgcagcaatgaggtatgcttaacttcagtttctaatgggagaaataaaacctgattaacttgcttgaaatatttgtgagttttaaaattgtgatcctggataataagtaactctaattttgaagttgacctaaactgtgaatgagctatccatttttacctacacgatagtattgagcaagtcaacaacctacgagagatccaagcactgaggcgcctgaatccgcacccaaacattcttatgttgcatgaagtggttttgtaagtatatttggagcttgaaaagttatctaaatttgatgaaaataatctctttttaagaaagaaaaccatggtagacattttgaatatttactttgtagctcagagagtaaccatttttacttcatcttacatcacatttttatttggaaaaatgtgcatctgattcttttttttattattattttttgagaaggagtctctctctctgtcatgcaggctggagtgcagcggcgtgatcttggctcacaacaaactccgcctccctggttcaagccatctcctgcctcagcctcccgagtagctgggatcacaggcacccacaaccacgcccagctaatttttgtatttttagtagagatggggtttcaccatgttggccaggttggtttcaaactcctgacctcaggttatccacccaccttggtctcccaaaatgctgggattacaggcatgagccactgtgcccggccagcatctgattcttaattaatgtggaaatgccttcatttaggtgactccacatcataaaagcatccgtcatgcaaacagttcatctcctggagctcagttaggctgctaaggtcttgagtgtgaattttgacctactgggaaagcactgtttgtgttatttcagggattgtacattctcattctgtccctgccagttgccatttctgaacagtctcctgtagtctttcttactgtaattgataacatttctggggatttttcatttctgttctaattatagaatagtttccataaggcttatctatcattcaaaaaggcagagcacagcttgtccctcggtgcctgcctgagcctgggaagccttcttcctgacagctctgtgctgtgcttacagacctcactgaaccagggagtcaggctacagggttttgggaccttctttgctgtgggctagaatggcactgacactctgagagggtgcacctcagtgtagaagcttcgctgtggctccggagggagcctggcctgtaagatcggccaaggaactccagttaaacttcactgccagttaaagtctggtagattttaatcagagaatgaaacagttttaaactcaaaatgaaatgtcttgttataactgtgtgggttcctgtcctgtagcgttcttagaagtcaatttgggccaggtccagagagtgcagtttgtatgtaatagtctcaacactgcatgcacgtcgtgcacttcccacgcactttacaaagtactctgtccagaatctcacatggacctcggaacaaccgagacctcttccagccagattggaggcacccagagtagggtctgggatgatacaggctcttgctcaggactctgggaaccctttaagggcctgcttgaac

SEQ ID NO: 13106 - DNA, 2300 bp, Homo sapien
gacagggtttcaccatgttggttggccagctggtctcgaattcctgacctcagttggtccatcctcctcggcctcccaaagtgctgggattataggtgtgagccaccacgcctggcttgttttgtattttatttatgtatttgcttttttagacggagtctcactctgtcgcccaggctggagtgcagtggcgcaatctcggctcactgcaacctccgcctcccgggttcaagcaattctctgcctcagcctcccgagtagctgggattacaggtgcctgccaccacacccggctcatttttctattttcagtagagatggggtttcaccatcttggccaggctagtcttgaactcctgacctggggatccacccgccttggcctcccaaagtgctgggattacaggcatcagccactgtgcccagccgttttgtatttttttagtagagacggggtttcccccatgttggccaggctggtctcgaactcctggactcaagtgatctgcctgcctcggccgcccaacgtgctgggattgcaggtgtgagccaccgcgaccggccgctttctctttctttcgagacaaggtcttgctttgtcacccaggctagagtgcagtggtgctatcatagctcactgagcctagaactcctggtctcaagatacctccgccttattctcctgaatagctgggtttacaggcatgtgccaccgtgcccggcttttttttttttttttttttttttttgagtctcttgctctgtcgcccaggctgcagtgcaggtggtgcaatctcggctcactgcaagctccgcctccagggttcacgccattctcctgcctcagcccccggagtagctggaactatagcgcccgccactacgcccggctaattttttttgtatttttagtagagatggggtttcaccgtgttagccaggatggtctcgatttcctgacctcgtgatctgcccgccttggcctcccaaagtgctgggattacaggcgtgagccaccacgcccggagtttttttttttttttttttaagagggaagtggggtttctctatgttgcccaggctggtcttgaatttctggcctcaagcgatcctcttgcctcggccttccaaagtgctgggattacaggtgtgagccaccacacctggccaattcagtcttaaaccaattttctgaggcttcgttttggcaaggctacttatctgttttaaaaataaacgatgtattttagtaaaagaaaaaaaatggaggaaaaaacagggttttgatctcatggaataattatgaggctaatctaatgagcttcataaaatactatacccatacatagtatgcttgttattttattgttttgtcagggtccagagaactaggccactgtgttgcttaggcaccgtgtctgcacatagttcattccggtgtacattcattcatctttacactagaatgttagtttcaagaactcagtcacctcgtctacactgtcctttaatccccaatacctgcgacagttcctggggcaaaaacaaatgcttgttgaattaaaaagaaaaactgggccgggcgtggtggctcacgcctgtaatcccagcacttcgggaggccgaggcaggcggatcacctgaggtcaggagttcgagaccagcctaacatggtgaaaccccgtctctactaaaaatacaaaaacattagccgggtgtagtggtgggtgcctgtaatcccagctacttgggaggctgaggcaggagaatcgcttgaagccgggaggcggaggttgcagtgagccgagatcacgccattgcaccccaacctgggtaacagagcgacactctgtctcaaaaaaaaaaaaaaattcctgtagaagctcccaagcccaattaaagctcaaggctatcgtccacgtagtgggttccaaatcgctaagttcccaggccagcagggagagcgagccgagcgaaggtcgcctgtgtcaaaggcggggatttgcacagtatttacatggaagcggaggaaaggctgcttagcaaccgggctgaggggacgggctgcactgcgcacgcgtacatgggcggggcatcttgcgcatgcgcaggcgacagctcatggcgttcagggcctgacggttgctagggtgacagggacacaacatggcggcgggatctctaacgctctccttcgagggaccaccacggagatcctagtgcgggaccccgcctcagggaagtggaaagcagggggacaaccttcctgcttctttcttttccgtccagtgtcggcaagg

SEQ ID NO: 13107 - DNA, 2300 bp, Homo sapien
cccctttggcctgctcatctatccttgtcctttggacacagtaaagtgctccagacttcaggacgcttgcccagcctcccagcacaccacctaatcttctccgttccctataatatccgccttccttgttatgcggagagctccatcaggatggggattaggtttctttgactcacagctgattgggggccagggcactgccgggctgaatgagtatgtcttcactgagtgtccgtttttctaaacctggtcctctagccttactcgtggagggtgacctacctaacatcctttacataaaatcttttcgaatcagctagactcggtttctgctgcttgtgacatagaaccctgacgatacctcagtccaagcagtttagtggagtaatcagagcagaatgtataatgttaaaaagctggcccgatgcggtggctcacgcctgtaatcctagcactctgggaggccgaggcaggcggatcacttgaggtcaggagctcgagaccagcctggccaacatggtgaaaccccatctctactaaaaatacacacacacacacacacacacacacacacacacacacacacacacaaagtaaccggacaaggcgcgtgcctgtagtcccagctacttgggaggctgaggcaggagaatcgcttgaacccaggaagcagaggttgcagtgagctgagattgcaccactggactccagcctgggtgacagagcgagactctgtctcaaaaaaaaaaaagctggtgctcctggagtgggagggccacgcagcacaccatagtcaggccctgtaggagaacagtaggcctctgggacatgcaggctgggtggtggacacggtggtggtttgtcttcccagccttttctttctctctctctttttttgcatacagatcctacgcttttaggggtgggtaccatcgttgcctactcagtggctgtttcaacccttctgcctgtaccatgtgatttatttatgtgctcagttaacaagagagagagcaaaatgaaaacatttttacagacactaaaaaaaaaaaaaaaaaaaaaaggagaaagccatggtggtttgtccactcaatgaaacactgagaaatcatttaaagtgacatttgcaattgtttagggatatgcttattctagaatattaaatgcaaaaagaaagataaaaaatagactgcttcattgagccgaaatctcgccactgcactccagcctgggcgacagagggagattccgtctcaaaaaaaagactgcttcatacaaggctttggattccgtgtgtgtgtgtgtgtgtgtgtgtgtgtataaatacacgtgtactgtaggaaaaaaaaccagcaggaaggaagccaagaccccagcggcccttgtttattgggcgatagggaattcggtggttcttttgtccggttttctgtattttccaagcttgatttaaccatgctaaaggcctctgttacacgaagtttccacgctgcaggattctcggagataaaaacaacactgagttggcatgtttgaaaaccttctcactgcggagctaagcctcccatgtgcaatttgcatttttcctgtgaaaaaaagccgccttcgctgtagggagtcgcctcccttctccttgaagtcccctaagtcttagtttctgcatcgggccaatggggatgactgtgaagaggtcggaagtcgcggctgtggcgaagcggaatgcagccagcggcgccggcccggcagggagtcgctagggggcgggcgcgggcttggagccctcttaggcgctcccgtgggggcccaacgtcaggcggccggttagctcagttggttagagcgtggtgctaataacgccaaggtcgcgggttcgatccccgtacgggccaggctaactttttttttttttttttggtccccgcaatgttcctttctgatactgtaaccggcgtgcaggcaggagagaactgcggaatcttttggactggcccagaggttatccaaggctacctgctggggagagcgggaggaactcagagcgcgctggggcggtggctcctcaccccgagtccccgcgccgccacctgaagggtctgttttagaatgccattggttaggccttttacttttgtcgttttaaaggacactctggacatccaaccgatgcacatcccacgcccccaccccccacgtttcctgaggctgcgtctggcctggaggaaccgcccagtgaagacaggtgctcgcagatatcaccgcctagtgttccctgggcccacttgcggggaagtcttggaggt

SEQ ID NO: 13108 - DNA, 2300 bp, Homo sapien
ggctgggagcaaaacggtgagacacaaaccccaacccgctggagacagtgaccagccactagatgactgccatgtttttagtgaggcattcaggttgtggaagcctctggaaaccttctcttgctttttgtcccccctcttttcttttcggagacatcttaggcttcacatttcttcctcttggttctacattttgaagccagagcaagtggatgaatttctcactcggttcgtttctagggtggtcaggtgtgctcagctgaacaaaagccggttgtataaggttgatgccattttatgtcaggatccggcaagggctccacctgtttttgaaaattctacagtggaaacagctactagttctgacctaaataagaagcagctcaacatctacagaccttggtatgtgcccagggtgtagtaaaagttctcaataaatgccagccgatggcgctgctgctattataagcaaagttaggagagcctggggcagctgacacttaaaatagacatctgtacacaggatggatgtcacatcttttaatagtcgtgccaggcacgttgttagatgcagggacacagcatggaggaatcggtggaggttgctgccctcaagtttcctgagcttgaaggggtttagaatatgccacggtggcatgaaaattattttgagcagaaggcatgtgaattcctgaaatctggtcgggtgtggtggctcacacctgtaatctcagcacttgggaaggccgaggcgggcggatcacctaaggtcagggtttcaagaccagccttaccaacatgatgaaaccccgtctctactaaaaatacaaaaattagccaggcatggtggcggacgcctgtaatcccagctactcaagaggctgaggcaggagaaccgcatgaacccaggcgatggaggttgcggtgagctgagattgtgccactgcactccagcctgggtgacagagtgagatcttgtctcaaaaaaaaaaaaaaattgtggtaagatacccataatataaaattcaccattaaaaaataacacggaagggatcatcgtgaatgcaatgtgagtattgatgaggatggtggtgatcttccagaaccttctctgacgccacccaggccgccagccttactttaccggcttcggcgctcatcatactgtgctgcaaatgccagtttcctccttcccccttgggaagtttcctccttgggggtcggcacctagactgtataccccccagggcggaaacagcggttcacccaccaggtgcttaagaagggtttgtggaccagtggacctcctgctctccctggggaaaggagctgggacatgtgtacacacctgcagctacaagattcggagggcgcacagagcctcaaccgtaagaaggagaggcgatcaggctgaggaagatggggcagtggagctggatggatagagagagggtgggttcattcattcgttcactcattcgtttattcatattcatccatccatcattcatgccctgagcgtgcgttgtgttctgggcagggcctgtgctgggcaccgattgtgtaatatatcatctctcccttcaaggtgcacccaatctgggtgggtgggtagagagaagctacggtgacaaggcaaaaatttgggaaacactctcgttaacaattcaaactgtggtcccctcccagatgtataaatccaaatgtttaggggtgggcacagtactctgcatctccagacagcatcctccgctgattcggatgcatgatgacgtcagaacacttggatattgtggtaacttttgggccaggggctctgaaaccccgaagacctccccctgggagatccgggacagctcccagagaaggtgagtcttaaacacatccgtgacaggcaataaggaaaataaggggggtccgctctgctgatcagccctaagagccgcggcggttgtcggctggggcggggcactccacgactttcccggccagacacggtcgccttcctaggtgtcttggcctgcgaggcactcgtagcccgcccctctcctaggtgacgtacattggagacgccgtcgctcagcgacccgggttcgagtccccgcctcggccgccatggcggatgcggagccggaggctgggggcggcagcgaggatggcggcggcggcggcggcccggctcctccgggccagagcggcagcgtcgcacgtgtggccccgctgggccccgagcagctgcggcaggtcctggagcaggtgacgaaggcgcagccgccgccgccgccgccccccttcgtgct

SEQ ID NO: 13109 - DNA, 2300 bp, Homo sapien
catgcctggctaatttttgtacttttagtagagacggggtttcgccatattcgccaggctggtgtccaatttctggcctcaagtgatctgcccacctcagcctcccaaaatgctgggattataggcatgagccactgcaccttgcctcatttattaattctaatatttgtgtgtgtgtgtgtgtgtgtatgtgtgtgtgtaatctttaggcatttctacatataagatcatatctgcaaatagagataaccttttttttttttttttttttttgagacgaagttttgctctgtcacccaggctggagtgtaatggcgtaatatcagctcactgcaacctccatctcctgggttcaggcgattctcctgcctcagcctcccgagtaggtgggattacaggtgcccaccatcatgcccagctaattttttgtatttttagtagagacagggttttaccatgttggccaggctggtcttgaactcctgacctcaggtgatctgcccgccttggcctcccaaagtgctaggattacaggcgtgagccattgcgcccggcctcagattttctacttctttgtgatttagttttggcaggttttgtgtatgtaggaatttgtccatttcatttaggttattcatgttgttcagtgttgtagtatttagtattctattataattctctctctttttttaatttttattattattttttgagacggaggtttgctcttgttgcccagtctggagtgcaatggcatgatctcagctcactgcaacttctgcctcctgggttcaagggattctcctgcctcagcctctctagtagctgagattacaggcatctgccactatgcccagctaattttttgtatttttagtagagacggggttttactatgttggccaggctagtctcaaactcctgacctcaggcaatccacctgcctcagtccccgaaagtgctggcattacaggcatgagccactgctccccgctctttttttttttttttttggcgatagagtctcactgtgttgccctggctggagtgcagtggtgcgatttcagctcactgcaacctccacctcctgggttccagtgattcttctgcctcagccttcaggtgtgcaccatcacacctggccaatttttgtaattttagtagagacagggtttcaccgtgttgtctaggctggtctcaaactcctgacctcaggtgatccacccgcctcggcctcccaaagtgctgggattacaggcatgagccaccgggcacgcctggcctttattttatttttctacgttattattcctgttttcagaggagggaattgtcagggaatgaggaaacaggacatgaggacaaggccagatctagggttctcttcaaaagccatgcagatgcatggagacagaaagtagaccggtggttaccaggacctgtcgggagggaggaggaggagtgactgctaatgggtacagtttctttctgagctgatgaaactgtgttggaattagatagtggttatggttacacaatttcgcgaatattttgtatccactgaattatgtactttcaaaggatgaattttatggtattttaaatctatccagtaaaataatttaaaagtttaaaaagtcatggatacgtaatgaattaggaacaaaattcaggtcaggttttaaaatgacagtcacatcagagaaatctttttttttcttttttttgagacagagtttccctcttgtcacccaggctggagtgcagtggcaccatcttggctcactgcaacctctgcctcccaggttcaggtgattctcctgcttcaacctcccgagtagccaggactacaggcgcgcgccaccgcgcctggctaattttttgtattcttagtagagatggggtttcaccatgctggccaggtcggtctcaaactcctaacctcaaatgatccacccgccttgggctcccaaagtgctgggatttcaggtgtgagccacggcgcccggccactaaaaggtttttatggggtatataaagcatgattgttttattttacttttgggtgtgcaacactgtctagaatggtcagtctgtagacgttgaagagacattgccatctgaaccagaaaatggagctcttttgcgatcagagagataccaaggacctagaagacgcgcatgctcagagacccttgcagagtcccgcacagctgtcctccagcagagaagagctgctcagctacctggtggccctgctgcggcaggggagcagagggcgtcgccaagcaaagccaggc

SEQ ID NO: 13110 - DNA, 2300 bp, Homo sapien
ccaggaggcggaggttgcagtgagccaagatcgtgccattgcactccagcctgggggacaagaacgagacttcgtctcaaaaacaaaaacaaaaacaaaaaaaactgtcagttgaacctaagtgttaagcagaaaattgtggagtttccctgtctgctgttattaagctcatacagaatttaggtcaggccatggcaaggtaatatcccatattcccaccttctcccacttcctgtggagttgaaagtcagctggccacttctttcaaaagatttttgaaagtcttaattaaacatttttgtcttataatgaaaagatttttctgtagcttttctgcttgttttgcgagcatctgtggccctcctctgaagcccttccagccctttgcagctcctactcaatctcttgctctctctctaaatgccaatctttttttttttttttttttgagagagggtctcattctgtcacccaggagcgtagtggctcaatcatggctcactgcagcctccacctcccaggctcaattgatcttcctgcatcagcctcccgagtagctggacccacagcacaggcgcacacccccacacccagctgatttttaattttttttagagacagggtctcattatgttgtccaagctggtctcgaactcctaccctgaagtaatcctcctggcttggcctcccaaattgcagggattacaggcgtgagccactgcgtctggccttctaagcactgatcttgtgatctccctggacctcagaagacttcctgtttctaggacttcctcagcttccctctcactttattgcttccctggggatctcaccgtcctcctggtttcccaggccttcttccctctacagactcccacgcttcccgttcagacctctctctggtgcctcagatctcttcattgaaacatctccacctggctgtcctgtgaacccctctgcctttcatgtctgagcagagcccacaagctggctttctgtccacccctgcattgtcaggggccgtttcgcctaccccaggctcaagctgggaacccagagccattcttgactttctccttcactcactcctccccatgtcctgtggtcgctaagcctggagggctatgctctcccctcatctccctcccctgccacccacatccctctccttacctgagtcctcatcttttcctgactgtactgtgggggtagtcttgactgcctgccaggcttccagccctgccccatcctctgcaccaccacccaaggcaccttcctaaaacctccctccacagctgcctggagaaggaaatccaaaccttggcccctctcagcctgggcctgggttgcctttcagcccttctggcctgcccgtctccaggcgccgcctccagctgtgccaccccctcacctgagtatgcggcgcagcctgggtgagtcctggagggcaggacacacatctccttatcaccgtgtccttattccagggccttgcccaggacagtgcccagagcttgtcatgggggacccagaatggatcatagtacttcattaaggagcaaacaggtgaaatagttaataaagcagaatgtttagagttacttggtcactgaaatttttggagaactttctgttttttatgttgtatattgcaccaacttgttggctattgggaaattcttacgggacattcaaaggcatgaaatgctttcccttggtagttcctccagcagtgtgaccgggaggatctggtggaattggctctgcctcagctggctcaggttgtgaccgtgtatgagtttcttctgatgaaggtgagtactcttagtgtttctaaatgatagcgggatgattagaagttatttagaaataatattattatttattaattatttttcaatagcctgcatagttgttaattttatttttgagacagggtcttgctctgtcgcccagctagagtgcagtggcaccatcgtagctcactgcagcctcaaactgctggtctctagcaatccttccacctcagccttccaagtagctgggactacaggcatgcaccatcatacccggctaatttttaatttatttaaaaaaattttttttgtagagatgggatctagctttgttgcccaggctggtctcaaactcctggcctcaagtaatcctcctgcctcggcctcccaaagtgatgggattataggtgtgagctaccgtgcccagctcatagttgttttggaaagagccaggccatttggaatcgttttccttttgcaggacagctgaagtgagcctgctgg

SEQ ID NO: 13111 - DNA, 2300 bp, Homo sapien
ttccctggggatctcaccgtcctcctggtttcccaggccttcttccctctacagactcccacgcttcccgttcagacctctctctggtgcctcagatctcttcattgaaacatctccacctggctgtcctgtgaacccctctgcctttcatgtctgagcagagcccacaagctggctttctgtccacccctgcattgtcaggggccgtttcgcctaccccaggctcaagctgggaacccagagccattcttgactttctccttcactcactcctccccatgtcctgtggtcgctaagcctggagggctatgctctcccctcatctccctcccctgccacccacatccctctccttacctgagtcctcatcttttcctgactgtactgtgggggtagtcttgactgcctgccaggcttccagccctgccccatcctctgcaccaccacccaaggcaccttcctaaaacctccctccacagctgcctggagaaggaaatccaaaccttggcccctctcagcctgggcctgggttgcctttcagcccttctggcctgcccgtctccaggcgccgcctccagctgtgccaccccctcacctgagtatgcggcgcagcctgggtgagtcctggagggcaggacacacatctccttatcaccgtgtccttattccagggccttgcccaggacagtgcccagagcttgtcatgggggacccagaatggatcatagtacttcattaaggagcaaacaggtgaaatagttaataaagcagaatgtttagagttacttggtcactgaaatttttggagaactttctgttttttatgttgtatattgcaccaacttgttggctattgggaaattcttacgggacattcaaaggcatgaaatgctttcccttggtagttcctccagcagtgtgaccgggaggatctggtggaattggctctgcctcagctggctcaggttgtgaccgtgtatgagtttcttctgatgaaggtgagtactcttagtgtttctaaatgatagcgggatgattagaagttatttagaaataatattattatttattaattatttttcaatagcctgcatagttgttaattttatttttgagacagggtcttgctctgtcgcccagctagagtgcagtggcaccatcgtagctcactgcagcctcaaactgctggtctctagcaatccttccacctcagccttccaagtagctgggactacaggcatgcaccatcatacccggctaatttttaatttatttaaaaaaattttttttgtagagatgggatctagctttgttgcccaggctggtctcaaactcctggcctcaagtaatcctcctgcctcggcctcccaaagtgatgggattataggtgtgagctaccgtgcccagctcatagttgttttggaaagagccaggccatttggaatcgttttccttttgcaggacagctgaagtgagcctgctggtcacacaccgtgcctggtgtgggggccgctgcctgggtagctgggtgtctcgggcaggtgcccgtttactcccttgacttttaacttggtacaggaggaatggaagtggcagccacaaataatggctatcctgggctctcctagaacccactcgccccagctggcctcttctgcccgcggctctgctccttctgagcccactctgaggctgcagcccaggctgcctgtgccccacactccctctggagctgacagtccagccggggctcagggcctttctgccttcccttcccaccctgtccaggagctcacccatgccctacatggcccccacccagggcttgtttgtttcttggcctgctcctcccatgcccatcctggcttctctgcaccatgcggggcacacagtaggtgctcactggggactgaaggaaacgcacaccactgagggctgctgaggggttaaggaaccgaaactttgtttagattttcttctgtattttccatatcagtgccttgagtttaaactttttttttggtctttatcttcacgaaggttgaaaaagatcatctagcaaagccttttttcccagctatatataaggaatttgaagagttgcataaaatggttaagaaaatgtgccaagattacctcagtagttctggtctgtgttcccaggagaccctggaaataaacaatgataaggtaacaatctcccatggcagaaagagttttgctcatagagttagccagaagaaagaagggccacgtgcagtggcttatgcttgtagtcccagtgctttgggagactgagg

SEQ ID NO: 13112 - DNA, 2300 bp, Homo sapien
actgcagcctcaaactgctggtctctagcaatccttccacctcagccttccaagtagctgggactacaggcatgcaccatcatacccggctaatttttaatttatttaaaaaaattttttttgtagagatgggatctagctttgttgcccaggctggtctcaaactcctggcctcaagtaatcctcctgcctcggcctcccaaagtgatgggattataggtgtgagctaccgtgcccagctcatagttgttttggaaagagccaggccatttggaatcgttttccttttgcaggacagctgaagtgagcctgctggtcacacaccgtgcctggtgtgggggccgctgcctgggtagctgggtgtctcgggcaggtgcccgtttactcccttgacttttaacttggtacaggaggaatggaagtggcagccacaaataatggctatcctgggctctcctagaacccactcgccccagctggcctcttctgcccgcggctctgctccttctgagcccactctgaggctgcagcccaggctgcctgtgccccacactccctctggagctgacagtccagccggggctcagggcctttctgccttcccttcccaccctgtccaggagctcacccatgccctacatggcccccacccagggcttgtttgtttcttggcctgctcctcccatgcccatcctggcttctctgcaccatgcggggcacacagtaggtgctcactggggactgaaggaaacgcacaccactgagggctgctgaggggttaaggaaccgaaactttgtttagattttcttctgtattttccatatcagtgccttgagtttaaactttttttttggtctttatcttcacgaaggttgaaaaagatcatctagcaaagccttttttcccagctatatataaggaatttgaagagttgcataaaatggttaagaaaatgtgccaagattacctcagtagttctggtctgtgttcccaggagaccctggaaataaacaatgataaggtaacaatctcccatggcagaaagagttttgctcatagagttagccagaagaaagaagggccacgtgcagtggcttatgcttgtagtcccagtgctttgggagactgaggcaggtggatcacttgaggtcaggagtttgagaccagcctggccaacatgacaaaactcagtctctactaaaaatacaaaaattagctgggcgtggtggcacatgcctctaattccagttattcaggaagctgaggcacaagaatcatttgaacctaggaggcagaggttgcagtaagctgagattgcaccattgcactccagcctgggtgacagagactctgtctcaaaaaacaaaacaaaaccaaaaaaaaaaaaaactccatgtatgaaggagaatgtttttagtaatgacattttcctgttcgacctcattttagctttttcccatcaagtgaaaatttttttttctttttgtttttttgggagatggagtcttgctctgtcacccaggctagagtgcagtggtgtgatctcagctcactgtaactgccgcctcccaggttcaagcaattctcctgcctctgcctcccaagtagctgggattagaggcgcacaccaccatgcccagctgattttttgtattttagtagagacagggtttcaccgtgttgcccaggctggtctcgaactcctgagctcaggcagtctgcctgcctcagcctcccaaagtgctaggattacaggtgtgagccaccacatccggtccccagttttttttttcttaaagcaataaatgctcttccagaaaactcaaaaatgaagataagctagaagaaaatggaaaacaccataatcttcccactcactgatgatcagagttaaaacctcaggtatcattttcttctttttttttttttgttttgaaacagggtttccctctgtctcccagactggagtgcagtggcacaatcacagctcaccgcagcctcaaccttctggtcccaaacaatcctcccacataagcctcctgagtagctgggactaccgccgtgtgtcaccatgcccagctaatttttaaatttttcgtagagaaggggtctcgctgtgttgtccactctggtcttgaactccagggctcaactgatcctcccttataggcctcccaaagtgctgggattacaggcatgaaccaccatgcctagccctgttttcttccttatgtgggtttttggggatggattatataggggccattcatttttgtttgtggtggttccgacacaattc

SEQ ID NO: 13113 - DNA, 2300 bp, Homo sapien
cctcatacttagtatcctcactttaaaatatcatcttgatttatcattcattctttacttaaacaacaaatatttgcttactgcctacaatacgccaggcatgggggaatgaagtgattgaatgagacggaccaggaccgttttcatggaacttactttccaaaggggaggcagataataaacaaatgaccacgatcagttcagatcatgattaagtgtgtgtggaaaataaaacagggtcttgtgttagtgtgatcccctgagaaggtgtcgtttaggctgagatttgaatgatgaaaagccagaaatagggtaggtcagtagtatgtgccctaattatgataatgaggttggtgagttcaaaaaacagaaaacaaaacaaaacaaacaagcaaacaaaaaaaccagtgtgctggaatgaaatagacagaaaaggactagtgcgtgagtaggtgatcagacaactagaacctaataggccaagataagaagttggaccgagggcagtggctcacgcctgtaatcccagcacttcaggaggccaaggcgggcggatcacgaggtcaggagatcgagaccatcctggctaacacagtgaaacctcatctctactaaaaaaatacaaaaaatcagccgggcgtggtggcgggcgcctgtagtcccagctactcaggaggctgaggcaggagaatggcgtgaacccgggaggcggaacttgcagtgagcccagatcgcgccactgcactccagcctgggtgacagagcgagactccgtctcaaaaacaaaacaaaacaaaacaaaacaaaacaaaataaaaaaatgaagtttggacttctaagtattagcttggtgcaaaagtaacagattttgccattacttttaacagccaaaattgccattacttttgcaccaacctaatacaatggggagtgagcaatgagctctggatagggcagtgaaattatctgatttaggtttttagaaagtcatttccacagagaagtattcctggatcccccaggttgggttacgactcaccactagatatgtggtacaccctataattctgctatcatgatattcaccagtggagtgtatttgcttgtttaatgtctatattccctgctaaactggaaattcgactagggtaggaactatgtctcgttctctttcaaaccttccacacataggaggctttgcataaaatgaggtaaatggaggaatagctcttaccacctgttctataattgtctaagggttttccccccaacaggagattctgagggcaggatcacatctgattcatggtcagcctgactcatacggggcacatatttaggaaccaaaaacataactgacttcaagaaactcaagggctggtaaagacagaccagtcatcagcgtcacaggacagggtagggtgagggcacagtggctaagttacttatcccctctgagcctcgattccccatctgcaaaatggggttgacattacttcatgggaccactgtgaggttcaaatgagatgatccacttaaagtgcttggagcagtactcagcaaactgagcactaggcgaaagccagctttcattacaagcagaatgttctgactgagggcagttcagagaggagtttctggacgagatgagcatgcaaggcttggtacccagtgaactctgttagtactaatttatagtgacaataattacaatttggatgtcggatctgctgacactcatttgcgtatatcgtcccgttcatctgtcactgcacatgtgaaaaaacggaggctcggcaaaactgtctcccgagcagctcgcagaggctgcgaggggcctgcgggctaggctggggtaagacagaggacctccatttaacctcatgtaatccggggagctcctgagcttctggtccaacctgcggcctaagcagtaacattcacagccaccccaccccgggaaaggaaccgatctcacgcaccttccataaggtccacagatatccgtagaaggagacgcgaagccccgcccaccccaccggaaacgcatttgcgtcacgtccgccccgcccgctgccacttgtggctctgccgctctagcccccggcggagccagctgctgctcttcggtgctggccccggtgccggccccgttgcccagggaacaggctcccggcagcccccgcggcccggagtccatcccgcctcctccggcccggcggggccgacgagtccggaggggctgccgcgggaggtgagtccggcgacgccgcaagcggccccgacgcccccgacgcccc

SEQ ID NO: 13114 - DNA, 2300 bp, Homo sapien
cagatcatgattaagtgtgtgtggaaaataaaacagggtcttgtgttagtgtgatcccctgagaaggtgtcgtttaggctgagatttgaatgatgaaaagccagaaatagggtaggtcagtagtatgtgccctaattatgataatgaggttggtgagttcaaaaaacagaaaacaaaacaaaacaaacaagcaaacaaaaaaaccagtgtgctggaatgaaatagacagaaaaggactagtgcgtgagtaggtgatcagacaactagaacctaataggccaagataagaagttggaccgagggcagtggctcacgcctgtaatcccagcacttcaggaggccaaggcgggcggatcacgaggtcaggagatcgagaccatcctggctaacacagtgaaacctcatctctactaaaaaaatacaaaaaatcagccgggcgtggtggcgggcgcctgtagtcccagctactcaggaggctgaggcaggagaatggcgtgaacccgggaggcggaacttgcagtgagcccagatcgcgccactgcactccagcctgggtgacagagcgagactccgtctcaaaaacaaaacaaaacaaaacaaaacaaaacaaaataaaaaaatgaagtttggacttctaagtattagcttggtgcaaaagtaacagattttgccattacttttaacagccaaaattgccattacttttgcaccaacctaatacaatggggagtgagcaatgagctctggatagggcagtgaaattatctgatttaggtttttagaaagtcatttccacagagaagtattcctggatcccccaggttgggttacgactcaccactagatatgtggtacaccctataattctgctatcatgatattcaccagtggagtgtatttgcttgtttaatgtctatattccctgctaaactggaaattcgactagggtaggaactatgtctcgttctctttcaaaccttccacacataggaggctttgcataaaatgaggtaaatggaggaatagctcttaccacctgttctataattgtctaagggttttccccccaacaggagattctgagggcaggatcacatctgattcatggtcagcctgactcatacggggcacatatttaggaaccaaaaacataactgacttcaagaaactcaagggctggtaaagacagaccagtcatcagcgtcacaggacagggtagggtgagggcacagtggctaagttacttatcccctctgagcctcgattccccatctgcaaaatggggttgacattacttcatgggaccactgtgaggttcaaatgagatgatccacttaaagtgcttggagcagtactcagcaaactgagcactaggcgaaagccagctttcattacaagcagaatgttctgactgagggcagttcagagaggagtttctggacgagatgagcatgcaaggcttggtacccagtgaactctgttagtactaatttatagtgacaataattacaatttggatgtcggatctgctgacactcatttgcgtatatcgtcccgttcatctgtcactgcacatgtgaaaaaacggaggctcggcaaaactgtctcccgagcagctcgcagaggctgcgaggggcctgcgggctaggctggggtaagacagaggacctccatttaacctcatgtaatccggggagctcctgagcttctggtccaacctgcggcctaagcagtaacattcacagccaccccaccccgggaaaggaaccgatctcacgcaccttccataaggtccacagatatccgtagaaggagacgcgaagccccgcccaccccaccggaaacgcatttgcgtcacgtccgccccgcccgctgccacttgtggctctgccgctctagcccccggcggagccagctgctgctcttcggtgctggccccggtgccggccccgttgcccagggaacaggctcccggcagcccccgcggcccggagtccatcccgcctcctccggcccggcggggccgacgagtccggaggggctgccgcgggaggtgagtccggcgacgccgcaagcggccccgacgcccccgacgcccccgacgcctggccccgagcccctcctcggcctcccccgggccactcttcccttgcctcagccccgcagggtctccatgcccgtccgccccgtctccctcgcccgcggtctcgcccgcgcggagtggcggacactaaatgccacaacacacggagcgcctggctcgccgcccgcagaatccggcggtccgcagcggggaacag

SEQ ID NO: 13115 - DNA, 2300 bp, Homo sapien
gaacatgcatcttgagtaacagctcccttctaccttagcaattcgcaaagccatcaactactcccttctaattttactgatctctctgtgcattactgaatctagaaatctcttcgtgcttgacaccaaagcttttcattataaccctttcctgatctattcctcatcttcccaagttcaatcaactgcctctgcctgatgcctgtttccttccttttcttcccactaagttccagtagccatttttttcaactcctacagcggctaatatgaaatgaaattctccccaaacttaagtgtaacttctttaagaaaaaattggaaaaaaaaatccagtagatgccagtcttctattgaaaaagacacgtgggtataatatagctgatgcctaacaaaagctacttcctagtcactccttcagaagagggttatcctcattccatcttccccaccactggttttccaaggcagtcctgaaaattcaatttgtgtgtcccctacacctgcacttagttctcccttttaaagttcatgggccagaccatgatctttctgaggcagtgacctcaggaagggtctgtctggttcaccacagcatccctagagccagcctggcacagtgctggcacacgatggccaaataaccaccaatatgggacgtaagtcaggttaacaacaacaacaacaaaaataaggtcagaggtttatcaaggtacattatagctgggtgtgagaaaacacaaagtcctgcagcctaaaagaccaggaatcgctggtgatcacaaggagctacagtggcttcattcccagattctacctatgcctgggatttgcgttttgagatttcccagaactctgtctacaagaccttggctgcaaggaggcagtccacaagtgcaactggtcactccaatagatgagaaaaggatgcacccaggctggtatcccacattctgccaacacatggaacataagtcacagaacagaataaaattcctgaatcccaataagagaggaagaaaaaagtgcagggaagagaaatggaggtagagaaggagaaactaaagtcatgagaagtcagagacatatcagaagggactagagggcgagaacgcaggctagcacagatgacagcaggggctcccctttactgaaatgtacagcggcaggcaccgtgcttaactttacatgcactgacccatttaatcctcttaccaagccagaggtagaaactattctcatctccattccactggtgatgaaactggagcggagtgaggtagggcacttgccccagcacagagctaggaaggggccgctgggacctgcccggctctgactccaggacaccccatcctttaacacttactacctattctgcctcccatgccttcaaataggattgggaaaggagtcattcacttatccactcatcgaacactgaacaccaactggatgagtgtcaaggcctggggccaggcgccggtgggcggatgtaagggacgcgggctgcgagtgggggacagaacacgacgtcaatcttaaggcgaaggagcagagcccgcggccagaccggcagccgggatgcagggtggggccgggggccgagggcgcgggacgcgcagcggaggcctgaggaggggcgggcggcccctgttccccgctgcggaccgccggattctgcgggcggcgagccaggcgctccgtgtgttgtggcatttagtgtccgccactccgcgcgggcgagaccgcgggcgagggagacggggcggacgggcatggagaccctgcggggctgaggcaagggaagagtggcccgggggaggccgaggaggggctcggggccaggcgtcgggggcgtcgggggcgtcggggccgcttgcggcgtcgccggactcacctcccgcggcagcccctccggactcgtcggccccgccgggccggaggaggcgggatggactccgggccgcgggggctgccgggagcctgttccctgggcaacggggccggcaccggggccagcaccgaagagcagcagctggctccgccgggggctagagcggcagagccacaagtggcagcgggcggggcggacgtgacgcaaatgcgtttccggtggggtgggcggggcttcgcgtctccttctacggatatctgtggaccttatggaaggtgcgtgagatcggttcctttcccggggtggggtggctgtgaatgttactgcttaggccgcaggttggaccagaagctcaggagctccccggattacatgaggttaaatggaggtcctctgtcttacc

SEQ ID NO: 13116 - DNA, 2300 bp, Homo sapien
ctttctcccggatcccgggtcttcctctctctgtgtctgtgtttgtttgggtggagtttatcttccagtcggttcccaaggaagggttcatggttggtgactttttggaggtattgcatgtctgaaaagtctttcatctgtgttcacccttgaccttgctggatatagcagtctaggttggaaaccattttcctttaggattttgagggtctttctccattgtctctcggcttccaggattgctactgagaagccagaagcctttctttttttttttttttttttttttgagacggagtctcgctctgtcgcccaggctggagtgcagtggcatgatctcggctcactgcaagctctgcctcccaggttcacgccattctcctgcctcagcctcccgagtagctgggactacaggcgcccgctaccacgcctggctaattttttttttttttgtatttttagtagagatggggtttcaccgtgttagccaggatggtctcgatctcctgaccttatgatctgcccgtctcggcctctcaaagtgctggaattacaggcgtgagccacctcgcccggcccagaagccgttctaacacctgatccttgatacttgacctgtttttctttctgaaagtttgtaaggtctctttgttcctagtgttataagaacagatacatagtggtatgccttggtgagggctgtgttcatccttgcagccaggtggttgcagcctatgtgctggtgggtgtctgggtcctctgctggggtcctcttctgccccgcctctcttgttttcctttttttgttgttatgtttttgtgtgttgttgttgttgttgtagggttttttgttgttgtggggttttgttttgttttgttttgtttttgagacggtctctcactctgtcacccaggctggagcacaatggcgcaatcacagctcattgtagctttaaacttctgggctcaagcaatcctcccaccacagcctcccaagtagctgggaccacaggcatatgcaccatgttcagctaatttttttattattttttgtagagatggagtctcactatattgcccaggctgcttttgaactcctgggctccagcaatcctgccaccttggcctcccaaagtgctggattccaggcatgagcaactgcacctggcacccctcctgttttctgtctgctctggctgaaggcctccttttccttttctttttttttttttttttttttgagttggtgtttttgcccttgttgcccaggctggagtgcagtggcgcaatctgggctcactacagcctctgccccccgggttcaagcgattctcctgcctcagcctcccacgtagctgggattataggcacctgccaccatgcctggctgattcttatattttcagtagagacaaggtttcaccatgtttgccaggctggtttcgaactcctgacctcaggtgatccacctgccttggcctcccaaagtgctgggattacaggcattagctactgtgcccagcctggaggcttccttttgtattgtggactttctaagctggcctccacttttcctttctctcctgtttctgtctttttatgcttttatcctgctttctagaagacattctcaaccttatttctccaaccctctgtcagattatttccatgatcacatgtttaatttctgaaagttcctgttgttgtttgatggctgtagagtcagtcttctctcatctccctaaggatgttttggaagtttcttctccctgcctggtctttgtatgtcccaagttgtgtgttttctgtctagttcgccttttacatggcagaggctttcttcagatgttggcagtcccctggttggaagagtgaggcccagcaaggctgactggaagccctgagcacatgcatggagcctgtgggccccgcgggtctctgacagcaatctggctgggctgctgggtggggagtcgttgcttttagccttccagggcccgctgagtccttgccatgcatcccccactttccagcttccagaattgtatggctgcttcctcccctcattctctctgtccttaggagatttgaaccttttttctttgagatggagtcttgctttgtcacccaggctggagtgcagtggcccgatctcagctcactgcagcctccccctcctgtgttcaagcaattctctgcctcagcctcccgagtagctgggattacaggcgcatgccaccatgcctggctaatttttgtatttttggtagagacagggtttcgccatgttagtcaggctg

SEQ ID NO: 13117 - DNA, 2300 bp, Homo sapien
gagggtctccctggtgagatagtactggaagggcagggacagcattctagggaaggaaccagaaagagcccctgcatggaatgtggggatttcaccatgagaccccggctgcctggcctctgagaacgtgtgtggggggattccaggtggaaggtcgtgtctgggaggatgggtggggggttgagcagtcattgcccctctccagatctgcgtccacatctgtaaaatgggcctagaattcccagccgctgggggcgagtgaggccataaattagttgagatggacccaggctcctaagccccctaggtcatgaccccaaaccttggaacccccgacggagacggtgggggtggccgaggcccaatcgaatctatcccgcccagatgtgggaagaaccgcagggcaaacccccggcttccctcctggccgctcctctctttgaggccacctctctgagccctgatttgctggcgggtgaactggggatcatcgtgtccactgtggctggtggtcgtgaaacgaagtggaaacatgagtgttgaggccgagatgggcgcagtgcgcgctcctaaacagctgtccccatccgtccgcccctccctcccttgcgcgggtcagctggagcgggggcgcgccaggcacgaccctggccgggcagaaggcggtggagcccttaggggtcgcggctcctacccccggccctcccatgtgcagatggggtagcagcctggaggtttttcccaaggtcacgtaaggtcaaagaaaaggggagctggacgcgacgaggaaagtcacgcacggcggagggcgggccacctacgcgcgcgcccgagttcgcagagcagcggcgccctcccgggctagggcagctcggagctcggagcctttcttcgcccgcagctcgggttccgggagccccgcccccgcccatcaacgccccgcccctttcgccacggccccgcccctcctctccgttctccccgccggcgctccctcaagtttctccgaagttttccgcgggtccagcggtgcgccccgcccgccggccagtgacgtaacaatggtgcagcgcggcggccaatgggtggtggcgggggccggcggcgcgggccaatggcggcggcggacggtcccgctgtcctgcctggccggggccgcactgcgccgcccgccgcccgccgcccgccgcccgccgccggcgacggcaccgccgccctgcgatccggccgcggcggctcagagcgcggctgcggcgggcgcgggcggcggtggctccctcccgtgcgtccgtcgtgggacctttgcccgctcgcccgcgggggacagcgcgcgctccggtccgcggcaggggcggggacgcccggcctgtggcccccgcgccccccatggtgagtccccgtcccccgcgccgcgcccgcggccgccgccccctcctcctccggcacacgcgcacgcaggtgcagccctcgctgcgccggccacctgcgcgcggacgccccgctcggccccgcgaccctccgccgcccgacgtctggccgtgcaggccgggaggggacgggtaggaggtggcgggtggccccgggcgcggcgctgccttcgatggcccaacccccttattcacgagccgcggccgtgactctgcccggtgacgtggggaggccgaactttacgtaacccgcccggcgccccacgcgtgccggcacagggcatatctggggcccggaggcccaggcttggggaaggggctccagtcacggtgttgcccacgggccacagcctacccgcaccgcgccgctctctttaactcagttactgccagtgatagtgacccagtcagtgtgtgtggacgcggcctgccttctgtcccaggccccttgtgaccaagggcttacccttgaaagaaggcagtagggaggttgggacggagccagaggtcagacgcctaggctcaggtcggggctggggactcagagggcagggtcagggcctaagctcgattgcctgtgggttgggggtccccaccaattctggaatgagcccaaactgagacgcaggggacctgagttctaggcctggctctgccgtggcttgctgaccttggagaattggagaagcttgtgccctgctggaaagtgggatggcagtacccgcttcatctagtagtcggggagatcaagagaggtatgggacctgaagaggatggcagactgtgcagtgcggtgcacaccggtctccaggttgttttcaccctcctatctcctcccaggagctaacgtgtaagcaaacatgtttggataga

SEQ ID NO: 13118 - DNA, 2300 bp, Homo sapien
actccagtctgggtgacagaatgagactttgtcttgggaaaaaaaaaaaccctctgggatccccagtgaggagggcaggtcagggcacgggggcagggaagacatcaaggggtggagagagacccgccctgaggcccagtgcacagcctggcatccactggtgccctttcaccctcattccaccagtagccatggagacggctgtatctcaactccagccttcgaagagggcaagagagcaggggagccttgagccacagacagcccacatgggcaccatctccccaagatgtcccccagggtttgggctcccaaaggccgattgttgactccaggaccttcactcactttgctctccccaccatcgtactcagaggcatccagaaccggcagatgggagaagccctagggagataggcctagatacaggaggagacatgtggagctgaggcaaaggcgggtgcggatgccaggcccagtgccctctatacccctactcctgctgacaacctggctgctgtaagcttggcagttgccatggactccctgggagagatggcgtggcctggaacgtcccccgccctgaggtggggcagggctggtggggtctggtcatccccctggtgggtccatgcatggcagcctgggcaggatacatgtgagtgcctacctgggctggggtggcctgaccctctctgggcctcacagctttgtctgcctcatggtactgtccacctggcctctcaggactgctctgtggcgtgtgtgcttaagggattgagctcgttgggctggggacagaggcctgcctaggtctgttgagagggcccaggtaagacttccacccagactgactggctggggcacacagagaagccaggacagggctgattgtgtgtgcaggggcgtgccctctggacgaggcccctcccaccggggcgaggcagaggccttgcttggttggagcggagtgggggagtgggagggtctccctggtgagatagtactggaagggcagggacagcattctagggaaggaaccagaaagagcccctgcatggaatgtggggatttcaccatgagaccccggctgcctggcctctgagaacgtgtgtggggggattccaggtggaaggtcgtgtctgggaggatgggtggggggttgagcagtcattgcccctctccagatctgcgtccacatctgtaaaatgggcctagaattcccagccgctgggggcgagtgaggccataaattagttgagatggacccaggctcctaagccccctaggtcatgaccccaaaccttggaacccccgacggagacggtgggggtggccgaggcccaatcgaatctatcccgcccagatgtgggaagaaccgcagggcaaacccccggcttccctcctggccgctcctctctttgaggccacctctctgagccctgatttgctggcgggtgaactggggatcatcgtgtccactgtggctggtggtcgtgaaacgaagtggaaacatgagtgttgaggccgagatgggcgcagtgcgcgctcctaaacagctgtccccatccgtccgcccctccctcccttgcgcgggtcagctggagcgggggcgcgccaggcacgaccctggccgggcagaaggcggtggagcccttaggggtcgcggctcctacccccggccctcccatgtgcagatggggtagcagcctggaggtttttcccaaggtcacgtaaggtcaaagaaaaggggagctggacgcgacgaggaaagtcacgcacggcggagggcgggccacctacgcgcgcgcccgagttcgcagagcagcggcgccctcccgggctagggcagctcggagctcggagcctttcttcgcccgcagctcgggttccgggagccccgcccccgcccatcaacgccccgcccctttcgccacggccccgcccctcctctccgttctccccgccggcgctccctcaagtttctccgaagttttccgcgggtccagcggtgcgccccgcccgccggccagtgacgtaacaatggtgcagcgcggcggccaatgggtggtggcgggggccggcggcgcgggccaatggcggcggcggacggtcccgctgtcctgcctggccggggccgcactgcgccgcccgccgcccgccgcccgccgcccgccgccggcgacggcaccgccgccctgcgatccggccgcggcggctcagagcgcggctgcggcgggcgcgggcggcggtggctccctcccgtgcgtccgtcgtgggacctttgcccgctcgcccgc

SEQ ID NO: 13119 - DNA, 2300 bp, Homo sapien
ccatcaggccaggaggtaggtactgtttcctgtattttacggttggtaaatctgagagcttcaggccaatacagtatcggtgtagcattagggtcagacaaaatagaacagggcccggcacatattaagtgttaatattcgttggaaaaaaaaaaaaaagaatgcttgtcaagtccactgctgcgcccctactggtagcccagcctggcctcagccttgggggctggtgggtggagagggcggccttgtgtgctctgctatccctattgccttaatgacccagtatcacctttgtgcccttgtaggttgatccttctagtctcgtggcagaactttgtagacaccaagcgagcggggcagcgtgttctggacctcattcctcacacagggctcacctccggatgagtcagaggccttagccggtggcccagccccgggaatgccaccccggttctgtaccctgcccaggccagctgacagggtgtattggggcacacacctgcagcatccagggcactccaaggagagggacgtacttttgaggagagtctaaaagtctaagtcccccacctgaacttggtgggggaagggcttctataccaggagggctcccagccctgtttcttaaaggccatttaggcagaagtgaacgtggtctcttcaataaagttaataatggttcatgctgcagaaaatgttcaagacaaaaccctgcttatttactcaggctttaaaaccataaaactcccaaattctccctgtagctatttatatccagagctagtccccaaattaagctcaggtttgaagtaacttaaaagaaaaatagccttccctgctttaaaaagattttccgtatagacctccactggtctaattacgaagggcgcgtagtttcagggttggctgggggtagggcaccgggacctccaaggcagttacactcctcagcctcctaacagctgtacggctgcccggtggtccctctccaaggcagcggctctcaggctagcctcagcctaccccacccgcccgcaccccgtgttctccctcgtgggggtgccggggggagtagggaggcggggcgggcggcaggtccggaaaagtggctgccctcgccccgaaagaagttgaccctcctcccgtgccgagagcttgggatgaaaatagcttcttcctctttacccttcctggacccccgccccaggacgactgggccccttcattcatctttcagcggccacccaggcggcttgggcgtccccacgccgggactctgtgccccggggacccacggggaccctcccttgggcctctgaagccgcggcgcaccccgcacccaagccaccccgggggccccggcctcccccacccaattagcgggcagcaccgcagacccgagtccccacgcagctcgcgccaggggaggcggccgcctgggaagcccgtcccccgcgccgcggcccccgcccccgccagccccgcgtcccctgggaaaggcgggggcgcagcgagtttcccccaattagtttcctctttgtatggagtcttagcgcgcccgtactcctccgcgcagcggaaagtagtcccggccgggcgctccgcggcttcccagcgccagacacattttactttgagaagtcgacgggactctcagcggggtccttcagatggggggccagaggctgcgggaggcgtgcgcgggcagcaagggcaggggccgcggccaagggtagggggcggggagggccgcgaactcctcgccgctgcctggagagatggatcatggggcgtagggagatggcaaacctcaaaccacgtacggcgggcgatacgcgtcaaccgaacctcgccaacggaagcccggagccgcccctccccgctcccccgccccgccgccccggacggacgggcgcgcggagccaaccccgctgccgctggctgtccaaatcccaccagagccaatgggagcgcgagggggggcggagccatctcgcgtcagttgggctgcgcgcccccctcccccggcgcccctgcaggccccgcccctgcctcctcccctctccgctcgctgctcccggagtagttggtgccagtgaagtgagggcggcgatgagagcgaaagttgcgctcggctcgtcgctgggggcttgaagcggctccgcgctctgcccgtttgggcctcccccgactcggactcgcgcccgtgggctcccgccgcgcccgcccggccccgcgccggccccgcgccccctcccccgtctcggcgccccctcctcaggagccgcgggtccccgcca

SEQ ID NO: 13120 - DNA, 2300 bp, Homo sapien
agaaaatcaagctcctcttccgttggctttcttagttgcttgtgtgattattcaaagatgaaaaatgctggagttcagagttccctggtgcttgacacggatatgccctctacttggagtagagagaaaatagcatacttccgtgacctgtctcattcaagggtccatgggaaaattaaggagcagccatagcctgggaggttggtattgtttgtggtctttctttcgactgggtaaggacagtgaaagattaccttgagccaaggcagtaatgtggaaaaagataatttgtaggaaagtgaagacgtgacagttaatcaaagttagacttctggaaatctcactgacattgtgttttcctcgcccccccatcattaaagaaatctatgcttgtgcacttctgccctgtgtagaagcggtggacagcacagtgatcttggggcgctgtgaggctgcacccgcagttctgttgtaaagactgggcctttttggtccttactgtggctgctctgttacttcagttcaatcctatgtggtagtaagcccagggatttcttctgtcttttatgtaagactccaggtaggtgttttgctgctcaggtatcacctgttaggaagctgtggatccaggactgtgtacgtgagagccctccgtcccctcctccttgggttgtaccttatctgttgctctgaacaagcaaataataaacctagttagatgcttcaaaggataccatagggatctcagaattcagctacaacagatgttagtaacgtctttactcttgggtttttgtttctttaggtttttaagttctgttttcatacctttatatagtttttatttttaaaatgaaaattattttttccttcctagatccagaatattaaacagacaaacagtgctctcaaagaaaaacttgatggtggaatagaaccatatcgacttccagaggtaggattatgttaacatcatcttagaagtcatattcaagttttacatgtttaagaatttaatatcggtgtgatacatccccagtatacatctcttggaagagtatatggacataattttatgaacccagttgatgttaaaattccgataagagaaaatgaaaggttcgttaagctcataaggacatactcatctctaaatgtaatgtgctaaaatgactcatttggatatccaggtcattcagaaatgtaatgcacgttggactacagaagagcagcttctcgccgtacaaggtagggggaagttcttctaaagagtttaggaggccggctgtggtggctcacacctgtaatcccaacattttggaaggttgacgcatttgcttgagcccaggagctcaaggctgcattgatccatgatcacaccactgcattccagcctggacaacagagggagaccctgactttaaaaaaaaaaaattttttttttaatggaaaaaaaagagcttaggagcattggtagattttagggaaaagttacgtcctgccctactcccagcacctagattcttggacaattatgtcctagtggatatcattttagccaaattactgtattcctttgggcttttttcttttcctttcccacttctcacaagttgtaaaaacttaaccgggaaccctgagtcttctaaaggtgtatttcattttactagttactcatcgagctctgactagccaggaagtacaaaaccccaaaagaagcagacagagtgttcagctttaaaggttgggggtgctctggacctgcgataccaaaagatgaatgcagaatgtccccaaccctagggcaattgctgggtgacttcagctgttatgtgacatgtaatgggaagacagatatcaaaatgacagggtcggtcatctccagaatgtgtctagaattggctggtactttttcctactctaataatacacgaaattattgcctgctgttaaaagcctgtatgttttcttatctggataaagaggtaagtgtcacttgtggttttaaaaaaatgtttttctcttgtattttaaaaaatgctttcttacatccttagccatcaggaaatatggccgagattttcaggcaatctcagacgtgattgggaacaaatcagtggtacaagtgaaaaacttttttgtaaattatcgacgccgcttcaacatagatgaagttttacaagaatgggaggcagaacatggtaaagaagagaccaatgggcccagtaaccagaagcctgtgaagtccccagataattccattaagatgcccgaagaggaagacgaggtaaatctgaaac

SEQ ID NO: 13121 - DNA, 2300 bp, Homo sapien
atcctactttttttttttttttccagacagagtctcactctgtcgcccagataggagtacaatggcacaatctcagctcactgtaacctccgcctcctgggttcaagtgattctcttgcctcaacctcctgggtagctgggattacaggcacactccaccacgcccggctgatttttgtgtttttagtagagacgtggtttcaccatgttggccaggctggtctcgaactcctgacctcaggtgacttgcctgcccgcggcctcccaaagtgctgcaattacaggtgtgagccaccatgcccggtccatgtcctgcttcttttaaaacaaccaaaaatagtccagcctaggaaagggagtctttcctgattttggcaaagttaaaccaggccataggtaacacacagcataaggcaggcgttgggagtgggccccagtcgacagggtgccaggactgtgggctaagcagggctggggacatgggaggcctcagtgcctgggctatgggaagtggttgggaccctgagcctgaggtcagtaacatcccaactcctgacaggcaagaaagggcacctgaggctcccaaggggagtccaccatgggggtgggggagaccgctggagtccataggtccctgtgagggacggcgaaggcgggcctgtcacctctaaaagagctgtgcctgtggcgcagacgggggtgccactgtggcctggtgagtgtggctgtagaacaagcatctgttgggctaatggagccagagacatggtccaatgtctctgatgtccagatagacttccagcagccaggtcggactatctggggttctggaacgttccatgggtgaagctgtaggaggagatgctggacttcctgcctccactcacatgagtcactggagcaatacaagaaggcagactggccttggctactcacactggtctcagctctggggtagggctctttataagccttcttgagaagtgaaaaatgcaaagtcctttctgtcccctcaccactgacttgcaaactccagcgaaggcctcacccctcagctggcccagagcctcccagaagccctcccttcgcttcccacctcgccaggcccagccaggctgggtgctgccttggtgggcctaggtgaatcactgacacaccactgatgcctttggggcagaaggcagaggcctcgggagaaatgcgcaggccccagcggcctggtggagggtgcagggggcgcaggggcagccaggaccgccgaggacgctgggggcacgtggcaaactggctaccctgtccacccgtgagcaagacaccactccgggggcgtgggagggtccaagggagggagaaaggaaagtgccaccaaactaatgtggagccctgccctctgcatgcgaaaaggggctccacggcctgagtcaccctcagccccacctgcgtgtgcgcgagggtgcgtggcctggtacgcgtgcgcacggtgttggtgagcgtgtgtgtgcgtgtccgcttgaggggaatgtgaccgtcgtgtatgcgtccgcgacagtgcggggggccgcatatcggacccgtgcgtgtgcgtaggggtcgcgtgtggccatgggcacacgggcgtgcacgcacgggggctgcgtatgctatgctggcgtggggggtgcgggcgaggtggccgcggggaggagcggcgccagcacctctcggcccccacgcggcctgcgtggctttttgacccggaaaggcggggacgcggggacgcgcggcggcgggggcgcggcgggggcggcgcagagcgaggaggcccgcggggcgcgcggcggggacgggagggaggcggggggcgcccggggccgtccccgccccgcgccgcggcgccgccgttgctaaggccgggcgggcggccgccgggcgctagggcccttagcaacgggtcgcgggcgcgcgcggggggccggcgggcgcgtggggccggcggcgctcgcgggctcctgccgctcccacgcgcgcgggcggcgggggcggggcggcgggcgcgccggggatttccagcgcgcgagaggaagtgcctgcgcggggctgcgtgagggagcgagggagcgagggagcgcggcgcggccgccgcgtgcgcgagccggggttgcagcccagccgggactttccagccggcggcagccgcggcggccgccggctcttccccgccccccgccatggggcagcccggggagcagaacgctgcggaccgcggcggaggacgcgcccggcgcccctgagccggccgagcggcgacggaccgcgaggta

SEQ ID NO: 13122 - DNA, 2300 bp, Homo sapien
gcccaggagctcaggggtggaaggaatttggctcttatttttctaagtagcaaaaatagatgaattgggtacaggaacgcagtgtatttttgagggagctggtgagttgtgaaagaaacttcctctgttcacctgaggcttaccgtatcgtgagaaaggatggaggaggcatggaggtgggaaactctacacaagaaaaatcctatagtgcagcagctactgatgtgaggcggctggtctaggcagcggtgttccctgaggctcctgagtctggttctcactgggtccctcacctcccttcacagccactcccttccttaccaaggtacatgggagtacagggctggccaggggctgttgacagtgggggagtggtgcaggctgagccttagagacaggaagggcatctgtgctggagctgccctgcagaagcctcgtaaaggtcgtaaggcactgggcaaaaacttttccaagaaagttcatggtgcacacgctgacctaaacactggccgacattcccaaggtttttttcattatggaagtgcatggccattgcatggtatccagaaaacaaagaccagagaagccagactttataccaccatctggaaacatttaatttgtgctttaggtaagtgttagcaaatatttaggatgattgatcaaatcattagtgtgtttatgagtgcatggtgtaatttttactaaagctcacatttcttcaggaactcgattcaactcctttacattcctggttattttcatttacttgatcttgaggtctcatctggcagagctgtgcaagctgggacctttgtggcttattttgaggagctgtttactttacctgttgatgggaacttgcaggtgggaggcagccagtcttaaagagtaccttgttagcaagtgtggaagagagtccgcgcagacagacttgccctatgtggtgtcccctctgccagcccagcccttgggcacattggcacctacctgaacccgagccccctcatgcacacagggagccgcacctccctcacacgctcctcaccagtgtgacatggtgtgacgtgctctgtgggtccacaacgggcccactccacagctctgtgcacagcatgctgggtcagggtggtgctagattaataagatgagggtgaatgtcaaaactgagcactttgagtactgtgggcacactgtcacagggtttacccaggaaggaacaacccctgggctccagaagcaggttgaccaggccagtctgagttgtagcattgagactcatctagcggaagtcaatgaggaaggaaaactggctgagaacagctgttgtttcagttaaaatctcagaatgatgcattgaattcaaagttacaacacagcaaaatagtatatgtatttttttaaacctcaaaaatactgtattattaactttaaaacatttttggctggtgtggtggctcacacctgtaatcccagcactttgggaggctgaggcaggcagatcacgaggtcaggagattgagatcatcccggctaatgtggtaaaaccccgtctctactaaaaatacaaaaaattagccaggtgtggtggtggccgcctgtagtctcagctactcgggaggctgaggcaggagaatggcatgaacctgggaggcggagcttgcagtgagccaagatggcgccactgcactccagcctgggcaacagagcgagactccgtctaaaaaaaaaaaaaaaaaatttttggagacagggcctcgctctgttgctcagcctagagtgcagtggtgccatcatagcttggtgcaaccttcaactcctgggctcagcaatctttccacctcatcccaatttattaagtatactttttaggaagttttttgaataataatatcaatagttactatgtgtttgggtaaaatagaaaggatggaagcatatttgatcatgttttgttcccaacacatattaaagttgggaaggattcttgtgttgcctaaaactgaaagacagcaggtctcaggcacttttgctttcccaaagctgtgtttgtttccttgcatgagaggatatgatggcactctactgttttttcccgacagaactcctctttcctaaaatggagtcgagtaaaaagatggactctcctggcgcgctgcagactaacccgccgctaaagctgcacactgaccgcagtgctgggacgccagtttttgtccctgaacaaggaggttacaaggaaaagtttgtgaagaccgtggaggacaagtacaagtgtgagaagtgccacctggtgctgt

SEQ ID NO: 13123 - DNA, 2300 bp, Homo sapien
ttcactcacccaccatccaccatccatccatccacccatctatatgtccattcacccattcgccatccactcatccaccacccaccattcatctatcatccctcatccactgtctaccatccaccattcatccatccacccattcacccatccaccatccatccatccaccatccacttatccacaatctgccatccaccattcgccattcatccatccattcatccaccacccatcaccattcacatccaccatcggccattcaccatccaccatccaccatccacctattcaccatccaccattcactcattcaccacccatccttccatccacccaccatccaccacccaccatccaccaaccactattcatcttaccatccaccatccaccatctatcatccactatctaccatctgccgcccatccatccacttaatattcaccatctactcatcaccattcacttgtccattatccaccacccaccaaccatcatccacctaccatccatcatccaccatttatccattatctacttatctaccatccattacccatccatttatcatcctatccaccatctactatccacccattatccactatccactgtctattcactatccaccatctattcactatccaccgtccatctccatccacaattcaccatttatgcaaccatcatccaccatctatccatttaccatctatctattcaccatccaccatccatccattcagcattcatcactcaccaaacatccaccatttaacacccacttttttttttttgagatggggtttcactcttgttgcccaggctggagcacagtggcgtgatctccgatcaccacaacctccgccttccaggttcaaacgattctcctgccttagcctcccaagtagctgggattacaggcatgtgccaccatgcctatctaattttgtatttttagtagagatggggtttctccatgttggtcaggctggtctcgaactcccgacctcaggtgatctgcccgccttggcctcccaaagtgctgcggttacaggcgtgagccaccgtgccccgccaacacccactctttatgatctacctgtcggccatgtatccatttatgccattatccatccaccactccctgattaccatccattccttttcctttttttttttttttttttgagacggagtctcgctctgtcgctcaggctggagtgcagcgcacgatcgtggctcactgcaagctccacctcctgggttcacgccgttctgcctcagccccccaagtagctgggactacaggcgccttctaccatgcccggttaatttttttgtatatttttagtatagacggggtttcaccgcgttagccaggatggtcttgatctcctgacctcgcgatccgcctgcctcaccctcccaaagtgctgggattacaggcatgagccaccacgcccggccattcattcatttttcactcaccatcctcatccatccattcatcacccatccaccctctatcactcaccatccaccccgtcaaccatttaccattcatctgccatgcgtccatatgccgtacaccatgcaccatcaatgttgctgtccatcagctgtcccctactcaccatccactactctccaccatcatccacaatccaccctcctataccatccacataccatgttccatccaggatcttccttctatcatccaaccaccacccacagcccatgggacaggggcactgcgtggagaagtggacacccagttccaatggtgagcagactagctcagccctagcagcacacaggacagagaaaggggtgaattcaaaggtcgtttattccccctcccggcaagacacccattttacagggtaggtcagtctcgccaagcccttcttctttgcccttcttcctgagaacctaaggtgttcaggccctgcaggggcgggtaaggggaggctgagaaggtgcctcccaggggcctgaagagtcggccctgggcgggtctggaggtaaatgtgtaaccgaccctggtgcccccacccgacctgcctggtcacgtgggtccagtggggcaaagtctcctggtggggtgcaaggagccgaggcgagatgggcgtcctgggccgggtcctgctgtggctgcagctctgcggtgagccgggaccacaccggtgcgggcccggacggtagcggtctgtcaggacccagggccgaggtcgctctaggcctggagggtgaagatcttccgaggagtgggcagggagggctttggaggg

SEQ ID NO: 13124 - DNA, 2300 bp, Homo sapien
aggtaacaactaccaccaccaccaccaaaaaaaccctggattttttttttttttttttttgagatggagtcttgctctgccacccaggctggagtgcagtggtgtgatctcggctcagtgcaacctctgcctcccgggctcaagcgattctcctgcctgagcctcccaagtagctgagactacaggaattttgattgggataaataacagccttatgctgtcaagccatccattcaagagcatggacggactctctctaaatatttcaggtcatccatggcctctttagcatcttaaagttttccctgtagaggtcttatattgtattggttaattcatcaatactttgttaagtttgtttttttgagacagggtctcactctgttgcccaggctggagtgcaatggcgtgatcacggctcactgcagccttgacctccctgggcgcaaacaatcctcccacctcagcctcccgagtagctgggactacaggcttgtgccaccacgcccggctaatttttgtagtttttgtagagatgggggtctcactatgttggccaggctggtcttgaactcctgggctcgagtgatatgcccgcttcggccttccaaagtgttgggattacaggcatgagccaccgctcctggccttaagtttggtttctattataaatgttgccctatatttaaaaattatatcctctttttatttttaaattttttgtagagatggagtctcactatgtttctcaccaggctgatctcaaactcctggccttacctactgtgctcgtctgttcaactattatgttacgtttctatttttccccttcgttctttaaaaaacggtgttcttggtatgcttcctcctgggaacccctccctgttcctgaggcgctttgagctatgacacattccgtccccacggctccacctctgcacctgtggggggacttgccctgctggcagtgccacaccctcaggtgtgcacggaactgaagtgtgacctcacgtcgctgggggtgttggcctcttgctcaggtgcagtgctcctggaagggccgaagagtgggtcctgcctcgggtgggcgcgccctgctgtgctgagcccctcacaacctggcagcaagggttgccctggcccagcgctcaccctcagcccctgagggagaagtgcagaagcaagaaggcaggaggctgaggtcctggcacttggaggagagggggagtgaggggcggccagtcagaccccccgtatttctgctgacacccgagacttgggctgtggccccacttctgtggtgcgggagctgcacggcccagcccaagcctataggaaacagcaggggcaactccacctccccgctacactccctgcctcctcctgcacccctggccgccagatgcagcctctccctccctccctcacacaccaagagcgcggcctcagactccccaggagccgggcaactttcgaaactttagttcctggaacctgggagccctgggcctgtgcacgttctcaaggggctacggggggaggcgacaggccctggccagagtcacctccgccccagactccccacggctccgtctcgctccccggctccggctctgcccctggcctgtgagacctccagctcagggacaggacactgggctgtgcccgcttcggggccttgcccacgcggccccatctttcccaggccagatccgcttcctctgccagcctcagccaggccgaggaccccgggcctgagctcgcccgggctccttccgtgcacagggtctcggcttctcgtcccaggggactgggggcggggtgggcgcggagcaggcccggacccccgcgtggcgccgcctcagcccgtgtctcttgcagctcctgccgctggatggggaactcgtcctggcttcaggagccggattcggcgtctcagacgtgggctcgcacctggactgtggcgcgggtgaggcggtcgggcaggggcggggctctggaaaggcatgttcaggggcggggactggagggaaggcgcgtcgaggggggcgaggaccggagggagggcgcctccgggggcgtggtttagggagtggcggaagtgtcccgaagcggggcttgggaggtcgtgctcagacgcgtggcgtggcgtggcgtggcgtggtgtggcgcggcgcttgttccgtggagctcagggatgtgctccggctcaggcgaacctgccgtcttccgcgactctgaccgcttctcctggcatgacccgcacctgtggcgctctggggacgaggcacctggcctct

SEQ ID NO: 13125 - DNA, 2300 bp, Homo sapien
gatcatgccactgtactccagcctgtacaacagagtaacagagtgagaccctgtctctaaaacaagaaaaaaaaagtttttctttcaaaatgaaatggttggctgcacacggtggctcacgcgtgtaatcccagcactttgggaggctgaggcagacggatcgcgaggtcaggagttcaagaccagcttggccaacatggtgaaaccccgtctctactaaaagtacaaaaattagctaggcgtggtggcgggtgcctgtaatcccagctactcgggaggctgaggcagagaatcgtttgaacgcaggagaccgaggtcgcagtgagccaagatcgtgccattgcactccagcctgggcgacagggagagacgtctcaaaaaaaaaaaaaaaaaaaagatggctgttgcagctgtgtcccagttctactaatgacaacatgacaagcggtcaacattcagcttgctaatgtccagacatgcagagaccagcaattctggaatcatcacaacccctctgccaacagccacctcagccacaagggcctggtgaagggacaactaaagaaaacctgagcctcagtgtgcctgacctcctgtcttccagaacgcgcccccaaaaagaaatggtgatggagtgctgagtcccaggtgaggtgagaccgtgggctcaggaggccggggctgccccgaggatctgcggcacctgtgccaacgcctccaggagacgctccctgaagctctgcctggcagctagctgcccagagcatttaggaaaaacccattcttaaactggggactgcctgcaaggtgacctgctgacaggaaacttatgtattatccagcagttttgtttaaggagcagagagagaaacttttagtattttttaaccaagtaagatgaaataaagaccttgcctggtagaaaaattataaactacactgcttagcaactcttctactgaccaacctcttaattcatgcttttaagaaaattttttataaatcagtattataaaatttaatgcttaaaataagtctatgatataaaaataaaaagataaattatttgcaactagcaccatatttatttttatatctcttacacacatatactctagtataatcaccgcgactggcaaacattcttgagcttttctgagcatgccaattaaactggatctgtgtcaccagattcaaattaaatcagcaatatttactctttttaaatgtactcatccaccatgacatttaggtaaataccaaacacctgatacctctctacactttcatgtaacagtagctactttttcccctaaaaatttgctccaataacattcctgtgtttgccactgtttggggcggggaaagggctgctggggctgagggcaggcccagcggaagcacacagtgagatgactgagtgaagatggaggaaaagagagcaaaggcttctcccaaagaaggaagggagaccgtgtacaccccagaagctgggagacccagggggccgaagcaatcacaggccaccgacattttgagaccagggtaactacaaaatggtgctaactctgtcaaccaacacgcgttcagtgagcaacaaatggttgtgagaccttgtgctgggtgccatagcagggaaaggggaaatgggtgcagagcgggggagggaaaagccagaatgactgagtcacgaggaaccgataacacccaccaagttaataaaacccagggccccagagagatctggcccgaatcgatggttgtactgttgtcggcccaaggtggcaaccatcatgggcagcacaggcacaaattccaggaccaaagaggaaagcgtcacctcaaattactagaagggtgagaggagtaagaggagagggtctagaaacccaagaaggacttcccaaaatgaggaggtggccacgtcgagaggttcaactccagaagcaagcgctgaccgcagggctgagcagcctagagccaccgcagcgctgccaggcacaggcctcgctcagggcgggtcagagacacacggggccacagcaaaccattgtgatgaatggcagcctgcaaggaggggactgccaagtgccttctggcagaggcgggagtcacgggagaggatggagcatgatggacggagcagatctgaagcaggaagcaggtcaactggccaggaagggcctgggctctgagtgcaggggaggggaagacaacagggcgggtgaggacagaaactcaagatggccagagaggaaaagcgtgggctccccagcaggcctggcctgccttaggcaggc

SEQ ID NO: 13126 - DNA, 2300 bp, Homo sapien
gtttggggaaggagatggcaccaggcacagccccctttccccttgctcatctcaggccctaaggggtccaagggggaagatttaactttgattttgagccaggtgatctgctcagactttttaaaaaaaacttttaaggtgtcatacacaaatagtaacatgcaaatatttagaatacagtttgatgaatttatacacatttacagacccaacgttacaaaacggctgtgctgaagatacagaatgttcccagccccctagaggcctctccttgtgcctccttccagttgataccccaaaggcaaccagtactctcacctctaacgccagattgttctcacctgcctttaagaaatgaaggtattatatatacatacacacagtgacatgcactcatcttaagaagacagtttgaagaatgtttacttatgcgtgctcccatgtaactactacccaaatccaggcatagaacattaccagcagcccagaaggttcctcctcttgttccagtcaacaactccggcataggcagccactcctcttcttcttcttcttcttcttattattattactattattaagacggagtcgtgctctgttgcccatgctggagtgcagtggagcgatcttggctcactgcactttcgcctcccgggttcaagtaattctcctgccttagcctctcgagtagctgggactacaggcgcgcgccaccacgcccggctagttttttgtattttagtagagacggggtttcaccgtgttgcccaggctggtctcgaagtcctgagctcaggcaatccgcccacctcggcctcctaaagtgctgggattacaggtgtgagccaccgcgccaggcccactcctatttttagctccagagattagttttgcttcaggctcccttaacgtcctgcttcaaacccctatctgccccttcatcggctccacctggaggccaccgcttccacggaagcatgaccccttcccctgcacccgcgcgccccagaagctctcagatacccccacgatttcggtgaccttccgcaagctccaggaaaagcccctcctctcctgacgccaagggtttgttggggttggggggtatctccatcagcctccctcccccagccacccaaattaaccaacaatcttagtaaatgcagcgactcgctaggcaaacccagcctggagacaaatatccggcccctttcctaccaaactgtcacacctaggcattggtctgcagggagggctggacagtggaaactgaaaccctctgcaagccatcacgaatccaccgggcactggggacgctggctcccgccttggcagcatcccccagaagcctgggccctgaccccacaccgtctgggcctcagtctctcatcggtaaagtcaggggtagggcccgagtcttccaggaccgcttcgagctgggacaagccgttttaaatagcccacaacccgccgaggccatcagagctgcgcctgccgggccgccctcgacccccacctcggccgggcaggtccgaggccccgcaggcaacatgggcccgcggactgcgggacggggctcgacggcctgagatcgcgactctgcctctccgatacttggggtcgtcttcggccccgggatccgcgacgcgcgcggtcggaccccgaatactgaaggcaccgggtccgcagggcgaaggcgcacacgcccaccaggcgcgctctgcgcatgcgcgggctccgcaatctcagcggcccactcgccccgccccgccccccccacccccaccccgcgccgctccccaggcccggccctgccttcccagcatcccggctccctacggcaagcggcgaggcccgagcccgccgggagcagggagccgggcgcggggcggggcggcgcgctgaggtcagcgcggcggcggccggccccgtagtggttggctgcgctggtgctggccgcgccctggttggctgcgggccgcggggctgggccgccgggtcggggctggggtcgggctcgggcgccggccgggcttgcgcagcgctaggctcctcgccgctcctagtctgcggcggcggcggcggggagggcgcggccgcgggcggggctgagggcggcgggggcgggccgcccgagctgggagggcggcggcgccgaggggaggagagcggcccatggacccgcggggcccggcgccccagactctgcgccgtcgggacggagcccaagatgtcggcctaggccggggcgcgacgacgcggacggggcggcgaggaggcgccgctgctgccggggctcg

SEQ ID NO: 13127 - DNA, 2300 bp, Homo sapien
gaggagccacagactccagctcagggctcccggcgaacaagcagcaggaaagagcccaatgcccaccgcaaggatggcacaaggctgggcctgggctccctgaggcaggccttctcccgggccagccagcgggctttgacccaggtctccaaggaagatacgggcctgttccggcgaagctcctgctccctgttccggtccttccggcaagccctgaatgacggcccagctaccggccattcccaggccactcctgaggtgccctcgggggtcatgaatggtgtcagccagcaggcatccactggggcagcgtctgaggaactgaaacccgaggcaggtaagggcctcagaaacaacacgaagcatgaaaggaaacgggccagaggtcagggcagctcagctgaggtttccggaaaggctgtcctccctagctccccaaaccctgcccccgaacatgtgcaattctttatttatttgagacagggtctccactctgtcacccaggctggcatgcagtggtgcaatcacagctcactgcgaccttggcctcctgggctcaagcgatcctcccacctcaactttctgagtagctgggactacaggtgtaagccactgcacccggctaattttttttttttttttttgacactgactctcactctatcacccaggctggagtgcagtgacgcaatcttggctcactgcaacctccacctcccaggttcaagtgattcttctgcctcaggcccccaagtcactaggactacaggtgcgtgccaacacacctggttaatttttttttttgcatttttagtaagacggggtttcaccatattggccagcctggtcttgagctcctgacctcgcgatccgccccctcagcctcccaaagtgctgggattacaggcgtgaaccactgtgcctggcctaattttttaaatttgtttttatttttttgtagagatatggtcttgctatgttgcccaggctggtctcaaactcctgagctcacccaatcctcctgccttggcttcctgaagtgctgggattacaggcgtgagccaccatgcccagctggacaattgcactttaaattcttgcagcatctctgcaatgggagcccccccattgggcagataagaaaagtgaggctcagagaggtggagtgacttgcctcaagtctcacagcgtggagaatgggacctgaacccagatatgcatggccctagatccccacctctccatggcctttcacagcctggctcctggtcaaactagggccatgcacacagctgatcacagggttgcagagggtgcaaggctcgcagaggtaccaggaggggaggtcagggggattgcccagaggaggatacactggggtgggaagagggggacatggaggtggagagctcttgtcgggtggaggctggcggagagtggggagcagcaggaatgtaaagctggacacgggcaggacacgccctgcctgagctccgaccctattagacctgcaatcagggctgagcatgaggctatcaggtccggctcagccgggagtggaaggtgggtgtgggatccaggcggaaggtaggggttgacccaaattgctctgttcagccaggcttggggccccaggttctgcctcttcaaaggtgactctaagggagggctcctggcagctggggcctgttgttcctggagcaggccttcagctgtgctggggcatctggcagaggacagacaatccagccccgatggattgagccgtggcctgcaggtcttcgtccaggttcgggtcttggggcggtccctctcaccgcccttctcgcccgcctgtgcagaaggcaaatccgtggccgacctcattactgaacggcaactgctggcggccttcgaacagcttctgcgcctggagacgctgctggtggccgagaaggcctcgcgcacctttgagcaggaccctacggccttcgcgcggcgcgctatggacgtgtgcctgctttacgacgggctggcagccgagatcggcgccatcgtgcgcgagacgctggacagcgacggtgtggacgcggccgcgctggccgagctggcccgcgtggtgagcgcggaggaggaagcccacccttctccccccgacgacggcgacttcctgcgcacgccgcgccgctggcgccagcactgggaggaggcggtgcggcgaagcgctcaggagcgcgtgcggcggccgggcgcggggtgggccttcggggaggcggagggcgcgtcgggtttggcccagcttctggccgagctgggtggct

SEQ ID NO: 13128 - DNA, 2300 bp, Homo sapien
cctctaggagctgccatcccacccccagctcggcctggcttggcctgggaagtcccagccccagccaccgctgggttcaggaggatctgcacacatggcatacacaccctcctggcatggagatacaggtgcacatgtgcacacagttcctgccaggaaaaccctgacttcctgtctccgggcctaggaaccctcagggtctaagccgggccccctccctctgccacaagccgctcagccttcagcacctcttcccagcctctcttggggcctcccactcccagtgacctccactcaactcaggttttgctccagcctcagcaccccaccaccccaaccccagggtgcccaaggccttcccgtaggtgggcctctgggaacatggggtcacagggaggccaggcccccggccttatggctggctctgacttcaccctccccagccgaggaggcactaacagcacccccatttcacagctggaaaaaaaatgaagcagtgagataaaagaacctgcctgcattctcacaggtgggaagtggcagagccaggacggaaccccctccttaaccccacagccctgccccaggaccctctggctccagccaagtggctcagtgaggagcttgagacagaagggtggggaagggggtggcaggggctccttggggagaacctgaccaggaccagaccaggccaagccctcccttctcccctcccatgcaccctgcctgggacactcatggccaccaggtcaggggtggggtcaagcaggggacaggctgacctgtcaatcacctgccccctcttggacccctcccctgggaaaagacatgcccctctggcccctggctgggaggatcctgagcatctgccagcctgttttcccatcagggacgggaccgcttattggcaccagcatcacatacctgcccccaccccagccctggagatggggaaccccaaccctcccacttcctcattcctgccccacctgccccaccctgccaggggaggtctggatattcccttgccctggcctgccctgctcctgacctccagccctggtgcccccatggaggagggcactgccccagcacttgctcccagaagagacagacaagccccaggcactcaacccccaggctctaggccccagcaagactcaggctccaggccccagccctggcataggaaccggggcaggtctgcccggggaactgccccctgactgtccacagtgcagggagggggcctggagggagtggggatagacacgccccctgcttgcctggcaccacagcctttcagactccttaccctgtcctcaggcgacccaagtttgtggagctcttggaaccttggcccacctgcagtcacctgccccccactcccgccagggtcagggtcaggcccagagacactatgggggcccactgtggagggctgggaggggcacctgtcaccacctgtctcagctgctctctggaaatctccccatctcaactttcagcctccccagccagcccggctgccaatgcaaataggtttcccagcaccccagcccgcagctgccgccaaatttcagcggcagctttgcagagagaagcggggacgcaggtgcacgctggagcagtctccttacgcttgcctccattgctgacacctcagggtcacccccggacacacactccatgggtgacacaccccctgcagtaacttgacaacttccactgctgagaagtccctcctacatctaacccaaattcttcaagctgcagaaccagccttatcctctttttgttcccaggaagccccgagtctgctttggctgggacaaggctgaccaggcacaaggccagtggatccgggccgtggtgggggcagccacaggcatgggccttccctgctctggacctgcctcagtcttcccgtggcttccacaggcatgagagggccacccaccaaatagtgtcaccagacagcctccggcctggcccttcagcacaccgggacccaggtctcccatcccctgcccactccttagggaggcaccattttaattcacatttattttttaaataaatactctgctcttcactttcagactggagggtgaagctggacagtcgggcgggaggcccccccccgcccgataggcagcattgagagctctgcggccccaaaacactcccctcaacgatgcctgaaatgcctcctgcacggctgctccttctggcctgacagctgcgcttggctgctgacgacaaaaattccctaactgcagtgtcagagttggggg

SEQ ID NO: 13129 - DNA, 2300 bp, Homo sapien
gagctggggaatgggacagccgctggccactggtcacaaacatcgccacccagcatgtgatgctggcttcctgctggggaggagccgtaggctggcctttggctcctctggaagtgcctggcctcttgggaactgctttctgcatctgcgagaagagggtaaggactgctcctgccctatgggccccattggctgtcatcccttgggcctccatgctgccccattttcagaagactttccttgtcttgaggacttcacgtatgttaccattgaccctcatgcctgagcttagagaggggaagtgactggtgcagacacaagtccaaggcagcagcctcgtttcccaatccccagccggtgctctgggcgggccactgccgtcagtgggggacaagggtggcagccccgcctcagccctgcaaagcccgtggagaccaggggctgccttcgaggggacagtggggcctaaggcctgacaacgccctcctggcagatgcagacttcccgagcaatttcccgatctgcttgggaatgggagggggggtgagggggtggggtgggggaacagagtctggcaggagaggcttgtggggattgcacaatgaggccacagcagccagccgtgaaggcagccaccggccagggcccctcagcccgtatcctcatcgcccctgtgtggatgaactccatctgcgcggtgccggtggaaggaccctcccagccccgggacaccgcggctctgtggactcatctgaaaaatgtcatccctggagtcctaggagagaaggggtggggttggcagccttaacgccccatcctgcatcctggcggcctcccgcatccgctcccccacaggttccccagagacaggatgatggatggcaatccgagtgcaaacctggcgcttggccagcactctggaagaggaagttctcagttcccagggcacctgaacccacagccgcccccactccgctggcccccctggtcctggaagacctgttactaggctgcagaaggggtggcggagtgatcagggggcggggaaagaggccaaacaaaagaggggaggagcagaggccccagtgaggcaggagggaagcccctgcccagcgggaaattcctaaatgtctgggtcctttccagagggcaggaattcctagcctagagtgtgaaataaggaaggaagtgaatctccagtgggttcccttcacagcccctttccatcctccccacatgccccacccccacatctcccaaaacaaaccctgagagacggtgtggatggggagacaggcctggaaacggaggcctgcgctgaatgggcaaagccgggttgatgatccagacgaggccctggagtctgggccttgggcccctccccttctgcctgctccggcagcctgtgggtccagccccagccccagagggggaaaggctccagtgggagtcccataggcctggctaggaaccccactccgctacttaaagtggtgtgagccgggtcagccacttcacctttccgcatttacgcatttcaagcaaggcttgacgaccggaggggctcaaggccctgtgcacagccgcgcggccagcactctggccagccttgtagcccccttccccttagggggcctccttcaggaagcccccgtcccctgcctccttgtggccacggtgacaccggaacacttcagaggggcggctggggagttggggtgggacgggctctcccgcagctggagccggtgtgtgacgcgggaacgcggccaagcgcgccccatccaggcggcctatcaggagccgtcgtcggacaatggctccgcgcctgacaaccccgtcgtccccgtgccgtcccccgaactccacataccatgcgacgcgcggccagccccccgcccctgcccggctgctgggaggaagtgacagcgccccgcatcccccgctgggcaggccgggcgcgcccagcccctgggacgcagggacacagccgggccgcgctgggccttggcctccgcccgcgggttttccgcggttgcggcggggcggggaaggaggggcgggcggggcggggctgactctgcgactatttcaggccttgcggaacccgggccaggacagtggcggccaggccgggacacggtaagtgacctccgcttccacacgtccattccccgccgctccgcgcggcttctcgcccgcccctaccccgaggccaggccggattccccgaggaaagagcctgtcgccgcggcggggacaggagggggctggacgcttccagggaaactgaggccctg

SEQ ID NO: 13130 - DNA, 2300 bp, Homo sapien
cctcagcagcactgtggggtgggggtcctcatccccttttcaaagacggggaaacggcggcttgtgaaggaaggaggtgtgcagtccacacactagtgagaagtgtgctgagcccacaccgaaagcgtttctctttccatggcaccagctgcctcggagagcggagacctggggcgaggcccagggggctgcagcaggaccttcaggcgctctgggtttcgtgtcacagaggggagaaggcggtgatgctgtgggggtcctgcgggagctgtgcctggaggtgggacagagcctagtacatgtggggtgggacagggaaggctgaggtgaggctggcagggagcattgctggtaagggccaccctcccccaccccaggagaatggcagaggtggggcctgggcacccagggtggggctgagtggccctgccagacagaccagctcccgcgggtgctaggcatgcacctgagaggggctgggaagcgaagttggggcaccgggtggggagcagaggtgccccatggccttgcccctggggctccctggagcatgcccctcttggtcctggagtggaatgctcaacccaaatggcactagggaggccagtgccatccaggagtgtgggactctgcccagggcactgggtgagcatggcaggggctgggggtgggaggagcccaggcttcctgtccctcaggtggctctggccaagcccctccaggatggggacagggtagtggggctggtggaggcagcggggccatgggaagagtcggatgggcccagtctgagcctccatggctgctgtgcttggggcaaacacctcctactcagcctcagtttctccttctggatggtggatcatcctgcctgccttgcagggctgtttcaggggtcacttgaagttaccatgatacatgagacaaggctgcatgcatttagtcttggggtggggcagacaggtggcatcaaggttacaggtcaccccagttcttggggaggcccagcccctgcctgcttccccctttcagatcagccatgctcttctccagtggacctggccttgctctgacaatggtcaggtgctgggcagggactctggggaagctcgggtcttgcctctctggatgtagcttgcaggatagctggggatgtggaggcaggggaaagctgggctctgggaccgggtggcctgagttccaagcccaagctattgactatagggacagtttaagccgaaataacacccttccagatgagagaaaggaagagatgggatgggcacccaggaaggctgcagaaactggaagcctttgtgatgatgctacgatcccatttgggagggggtgggagccaggaagcctgggttctggacccgagttgctgtgtgacttcaggccgccctgtgacttgctgagccccttgccccagtgatgtgtgaaaggctgtctgaggtcccacccactgtggcttctgtagatcctggtcaggctctgcccctttcatggcccagctggagcagctgtgtttctgtgaccccaccgctggatcagaactggacaagatggcagaggggctgggtctgggcaggaggaggctgggttccagtctcaggccggttctggtgttctagaccccggcatgtcccagacctttctggacctctgttcctgctctgtccaaagggacagagcccatgccccgcctcttccctagggtcccgtgggatccagggaggtgtccattgcctgcttcctgcccagagggtgggctggcagggaaggatttgcccaagtaaagtgaaagtccccctctgtgtggcgggcttggcgtccccagcctcttccttgcttctggggctgtgaagtattggaaggggagctgtagatggtgagatgctcgtggccagggaggaagcacagttgttggtgctcatctgggccaggagatgagcagagccccggtggctgaatgggtgaaacagactgagtgtactcaatgcagccagcatagctgtgtgtccagcctgggagccagggccggtccatggtgaccactgatgccttcacccccaccccgcaggagcctgcaggcctgaaccagggtgatgctgaagatgatgaccttcttccaaggcctctagagccatcagcctgtgccaggcaccctcgacttgcctagaggcccccaaaagttgcagtccacatcagaggcagagtcagaggcctccatgtcggaggcctcctctgaggacctggtgccacccctggaggctggggcagccccatatagggaggag

SEQ ID NO: 13131 - DNA, 2300 bp, Homo sapien
ctttagtctgggtgatggattgaggccccgtctcaaaaacaaaactaaactaacttttgtagaataccctagcacccaaggtcagaaggaacaggaactgatatgggtttcagtctgtcttctcggggcggcagctgctcctgaagttcccttcctcgtggcctaccctgtggacacgactccagcatcagacccggagactccccacaagttccccattagatccatcttgcttgagttccacttggaatattcgacctggaaaaggcaggtgcggtgcctcacgaagcccactggacgcagctgacccttccacatttctcccagacacgctctctgtccctctagggtcactgcctcaggagctgagcatttctagacaagtcaggtgaagggactgtcatggctgccactttacaccatagatgtgtgagtgtacatatgtgtgtacatatatgtccgtatcctcaacgagggccaaagtatccagtttctaactctaagtgtgttcttaaatgaactaggtacaggacggaaaaagactgaagcctgccttgggtttgtggtgaactgctgtattagtccgttttcatgtgctataaagaactgcctgagactgggtaatttataagggaaagaggtttaattgactcacagttcagcatggctggggaggcctcaggaaacttacaatcatggcggaaggcaaagggaaagcaagggaccttctccacaaggcagcaaggagaggtgctgagcaatgggaagagccccttataaagccatcagatctcgtgagaactcactatcacgagaacagcatggggaaaaccgcccccatgattcaatgacctccatctggtctcccccttgacacgtggggattatggggattacaattccagacgagatttgggtggggacacaaaacctaacagatcacttgcttaagggaagctttgtctactctaaaccagattgcagaggtcttttgtttgtcccccttggggttttccaccaaggggccctgggcctttgggttgagctgggtgggcctttccctgtacaggcggaggaagcaagtgcaaggtgagcggtgggagaacctgcaaggcccctgctcccaggggaaggggaggcgggcttcaggggagtgtccatatgggcgcccagaaactggaaactgcgtccctgaaggctgcaagccctctgggcagttcgggtcaccccggctgaagaagggcgttgaagacacatggaaaaggtggtgggagaggactgagttgaaacccaggccccgagtggaagagcctgctggaggccacaggagcccgttccccaacctgaagccctggagacggcccggcttgagagggcgagggcccacagcggggacccaactcacttcttcgttcccacctgccctggggtccgacgggaagcggggacggggagcgggtggggtccgacgggaagcgaggacggggagcgggtggggtcagacgggaagcggggacggggagcgggtggggtcagacgggaagcggcgacgggatgctggtggggggacccccgcgctctccgggcgaccctctgcagcctctactctgccccgtctgtcatcttctcccgacccggcgaccccgttctccccctcgcccctcattccccgggactgtccttcttaacagcgcccttcaccccgcccggcccgcgaggtagtcctcagcaggggacaaggtccggacgtggcgcccccagaaggagcgcggagagcccctgggacccagtcccgccaggtacgcatcaggggcggagctggactcggggggcggggctggggagagggtggcccctgcacactagtcccctcccctcgaccccgcagccccgcggcgcgtttcctgaggcgcccccgccacgtcccgcgagtctctgccaagttcccgcgcgggtgcgccccggtcgcgccctccctgcgcccgcccaggcctggggagctctgtgggtggaagccggcgccccctgggggcacccgggcgtggcgagggcctcggcggtcgggaggcctctgcggggcagcggtcgggagcgaggccacggggcgccaggtacagccggcgggacgtccagtgccagcgcaggagccgggcgaggccgtggcctccagggttcctgggcggaggacaaggcgcgcagccgcgttggcgcgagttttaaatcggtgccttctcagctttgcaagttcttatcaattgctgcatgccagaggaagtttttaaaaaatggcccccagctct

SEQ ID NO: 13132 - DNA, 2300 bp, Homo sapien
gctctcagctctgaaggctgtgagacccctgatttcccacttcacacctctatatttctgtgtgtgtgtctttaattcctctagcgctgctgggttagggtctccccagctgagctggtctcggcacattcagtgtgtttacagagtgaaatgatacccataactgacattacttttctcgtggctacagatggtattttccctggaaatcttcctccagctttgggagtggtctcaagtgtgggggcatcagaattgcttggggtgcctgggaaaacacagatccaggctgtagattgtattagctcatggatgatttgattcaccacaaggtctgagaagcatttgctctacaatgttattttttaaattatttcactataattgttgatttttgtttttgttgtttgagacagggtctcactgtcacccaggctggagtgcagtggtgcagtcatggctcgcttctgccttgaacctctgggctcaagggatcctcctctctcagcctcccaagtacctgggactacaggtctgtatcaccacacctggctgagttttttagttttgtagagatggggtttaactatgttgcccaggctgttctcgaacacctagggtcaagcaatccccctgcctcggccttccaaagtgctgggattataggcatgagccgctgtgcgtggcagatagtttgatttttcatttgccattgaagtcattttacctcatggttttgaaataatttttggtcgtcttagcagtttaaaaatattcttttgttttttctcctgagtttggagcattcctgttactaattgcttttttttttttttttttttgacaggtgtacactaccacatccagctaatttttgtacttttttatttatttatttttggtagagatagggtcttgctatggtacccaggctggtcttcaactcctgggctcaagcagtcctcctgcatcagcctcccaaagtgctggaattacaggcacaaggcagcacgcccagccctaattacttttattaggccaaattccttgtgtggaattcctgtgctttgcacacaaattgtcaggttggccccagaaaggtggatcccattttcctctttctgtgcctatgtgggtgaccaatcttccgaatcctacaggagctgtggttgatctctgtcctctattggctgagataaagtccaccatggatttctgcttctttgattcattgtcagtccacacatagggacaagttactgtgccctcattagaaagccatttgctaagtgggaactccggggaggccaggcctgaaggagagtttgccgtcagtcatttcgatcagggatcagggcagagaccactgtcatgggtagagctgtcccgccattccccaggaggaaggcagggctgatggcaggggtggggtgggcagtggtgcttaaaaagaggagaggccccaggggtgggcagtctctttgctatagatttccttgctgtcagccccaagcacttagcaattcttgctgtcggattctcatttgctctcatctgtgctacaggaaatcagtgtcttgagccagatggggtggcctgagcctcgggcccctcacagcatccaagggcaaagtctcagcagagccattgcctaaagatgttaagattattaaatgaaagcacaacatgcctgcagaaacgtatacgaatcatcaacctacagctggaaacatttttacaaagcaagcccacccacggaatcaacacctgtgacaccgcttcccaccccttcccaacttcccccaccaaggtaacggctgtgtttcacgtcttctaactccatgaatcggttttacccattcttgaactttattgcatcaacataaaggaagaaactgaggcaaaattaacataaatagagagtttatttgggccacgtttgaggactgaagcccaggagacatagactcaagttaccctggcgataagctccaacaagcagcagatgcaaatggatttttaaaggaaaattgaaggagcagtttggtcgtttaccaggaatgtacattggttctttaaaatggcatcagtgccttttggccagaaccgccatcttccaggaattcgccaaaatgatgaatgcaaagggaaagaggagaggcacccggtacatgttctccaggcgttttggaaaacatggagttgttcctctggccacgtatatgtgaatctataagaaaggtgacactgtagacatcaagagaatgggaactgttcaaaaaggaagccccgcaagtgtc

SEQ ID NO: 13133 - DNA, 2300 bp, Homo sapien
acacatattaaaaagcagttaaaattattacaaacttcaacgaaattaaaaattgtgccactaaacatacaaaaaagctaattacttcgtgtttcattaaaacttttctgaaaaggcaggcctctcacctcagactagtttcatgcctatactttccaacagagtttctaaaataacatcatttttgtgctgccaagcaaaaagtcagatctgtttcaatactgctaagtcatgctccacagtgaaacagcagcagcatgtctgggatccccttttctagtttgtctgatgggaaccctggtactcacaaggcactgtgcacttggcttaacaactatacaccaaggtacacactgcgggattataaaagtccctgccctaaaggacacaaatcacctctcaattctggattgtgcctttatttcttcctaccaacactgccaatttttaagttgtttataaagcttttagttatggaagcacgatcttggattttgatataaaaatcaacatagctgccaattctaacctcagtgcaaatgcaactggtccaaaacaaagggcagccccttatctacctcatcctgtcctcagcaacatttctcttttccagatcgggaaacctgcacggccgctcaggacttctcgatgactgcaccttagagaccagagtgcaggttagcggggctctcgctccatcagtcaagtgaggtcttcaaacttcagggtgaactatggatgtgtttttaagactcaagttttcacaaaaaaaatccaagtttcagaaagaatgggagagtttcaacagaactaaaatatgagagcctctctctaaataataaaaattttctttttttttttttttggagacagtctcgctctgttgtccaggctggagtgcagtggtgtgatctcggctcactgtaacctgtgcctcccgggttcaaggattctcctgcctcagcctcccgagtagctgggattacaagcgagccaccacgcccagctaattttttgtatttttagtagagacagggttccaccatattggccaggctggtctcaaattcccgacctcaggtgatccgcccacctcagcctcccaaagtgctgggattacagacgtgagccaccgcgaccggcctaaataatagtaattttcaacggaatacattggaatctcattataaatgcctgctctgggctacgatttgcttatcaaagaattcacaagtcataaactagagggggtggactcgacgtgatgcccactaggagaaaggtgacaagagaagcacgaaggatagcgcttttcaaccctgggagagcagggaggccttcaccagaaggtgggaacccaccacgaagcgccttcaggaggccccaggattccaaaccaattaagggcctcctcttccgaaaacgggaggcgacgcgctgagctaagcgcgcaggctgggttgcgggccgacaccgaggcggcgcggcctcgcgaccgccctgggcggtcactggcgagtcacggactcgttccgccagcggccaatccaccccgagtccgaaacagaagacgtccctgggatgaaagacccaggcctggggcttaaggtggaaaaacaactcattcctcgaggcccggagtcgggcgtcccgggagaacgggaaagggagatgagcgcccgctgcggggagaacgcggtcgggttcctctccccgaaggtggcagccgcaaaaacacggcctcgaaagcagtttcgaggacgatggctcctgcgtcccgggagtcgccatgacgccgcggcctgtcccagacccggcgagggaggggaccaaccaccatctccccctcaaggcccaaaccgacaaagaacggcccccggtaccccggccccgccaccagggccactccgggtctcgcgagacccaagggctgcgccgcgaagacctctgggaaaggcggggggaggggagaggaaggaagcgagaccggggctggaggcgggccgaggccgcgagttgagcctcaggaagcagaaggggcgcggaaagatgcgattgacgtcgcaagcgaaccaatgacgagcgagctgtggcaggcctccagccaatgggcagtgaggcctgacgcggggggcggacgctggggccgagggtagcttgagcgcggcggcggcgttgttcagtcagagcgagaacattccagaggtgagtccggtgaaggggcggccccctgcccggtgcttcccgccccctcgacccctcgggccgctggctggcggggaaggtgcactccccgaccg

SEQ ID NO: 13134 - DNA, 2300 bp, Homo sapien
gtgccgccgccgagcagcggggaggggctgtcccagcgacgtccgcggtccacacccgtcagcgccggagctgggcgacctggcgcggagagacggcgccgtgagccgtgggcggtcggggagtgcaccttccccgccagccagcggcccgaggggtcgagggggcgggaagcaccgggcagggggccgccccttcaccggactcacctctggaatgttctcgctctgactgaacaacgccgccgccgcgctcaagctaccctcggccccagcgtccgccccccgcgtcaggcctcactgcccattggctggaggcctgccacagctcgctcgtcattggttcgcttgcgacgtcaatcgcatctttccgcgccccttctgcttcctgaggctcaactcgcggcctcggcccgcctccagccccggtctcgcttccttcctctcccctccccccgcctttcccagaggtcttcgcggcgcagcccttgggtctcgcgagacccggagtggccctggtggcggggccggggtaccgggggccgttctttgtcggtttgggccttgagggggagatggtggttggtcccctccctcgccgggtctgggacaggccgcggcgtcatggcgactcccgggacgcaggagccatcgtcctcgaaactgctttcgaggccgtgtttttgcggctgccaccttcggggagaggaacccgaccgcgttctccccgcagcgggcgctcatctccctttcccgttctcccgggacgcccgactccgggcctcgaggaatgagttgtttttccaccttaagccccaggcctgggtctttcatcccagggacgtcttctgtttcggactcggggtggattggccgctggcggaacgagtccgtgactcgccagtgaccgcccagggcggtcgcgaggccgcgccgcctcggtgtcggcccgcaacccagcctgcgcgcttagctcagcgcgtcgcctcccgttttcggaagaggaggcccttaattggtttggaatcctggggcctcctgaaggcgcttcgtggtgggttcccaccttctggtgaaggcctccctgctctcccagggttgaaaagcgctatccttcgtgcttctcttgtcacctttctcctagtgggcatcacgtcgagtccaccccctctagtttatgacttgtgaattctttgataagcaaatcgtagcccagagcaggcatttataatgagattccaatgtattccgttgaaaattactattatttaggccggtcgcggtggctcacgtctgtaatcccagcactttgggaggctgaggtgggcggatcacctgaggtcgggaatttgagaccagcctggccaatatggtggaaccctgtctctactaaaaatacaaaaaattagctgggcgtggtggctcgcttgtaatcccagctactcgggaggctgaggcaggagaatccttgaacccgggaggcacaggttacagtgagccgagatcacaccactgcactccagcctggacaacagagcgagactgtctccaaaaaaaaaaaaaaagaaaatttttattatttagagagaggctctcatattttagttctgttgaaactctcccattctttctgaaacttggattttttttgtgaaaacttgagtcttaaaaacacatccatagttcaccctgaagtttgaagacctcacttgactgatggagcgagagccccgctaacctgcactctggtctctaaggtgcagtcatcgagaagtcctgagcggccgtgcaggtttcccgatctggaaaagagaaatgttgctgaggacaggatgaggtagataaggggctgccctttgttttggaccagttgcatttgcactgaggttagaattggcagctatgttgatttttatatcaaaatccaagatcgtgcttccataactaaaagctttataaacaacttaaaaattggcagtgttggtaggaagaaataaaggcacaatccagaattgagaggtgatttgtgtcctttagggcagggacttttataatcccgcagtgtgtaccttggtgtatagttgttaagccaagtgcacagtgccttgtgagtaccagggttcccatcagacaaactagaaaaggggatcccagacatgctgctgctgtttcactgtggagcatgacttagcagtattgaaacagatctgactttttgcttggcagcacaaaaatgatgttattttagaaactctgttggaaagtataggcatgaaactagtctgaggtgagaggcctgcctt

SEQ ID NO: 13135 - DNA, 2300 bp, Homo sapien
tttttaagactcaagttttcacaaaaaaaatccaagtttcagaaagaatgggagagtttcaacagaactaaaatatgagagcctctctctaaataataaaaattttctttttttttttttttggagacagtctcgctctgttgtccaggctggagtgcagtggtgtgatctcggctcactgtaacctgtgcctcccgggttcaaggattctcctgcctcagcctcccgagtagctgggattacaagcgagccaccacgcccagctaattttttgtatttttagtagagacagggttccaccatattggccaggctggtctcaaattcccgacctcaggtgatccgcccacctcagcctcccaaagtgctgggattacagacgtgagccaccgcgaccggcctaaataatagtaattttcaacggaatacattggaatctcattataaatgcctgctctgggctacgatttgcttatcaaagaattcacaagtcataaactagagggggtggactcgacgtgatgcccactaggagaaaggtgacaagagaagcacgaaggatagcgcttttcaaccctgggagagcagggaggccttcaccagaaggtgggaacccaccacgaagcgccttcaggaggccccaggattccaaaccaattaagggcctcctcttccgaaaacgggaggcgacgcgctgagctaagcgcgcaggctgggttgcgggccgacaccgaggcggcgcggcctcgcgaccgccctgggcggtcactggcgagtcacggactcgttccgccagcggccaatccaccccgagtccgaaacagaagacgtccctgggatgaaagacccaggcctggggcttaaggtggaaaaacaactcattcctcgaggcccggagtcgggcgtcccgggagaacgggaaagggagatgagcgcccgctgcggggagaacgcggtcgggttcctctccccgaaggtggcagccgcaaaaacacggcctcgaaagcagtttcgaggacgatggctcctgcgtcccgggagtcgccatgacgccgcggcctgtcccagacccggcgagggaggggaccaaccaccatctccccctcaaggcccaaaccgacaaagaacggcccccggtaccccggccccgccaccagggccactccgggtctcgcgagacccaagggctgcgccgcgaagacctctgggaaaggcggggggaggggagaggaaggaagcgagaccggggctggaggcgggccgaggccgcgagttgagcctcaggaagcagaaggggcgcggaaagatgcgattgacgtcgcaagcgaaccaatgacgagcgagctgtggcaggcctccagccaatgggcagtgaggcctgacgcggggggcggacgctggggccgagggtagcttgagcgcggcggcggcgttgttcagtcagagcgagaacattccagaggtgagtccggtgaaggggcggccccctgcccggtgcttcccgccccctcgacccctcgggccgctggctggcggggaaggtgcactccccgaccgcccacggctcacggcgccgtctctccgcgccaggtcgcccagctccggcgctgacgggtgtggaccgcggacgtcgctgggacagcccctccccgctgctcggcggcggcacctggcccggccgctcctcgctgcgcttcgcctccgcctcctcggactcggactcgggtttatatcgcgcctcacttcatcccagtcccgggcgagcagcgttgggtttatgtctttatttgacgaaaacggtgagtcgcgggcgcggcgggccaggagatggcggccgcacaagatggcggcggccgccgcgtgaccccgccgcggcgtgtggcgcagtttgggcggacggcgggcgggcgcgggcccgggcgccggccgccccctccccgcgcgctccccggcccggcctcgccccctccccggcatggcgggagcgcgtcgcgcgtgcccgccgctcgggctgactcaggcttcagctgctgcatttgtgagtcatcgcgcgctctggggcgggggcggcccgatcccggcacccctcggccgtgtgtcgcttcccggctgtgcaccctccggggccgccggctctcgggggacgcgctggggatggggccagacgccccggtcgcgcgcccccctccttcgcggagctgcccggttcgccagcccccgcggaaacgcctcggagcgcggtagccatggggaccagggcgaaggttaaccgagtatttgaatagcgaggaaaagggagg

SEQ ID NO: 13136 - DNA, 2300 bp, Homo sapien
ccgccctgggcggtcactggcgagtcacggactcgttccgccagcggccaatccaccccgagtccgaaacagaagacgtccctgggatgaaagacccaggcctggggcttaaggtggaaaaacaactcattcctcgaggcccggagtcgggcgtcccgggagaacgggaaagggagatgagcgcccgctgcggggagaacgcggtcgggttcctctccccgaaggtggcagccgcaaaaacacggcctcgaaagcagtttcgaggacgatggctcctgcgtcccgggagtcgccatgacgccgcggcctgtcccagacccggcgagggaggggaccaaccaccatctccccctcaaggcccaaaccgacaaagaacggcccccggtaccccggccccgccaccagggccactccgggtctcgcgagacccaagggctgcgccgcgaagacctctgggaaaggcggggggaggggagaggaaggaagcgagaccggggctggaggcgggccgaggccgcgagttgagcctcaggaagcagaaggggcgcggaaagatgcgattgacgtcgcaagcgaaccaatgacgagcgagctgtggcaggcctccagccaatgggcagtgaggcctgacgcggggggcggacgctggggccgagggtagcttgagcgcggcggcggcgttgttcagtcagagcgagaacattccagaggtgagtccggtgaaggggcggccccctgcccggtgcttcccgccccctcgacccctcgggccgctggctggcggggaaggtgcactccccgaccgcccacggctcacggcgccgtctctccgcgccaggtcgcccagctccggcgctgacgggtgtggaccgcggacgtcgctgggacagcccctccccgctgctcggcggcggcacctggcccggccgctcctcgctgcgcttcgcctccgcctcctcggactcggactcgggtttatatcgcgcctcacttcatcccagtcccgggcgagcagcgttgggtttatgtctttatttgacgaaaacggtgagtcgcgggcgcggcgggccaggagatggcggccgcacaagatggcggcggccgccgcgtgaccccgccgcggcgtgtggcgcagtttgggcggacggcgggcgggcgcgggcccgggcgccggccgccccctccccgcgcgctccccggcccggcctcgccccctccccggcatggcgggagcgcgtcgcgcgtgcccgccgctcgggctgactcaggcttcagctgctgcatttgtgagtcatcgcgcgctctggggcgggggcggcccgatcccggcacccctcggccgtgtgtcgcttcccggctgtgcaccctccggggccgccggctctcgggggacgcgctggggatggggccagacgccccggtcgcgcgcccccctccttcgcggagctgcccggttcgccagcccccgcggaaacgcctcggagcgcggtagccatggggaccagggcgaaggttaaccgagtatttgaatagcgaggaaaagggaggccggggcgagcctggcgttcgctcgcgctctcttgcttaatggcaaattgtgggcgagcgctgcgtttaaggaagtgctgctttgaagtaagccatggttgccgaagcaacgattagttgtagagaacagttccctaggttgcccttaaaaatgaagacgaacgggggtgtgcctgagaagtttgcttatccaggcggggtgggcggcggagagggctcgggttcgttcttcagcacttccaggatggccgcagaggcaaacctgctgattgccctcggtctgatggaatctcacggcggctgaggcagcacagcttgtgttttcttgtcaggcatttccctaccagtcacagcttagtcgaaatggaggcctttttatgttcccgcagattgtactgtgttacatgagaatggctgtttgcatgtgatctcagatgctttttaaggtggagttaagcagaagcataactaggatgtaaaaaggaggcgtttccatccagcgatgatgttaaacctggggggatttttgtgtgttctttccctttttctttcagagctgttgcgcagccattggtacctgtattggggaaacatagcatacaagcaagaagcttacagcctcagtggcgaaaattttttcatgtcagagaccgagaactcttgcagtcgtttatgtcatcccttcttctccagacagaagataccaaaaagttgcaatcaaagatctcttcatcttattgataaagccacta

SEQ ID NO: 13137 - DNA, 2300 bp, Homo sapien
tctccctattcacattttattttactttattttgttttttgagacgcagtcttgctctgttgctcaggctggagtgcagtgggctgatcttcgctcacttcaactctgcctcccaggttcaagagattctctcacctcagcctccttagtagctgggactacaggcacacaccaccgtgcttggttaattttttgtattttagcagagatggggtttcaccatgttggccaggctggtctgaaactcctgagctcaggcaatccgcccacctcggcctcccaaagtgttaggattacaggcgtgaaccaccgcgcccggcccctattcacattttaaatagaaccactcttggccccctgaccactcctctctgagggttagatgggagccctgagtgttaccttagtcctcaggtgttttaacattgggagcctctggcctctctgggagtgaatctggcgtttaaagatacatatatttggccgagcgcagtggctcacgcctgtaatcccagcactttgggaggccgagacgggcagatcacaaggtcaggagatcgagaccatcctggctaagacggtgaaaccgcatctctactaaaaatacaaaaaaaattagccaggcatggtggtgggcacctgcagtcccagctactcgggaggctgaggcaggagaatggcgtgaacccgggaggtggagcttgcagtgagtggagatcgcgccactgcactccagcctgggcgacagagcgaaactccgtcccaaaacaacaacaacaacaacaacaacaacaaacatatatttcgtggagcaagaaatgtctcaaacatagcaagagagttgggatgccaacggaccaaagggaaagcaagcatgacatagccccccactacaagggcttacctattatccaagctttgggagctaggttagaatcccagctctgtcgctaaccaacctgtgtactttagccaagtcactgtacctgtctagacttcggatcgcatgtgtgtctgcccatctcatagggttaccctgaggctaaatgaggtaacaaatgtcatgaacccacaaggtagactcgactctcggtaacagttcgtgtcacccccatctcacactactctccctcttcggaccctgcacccatggattccatccaccgctggccaggagctgagtagaggcaccgagcacgtgaagaggtgaatgggcaaggaaggcttccaggtcaggtagcatttccagtgttccagcctgcaggcatctaccgagcctggcccgaggctggcacccagagatgcttccagtcttccagcagcaacgcactgactgtaagaaaagcctgcttataaaccccctacaggcatttggaagctggtccctggggtcctctacagattcatttcgcccccaaacccatcccctttgtgccaccctcgttattgcactcttccatccggatggcatttagctgggtccgggtctgtcacccgtctgaccaccagctccttgagggcaagaggcgcctgctgccctcagggtccgcgcccagcccgcagctgctcagatccggagacgggaaggtttgttggcgagaacctgactcccgggtcacagttaaggatgcaagagcccggcgccttcccgtagccccggccctgtcattaattaatgctggggctccattcggtgcagcgcagtcccagggatgcaaccgcaacttttgcgcacaataggctctcgatctgtaatccagccaacccaggcctgtagtgtgtaaatgccaactcagcgggagggctctggctgtcgcccagagccgtttctcggctctttcgcggttgccggcgcgctcgggacaggaggaacccgcagcccgcgggagtcagcggagacccgaccagcactatccagccctctgcaccgcccccgcggcgaggtctggaccaagtcgcccctagcaacaacagccgggccggctttctcaggccatgctgattggcgggactccgggtggcggcctgtcgtcacttccggcagccggaggcagcagaggaagccgaggggcggccatcttggctccgtgaggctctgaggtgccggggtgcggcggcggcagcggcggccagcagggcggaggctgaggcagcaagctcgctagagagggagaagcagtcgggcgcaggcgcctcctccgcagcccgctccatggtcggcgcccacagcccgcggcggcctgtcttgcgctccacttccttcacatcctcctccgcctcctcgttttcaggcgccgccg

SEQ ID NO: 13138 - DNA, 2300 bp, Homo sapien
acatggctcatgccagtaatcctgacactttgggggaaggtgaggcaggaggatcatttgaagccaggagttcaaggctgacctgggcaacataatgagacccccatctctacaaaaacattttttaattagccaggagtggtggtgcatgcctgtagtcccagctacttgagaggctgaggcaggaggattgctcaaacccaggagtttgaggttacagtgagctatgatcacaccactgtactccagcctgggtgattgagcaagaccttgtctctaaataaataaatatttaaaagtaaaagaaaattaggaaacgaaaatatatcttaaagacttttaatcattttcaactaaaatattttggataatactgccttatatttaggcagtatatattaaagattttcacatgcatgattgtactgtcgatgaccctgctgtatactactgatctgattatgaagtggttggcagttatttatagtagttagactttttttaaattggtagattaatacctaaagcaatgccaaagttatcccaaccaaggatttcattaatttagtcattcagcagatatagatgactgcctgctatgtacagttacagaactggactttacaaatagaaattaacaaactcagcctatttttgcccagggaagctgatcgcattgatcataaaaacctcattcgtagtttgaaaaatattttgtcagattattttcagcacaacctgcacatctccttaaatttttttaatgaccagagttaccccttttaaatagaattcttcgtgtttactacataaaagtaaaattcatactgttgtcttgacacttagtttttattcattttgagatctaagactgaaaagtctacttgtttaaatccccaatcacctatttttttcttaaaaagtgatttatgtcataccactgtagcaaataatatgttaatgtttgtttcattttcctgaaagaagtaatgatttttacttagtggttaaatattttataatgaaatttttaatgtttatgtaataaggcaagatttttgttcataaggtattctgaagaaaattgaaaaatgttttattactagtacattgcaaatgtcttgtcacttctttaacataagacataaattttatcttagaaagtgtatctggccattgcagtggctcatgcctgtaatcccaacactctgggaggccgaggtgggctgatcacttgaggccaggagttcgagactagactggccaacatggcaaaaccctatctctactgaaaatatagaaattaactgggcatggtggcgcgcgcctgtgattccagctactcaggagactgaggcacaagaattgcttcaacccgggaggcataggttgcattgagctgagattgcaccactgcactgtgacagagtgagactctgtctttaaaaaaaaaaaaaaagtgtgtccatctgaagaacttttaattacagctaatgtcaatatgtactgctaaaccttttcttacttttttttgatatattaaaagatcacatactcatttaattacctgtaataattttactttttcaacaaatgtcagcatttctttgttcattggccagagaaggaaccctgctttgttttttttctttctctctgtaattgattagattttctgtttaatttgtgcgagttatttttgttaatttttttttttttttacttaatttcttttagaaacatgtcattcaggtttatcaaaaggtaggatttatatatacacatttatttttcaatcctcactcccaaatggctcctgcaattaacattaggtttggctttctggccctgttttttccttataaactaaactttctgctgataactaaatacttaattccttgaaaggaaattgaaaagaaatagattaactctgtcaggcattttaaagggactatggtacccatgcaacaaaaggctgatgcatgctctgtgtattttctttctttggtagaattatttagcatccaaataattctgtcttcatactaataacacttagcatgctcctgtttgaagaatgagatgctcagtaatgttaatgtacaattaatgattatccacaggcatgcaaaaggtaagtattagttgtgttatttttatttcactgaggatggaattagcaaaaggctttaaaatgacaggaaaattagctaatacagaaaacaagcataaaattcaaagctacagcctcatttgatttggctttttcagaaattaaaatgtgaacagctgcgtag

SEQ ID NO: 13139 - DNA, 2300 bp, Homo sapien
gaggggctgcccccttcaggaaaggggaaagggggtcctttcccatgggggacctgggaagcaggttaggctctcagccaggagggtgagagaggggagggttggccttctgagaagctgcagttgctgaagacagaggaagtcctgagtgtggcccccaagtctctccctccccccaagtctgcctccaggggctgcagctatcccttccagaaacagaaacttaagcccttcaggttttgtggggtagcaggtgggcagctgcagaaatttctaaaactgggcgaagaggctgcacggggcacagagtgcaggaattccaggcttaagggacacctgctgtctggccagcccagaggggccgtttgcctttttacatgggttggttttattaagtctaaaaaatgctggcttggaacaggacgaagcatgccaaggagcaaagaggcatgtgtctcctctgcagtgaccatggggatgagacaggagaaaaggcccccacaccgatgctcacataggcagaggcgaacaggcttcccctgcctttgggccttggctctggtgccttctgctctgaggcacctattcggggtcccttatacctggaacgccactgctctgtgtccccctggccccagcagcaccgatctgatgtcatctggtttgttgggctgctggctcatggccagtcttcttccagcagcaggcgctgtgtacctcgctgcctgctgtatccccagcggctggcacctgttaggtgctcattgtgccactgctggagggatttgtatcaaatatacccacagataagagttccccccttctttgctttattcacagagcaacagatgagggtccctgatggatattaaccccacatcctccacttccccctcttaacagctgcataatattccacagcaagcagatgcctccctacccttggccactcccgcctgatggggcatcgggttgtatccagttatgtttgtttttccctccacagatctcttggtccattagtggagagaactgagacatcctttctaagggctgcattcctagaaggggagattgctgggtcacggagttcgaacattgttaacgttaatagattctgccaaattatcttgcaaaaagcatgcagcaatttaagttgcaggcagcgtgtggacgcctgtcttcccgcattccagctcaaagccagcaatggctggggtcgatctgggagtgttgggggtaggggcaggtggagtcactgcttaatttgcatgattctggttattcgtgagatcagtttttttttttaatcgcacttatgcttattgtttattagcgtttcctcccatctttgcctgaagtctccggggactgcctttgggggtcgggtaaacttgtcccctgcgaagagggcccagggttggggtctggaaactccgaggctgcacttgccagcggcctcttaaggccacagcgtccccgtggtttctggctcgcagccccccgagacccaggacttgtccaaggtcagggcaccgcgggtgcccccgggctgggccgcagccagactgcgcttcccgcgcgccttcgctttgcaccaggatcgcccaggaaacgcctgcgggcaccttgaggaaggtcggcggctccgggccagctcgcactggccgggggtggggcgggggccgtacctgctgcggaagccccgaaagctttcgcccggcccctcgccgccgccgcgggggctggctggactaggcgggcaggctcgaggatgcggatgaacccaagcgtcctcgagtgcccggaggctctccgcctcagtttcccgcccagaggcaagggcgtgcgaggggatccagatatccaaggacctgaggtttcggcctcgaggtcttgggcgggggactgggcaggctgcgcggggtcccagcgaggggacagctcgggtgggcggccagggtgttgggggctgcgggcggcggacaaagcggcggcaccaccccgcggcgcgggccaatggaatgaatgggctataaatagccgccaatgggcggcccgcgttgtgccccttaagagccgcgggagcgcggagcggccgctgttcgcctgcgtcgctccgggagctgccgacggacggagcgcccccgcccccgcccggccgcccggtgagtgggcccgggggccgggggcgtccgcgcccgggctaggggcgctgcgtgcaaagggggcgcgtcgcctggagcgcgcgccggaccggccgggggtccccggcgatgatggcgctccccgcgcgcgct

SEQ ID NO: 13140 - DNA, 2300 bp, Homo sapien
tcttcagcctcctcagtgctgagctttgggggtttattggctttaaatcctaatcccactttgacctcactggctgtgacttcaggcaagttatttaacatctctgagtttcagtttccccatctgtaaagtgttccctccctcctaggatcctggggagaagtcaatgagatggcacagctgggcatatacagcatcagctcttgttaggggagccccaatacaaactctgcacagggaatcatcagctgaggtaggggggattggttctgcttgaggactcaggctggggactggggcaggctcagatggagcaggtgggcagggctgaggaggctgcctggaggaaggggcactggaggagttgaccagccagtaatagacagagaggcaagagggaagtcggaaccaagggaaaccaccgccgagtcaccaagtcctaccttaggcccttataggcacccggccctgactccacaccaaccacagctgagaggctggggaagagaaacccaagagaagtggaaagtcagaatcccccaggggagaaattagggggtgactcaggcgggtgcatcatcaagggagagaagcatccgctggaacacaggttcgggagctgtggagggggctgtttcaacgttgagagcagaaggcagggaggctgtaaggcagaagtagaggcagctggtggccagcgtggtggccccacagggacaggagcccacagagagtgggaggccatggaaggcctctcaccagcttactcctgggggctctcagccgcagctagggcagggacacagaggggctgaggttggacccctaggtttccatgatggaccctgagaagccaatgcaagggccacaaacagcctggcctggcctgccccagaggcgagagagttgagagtgctctacaggctgccagggctccagaggggagctcgctctgcaggagcctggccacctcatcttaccaggctggagtggctgagtgactggggagggtgccctagggtcattgctaactggcttgggttcgggcgcaggctaaaccctaggctgggtaggggggtctctgttcctctccaagctctggtcctgagagctaagagctggaggaagaaaatccgtgtcccctgcccccgctcccctgcacacacactccacagaggagccagctgggaatggtgttgctgagacagaacgccactcccgcttccctgttctgcccatcctccagcagcacctcctccagtctcctgcccaggctgctcaccagacccaaaagtgggcccaagtcatccagttctcattatgccttggttcgcaggaggggacacaggacccctactccctcctagaagcagctctgcactcaggacaacgtgcccccgtcgggggaggcagggcctgggcggaaggccacttctgcagacttttccaggcccccatctgctgcacagagctctggctgaccctagcccaagccttttagaaccgccccttgacctgcgattccttttctggaattcattttagggcccagtcaggggtgttcccagagcagtctgcaataacaaaatgtctatggcgaagtgtcctcatagaggactgggcagtgagccacgggccagccctctggtgaacccccaggggccgtcaaaggggtccgggacagcagtgacagccaggccttggctcctgccgcccttcaaatgtgcctgggtgcgacggcaacccgcggccggcggggcggggggaccttttgtttgtttgttattatttgtagagatggtgggggtctcactacgtttcccgggctggtctcgaactcttcagctcagaagaacctcccgcctcggcctcccaaagcgcgggatcacaggcgagagccaccgcgccggccggccgccatatggattttgtccagtctttcgatcttccagcgaccagcaaatgtaaacagagcagctcacatgagggaagaagtcgcccaggaaacgtcctctgggaggggcgggaagggcagcctggcgctcccaggatcccgtgcgcggagggggggagggggaggcggaggcggggcgcgacgtcatcagcgggcgcggagccggaagtgttgtggccgccgccgccgcgcgtcgcggaggcacgtgtggagccccggcagcaggagcgtcgcaggtgagactccgcggggtacagggtggcagggcgcgggtgagggtgacccgggccgggcacggcgcgcagggcctgtccctccagcctcgcatgggcggcccccgccggcc

SEQ ID NO: 13141 - DNA, 2300 bp, Homo sapien
tctgtatttcaatccggtgtgggtggtttgcattctgctccaactctttgagaagacgttctgtctcctgtgctgcccgcttcctagcttgctgaatatctccttttccttcagtatctacagagtctatttcaaaaagctgttttgttagaatcctctccagtttcttgtaattcttgtcatctgacagaccactgaagccgataacttgctgttctacactttttacttccttttggatttcctgaagcctactaatagaaggatgttggtttcccatatccatacttttgttgtgttcagtttcacaagcactaaaagacgacaagaatgataacttactacagcacaaggcttctgcagaacactaatggtatattaagtcattctaaaattctcattttaaaaaggtatacttctgagcagtcatcccacctcagcctccccagtagctgggtctacagtcgtacaccactacgcccagctaatgttatttttagtagagacaggtctcactatattgcccaggctggtctcagacgatccgcccgcctccgcctcccaaagtgctgggattaaggtgtgagtcaccgtacgcgacacaaactatttggaaccagcagggcacctttatgaaaggtgaaacagtagctcttgtaaccttccgaacactaacagtaccccgccccgccacacagctatgcctagtttccagaaactctaagcaaaagaaagaaccagaacaaaaaccagtggctctcagacatccccaaggtccccgcttcttcgtttctctccatccctttgtgcacttcccctccccacccttttagctcctcacacatcttccctcacagaagtctccctgaagagattaaaaccccacaggtaaagaagagcgaccgggacagcgctgaagggcaccaccttgggctttcgaggcccaacacctcctcagcccccaacatgctccactctctcaaaaaaaaacaacccgcgaaaacgtggtaactatgaataattcattcactcgcctcccactgggagtccacaatggcctaatgcacgtttcaagctcttggtttctatcaaacggctcgctcaaggtgggtaaccaatggaaacgcataatctatccccggcggatgtcctggaggccacggagggaaggcggcccgagctgcttcctccccgcctcgcccttccctcttggccctttacccaaaagaagtctgaattggatgcggtcttggcgtcccgtggctgaggtggcgaggtggaagatcagccctttacggggtgcggcaccggagctgggcccccagctgcatgcctcgcacccctcccgactaggtctgagcggggcagccggtgaaggggccgctactggctgcagcagccgctccgggcgtcttggcccgggtgccagggcgcgcctgcaggacgtgacctcacaatgggcgcgcgaggggagctcggcccggccgggggaagccgggggaggaggggaaccgaggcccggccggagacaccagagaccaggcccggccagccccggtcgcttccgaccccaggggcggggacagcgccgagaccgactctgccctgcctgatccgacaggccgcacggggctgggcgctggcgaaggggtggcccagcggggagccccgcgcggaggtggtgccccactcgtccccccgagagagggaaaaggctacaagccgcgcttcgctcacctgtcccgcccgcgccatcgcgcgatgcgtcgccgacgcttccacgacttccgcagctccggcagtcgcccgggcccggcagccccgcccctggccgaacacccctaaacccggggacacctcctccggcgtccgcgcctagccgccggcagcgccacgcccaccgccagcggcgcagcgaggcagcctggagtgaccgcgaccaaggagcggccgcccgggtcagcccgcgccgcccgccgccccctcaccccgtcgcaccgctgggaaagcgcacggtcggccgcgccgccgcgcttcctcgggcttcgcgaccctgccgtaaagcggcccctcgcgccgtcgcaatgctgccgtgcgccgcgggagccagggggcgtggggccatggtggtcttgcgggcggggaagaagacctttctcccccctctctgccgcgccttcgcctgccgcggctgtcaactcgctccggagcgcggcgccgagcgcagggatacggcgcccagcggggtaagcaggggcctggggacattgggccgggaggggtgaccggaagggaagaca

SEQ ID NO: 13142 - DNA, 2300 bp, Homo sapien
ccaaagatagagatgctgggtgggtttctatgttctagggatagaaggcaaggacttggtcactgtaacacagaactgagctagccacttgggtgtctggttggcaagttgccctggtaactccttgtttaaattgtaaactagatagaccttcaaagctacaattatgaaagtgtactaacagccacagcccaacagaaatgaaaatgtacaagcaagtacatttgcaatttttaattagcttttttttttttgagatgaagtctccctctgtcgccaggctggagtgcagtggcgcgatctcgactcacagcaacctccgtctcccgggttcaagcgattttcctgcctcatcctcccgagtagctgggtctacaggcgcgcgccactatgcccagctaatttctgtatttttagcagagacgtttcaccatgttgggcaggatggtctcacctcttgatttcgtgatccgcttgcctcggcctcccaaagtgctgggattacaagcgtgagccacggagcccgtccaatttttaattaacacttttttaatacttctttaattattgtttaaaccaagttttccagcctccttcattagcctgtttggtatttgcatgctttgcttgaatattttatctccagcccattccacaccgttagtcaacattttcatctgacagacggaatcaaggcctaggcctcccttaaacaaaacatccctcccaaaagtaccacttataaaaattgcttgccacagacattcttgctacagacattctttgcggatctttggccagtaacatgcatatacccacacatagtttgcaaataacaactattcaacgtgaagtgctacaaaagtacgatgataaagtgctcgccgcttgaagaaaagcactaataattgtaacaaagccaaaacacacacacacacaacgaaaaaaaacgcacggtaagccaagagctctttaaaaataaaaaataatcattctcgggaacaaataaggtaggtacaaacttgccaggtgactctgttacgcttaaaggttctggctgtcaacagtccccggcgtggtggcggcggcaccctcagtcccatccgactgagggcgttgatgcgggagcctcggggctgcgggactgttcgggataggacgcgagagcacctggacaaaggcctgaggcggctgtgcagaacagggagtggccccgaggcccgggtttgtcttcccttccggtcacccctcccggcccaatgtccccaggcccctgcttaccccgctgggcgccgtatccctgcgctcggcgccgcgctccggagcgagttgacagccgcggcaggcgaaggcgcggcagagaggggggagaaaggtcttcttccccgcccgcaagaccaccatggccccacgccccctggctcccgcggcgcacggcagcattgcgacggcgcgaggggccgctttacggcagggtcgcgaagcccgaggaagcgcggcggcgcggccgaccgtgcgctttcccagcggtgcgacggggtgagggggcggcgggcggcgcgggctgacccgggcggccgctccttggtcgcggtcactccaggctgcctcgctgcgccgctggcggtgggcgtggcgctgccggcggctaggcgcggacgccggaggaggtgtccccgggtttaggggtgttcggccaggggcggggctgccgggcccgggcgactgccggagctgcggaagtcgtggaagcgtcggcgacgcatcgcgcgatggcgcgggcgggacaggtgagcgaagcgcggcttgtagccttttccctctctcggggggacgagtggggcaccacctccgcgcggggctccccgctgggccaccccttcgccagcgcccagccccgtgcggcctgtcggatcaggcagggcagagtcggtctcggcgctgtccccgcccctggggtcggaagcgaccggggctggccgggcctggtctctggtgtctccggccgggcctcggttcccctcctcccccggcttcccccggccgggccgagctcccctcgcgcgcccattgtgaggtcacgtcctgcaggcgcgccctggcacccgggccaagacgcccggagcggctgctgcagccagtagcggccccttcaccggctgccccgctcagacctagtcgggaggggtgcgaggcatgcagctgggggcccagctccggtgccgcaccccgtaaagggctgatcttccacctcgccacctcagccacgggacgccaagaccgcatccaattcagacttc

SEQ ID NO: 13143 - DNA, 2300 bp, Homo sapien
ggtaagatttattttactttaacaagaagtctaaggctgagagtggtggctcacacttgtaatcctagcactttgggaggcccaggcaggcgcatcacttgaggtcaggagtttgaaaccagcctggccaacaggtgaaaccctgtctctactaaaaatacaaaaaaattagccgggcatggtggtgggcccctgtagtcccagctactcggaaggctgaggcacgagaatcgcttgagcccgggaggcagaggttgcagtgagctgagatcacgccactgtactcccacctgggcgacagagggagactccaactcaaaaaaaaaaaaaaaaaaaaaaaaaagaagtgtatatgacaatagagaaatccttatttgggtgctgttgtttctttccagcacaagttcacaaaataagctagggaaaatcccccccgcccgggaaatgtcttggttgatttcccgtttgctctcttagagcattttcagacacctgctctatctttctgcccaaagatagagatgctgggtgggtttctatgttctagggatagaaggcaaggacttggtcactgtaacacagaactgagctagccacttgggtgtctggttggcaagttgccctggtaactccttgtttaaattgtaaactagatagaccttcaaagctacaattatgaaagtgtactaacagccacagcccaacagaaatgaaaatgtacaagcaagtacatttgcaatttttaattagcttttttttttttgagatgaagtctccctctgtcgccaggctggagtgcagtggcgcgatctcgactcacagcaacctccgtctcccgggttcaagcgattttcctgcctcatcctcccgagtagctgggtctacaggcgcgcgccactatgcccagctaatttctgtatttttagcagagacgtttcaccatgttgggcaggatggtctcacctcttgatttcgtgatccgcttgcctcggcctcccaaagtgctgggattacaagcgtgagccacggagcccgtccaatttttaattaacacttttttaatacttctttaattattgtttaaaccaagttttccagcctccttcattagcctgtttggtatttgcatgctttgcttgaatattttatctccagcccattccacaccgttagtcaacattttcatctgacagacggaatcaaggcctaggcctcccttaaacaaaacatccctcccaaaagtaccacttataaaaattgcttgccacagacattcttgctacagacattctttgcggatctttggccagtaacatgcatatacccacacatagtttgcaaataacaactattcaacgtgaagtgctacaaaagtacgatgataaagtgctcgccgcttgaagaaaagcactaataattgtaacaaagccaaaacacacacacacacaacgaaaaaaaacgcacggtaagccaagagctctttaaaaataaaaaataatcattctcgggaacaaataaggtaggtacaaacttgccaggtgactctgttacgcttaaaggttctggctgtcaacagtccccggcgtggtggcggcggcaccctcagtcccatccgactgagggcgttgatgcgggagcctcggggctgcgggactgttcgggataggacgcgagagcacctggacaaaggcctgaggcggctgtgcagaacagggagtggccccgaggcccgggtttgtcttcccttccggtcacccctcccggcccaatgtccccaggcccctgcttaccccgctgggcgccgtatccctgcgctcggcgccgcgctccggagcgagttgacagccgcggcaggcgaaggcgcggcagagaggggggagaaaggtcttcttccccgcccgcaagaccaccatggccccacgccccctggctcccgcggcgcacggcagcattgcgacggcgcgaggggccgctttacggcagggtcgcgaagcccgaggaagcgcggcggcgcggccgaccgtgcgctttcccagcggtgcgacggggtgagggggcggcgggcggcgcgggctgacccgggcggccgctccttggtcgcggtcactccaggctgcctcgctgcgccgctggcggtgggcgtggcgctgccggcggctaggcgcggacgccggaggaggtgtccccgggtttaggggtgttcggccaggggcggggctgccgggcccgggcgactgccggagctgcggaagtcgtggaagcgtcggcgacgcatcgcgcgatggcgcgggcgggacagg

SEQ ID NO: 13144 - DNA, 2300 bp, Homo sapien
cctctgagttcacccctgaccacctagactctgcctgttccatcatctttgttccatctctgcctgttccatcatctcggcaagatccggtatttccttatgtgtttatggcctacttctcctcactggaatgtaaactcttagaaagcagagatcttatctatcttgttcacctatgcatccttggctgttatgaggatcatgggagagcaacaaatatttattgaggaaataaaagaacaaggtaataaagccagaacaaagtggtggcagtggagatggattcaagaaatactgagaggccgggcatggtggctcacacctgtaatctcagcactttgggaggccagctgggaggatcacttgtggccaggagttcgagatcagtctgggcaacatagcaagatctcctctctgcaaaaaatttaaaaaacattagctgggagtggtggtgcacacctgtagtccctagctacttgggaggctgaggcaagaggatctcttgagcccaggagttcgaggttacggtgagctgattgccactgccctccagtcagggtgacaaagataccctaactcaaagaaatattgaggaagtagaatcttttccacctgttgtagtagggcgtaagggagcggtgcaggcatcccaggtttctggctagggttgtgggtgagcagaggggacagttactgggcgcagcggcacagaaagaatgagcagtcgatgcttggcggtgcccagcccagtggctgaacttagtgacatccaagctgcagtctggctgaaatcactaacctgaaagtggtatggagaaagtttgtttgaccctgactcagtgcctctccccgggccaaccctaccgtgttacctaggagctccccctttgtctttataaatgagataaaagtaaccagacctccctggaaaaaccgaggagcacttgcttctctggtgactgcggggcctaactgcagggttcacaaagggctgctggtgctgggtgataacatcggaaaggaacagcagttcacaagatggggctgggggactggcccaggaacccctccaggttaaatgatgcctccgggccccgcacttgggacgtctgcaggcactgggagggtttttcccaagccgctggcagcagcgagcggagcctcgcccattgaatcagcatgccctcccggctggctgctgagtcaggcctgcggagccggcgaagccgcaggacttgacccaggcgcgctccgctgcccttcaggccgggctggaggtcgaggccctgcagccagggagatgcgccggtggctgcgtggggacagaggggggttgtctcccaccctcacagtctacaccccggcccttcccctttgcccgtctgaggcgcagtttgtgtcgagggggagcgcctggaaagtttcctcgtacagatacgagggtccaaaagccccgaggagagggaataatgagaaggggagggcgcagggttagaggtcagggtctcgaccaaaggctgtcggttttcctggaggagggagaaaggcctggccgggatcatctgattccggggcctcccgaaggcctcctagctgggttttggggggaccgaaacgagcgcatgaagctcgcgggcctgggagtggggtggggcgggagcccagtggtggcggctgcggccgggcctgcaccgtccccggccgcattctggtagggcccacagtccggctggaagggaagctgccgaagcgctcggtcatcgcggctgcggagtcggagaggccagggcctggccgcccaccccgcgagccgcgccctgccccgagcgccccacccccgtccgcgttacaaccgggaggcccgctgggtcctgcaccgtcaccctcctccctgtgaccgcccacctgatacccaaacaactttctcgcccctccagtccccagctcgccgagcgcttgcggggagccacccagcctcagtttccccagccccgggcggggcgaggggcgatgacgtcatgccggcgcgcggcattgtggggcggggcgaggcggggcgccggggggagcaacactgagacgccattttcggcggcgggagcggcgcaggcggccgagcgggactggctgggtcggctgggctgctggtgcgaggagccgcggggctgtgctcggcggccaaggggacagcgcgtgggtggccgaggatgctgcggggcggtagctccggcgcccctagctggtgactgctgcgccgtgcctcacacagccgaggcgggctcggcgcacagtcgctgctc

SEQ ID NO: 13145 - DNA, 2300 bp, Homo sapien
actacacccagctaaattttatatatttcatagagacagcgttttgccatgttgcccaggctggtctcgaactcctgggcttaagtgatctgctcagctcggtaccccatagtgctaggattacaggcgtgaaccactgcacttggccaaggcttttttttttttttttttttttttaaacttatatgcccattaaaacatatggaagtttctggacagcactggatattattaatataaatgagttaagtaagcataactaggtttttgttgtgcacagcgtgcatgggcacacacatcactgctgggtgctggggatgccatggcctctgtcagtcttgtgtttttccctagcattatagtgtgagagttgacccacgtgcgtagatgtttgggaaaaaaatagtagctacatatgtattcatattcagtattctacctttcagcttgttatttcatcattcttgtattaagggacacataattttaagctttttttttttgcctttaatattttactgatctttataaggtttgttcaagattttggattgattgattggttgtagagatggagtctcaccatgttgctcaggctggtctcaaactcctgggctccaaatgatcctccaccttgacgtcccaaagtgctgggattataggtgtgagctgcgaggtaccacgcctggccaggatggattgattgatttcttttctttctttctgtctgtctgtctgtctttctgtcttgtcttgtcttgtcctgtcctgtcctgtcttgtgtcttgatggagttttgctcttgtcgcccaggctagagtgcagtggagtgatctcagctcactgcaacctcagcctctggagttcaaccatttctcctgcctcagcctcccaagtagctgggattacagacacctgccaccaagccccgctaattttttgtattttttagtagagacagtgttttgtcatgttggccaggctggtctcaaaactcctgacctcaggtgatccaccctccttggcctcccaaagtgctaggattacaggtgtgagccactgtgcccagccatgtatttctttttttaggataaattcctaagacgggttagagtataaacattttatagtccttggtacctgctgccaaactgccactcagaaaggctgtgtctgcccatgcttctgccgcacaggcgccaccctggaggtggggggctctattccgttggtggagatagagtatgcattgtgttttaatttgtatttctttgattatgtatttttagtcatttgtatccttctgtgaatttcctgttaccttgcacatttttctgttaggattttaatgctttagtattctatgtttgttttcttttgaatttgagttcttggtgggcttctttttgttttttttgagacggagtctcgctgtcacccaggctggagtgcagtggcgttgtctgggctcactgcaagctccgcctcccgggttcacgccattctcctgcctcagcctcccgagtagctgggactacaggcgcctgccaccgcgcccggctaattttttgtatttttagtagagacggagtttcaccatgttagccaggatggtcttgatctcctgaccttgtgatccacccgccttggcctcccaaagtgctgggattacaggcatgagccaccgtgcccggcccttggtgggcttcttaaacccacttgatttaacaaatcacagtgtgctagtcccactcccagagtttctgattcagcagggctagggtagtctgggtttctaataagttccagttgaggctgactgctgttggtttgggaccacaccggagaaccactgctaactaatagtcccagacattttataatatgtcatcgtttacagaagtgtttaatatacctcatctcatttaattcttttttttttttttctgaaacgaagtcttgctcttgtacccctggctggagtgcaatggtgtgatctcagctcactgcaacctctgcctcccgggttgaggcgattccacccaccccggcctcccaaagtgctgggattacaggcgtgagccaccgtgcctggccattttttttctttctttttttttttttttttgatacggagtcttgctctgtcgcccgggctggcatgcaatggcatcatcttggctcattgcaacctctgcctcccaggttcaagcgattctcctgcctcagcctccctagtagttgggattacaggtgcccgccagcatgcccagctaattttttttatttttagtagagac

SEQ ID NO: 13146 - DNA, 2300 bp, Homo sapien
tgggcagatcacctgaggtcaggagttcaagaccagcctggccaacatggtgaaaccccgtctctactaaaaatacaaaaattagctgggcgtggtggcacacgcctgtaatcctgtaatcccagctactcgggaggctgagacaggagaatcgcttgaacctgggaggtggaggctgcagtgagccgatatcatgccactgcactccaacctgggtgacagaacgagactccgtctcaatttaaaaaaaaaaaaaaaagcatgaggctgggcacagtggctcacacttgaatcccagcactttgggaggccaaggtgggtagattgcctgaggtcaggagttcgagaccagcctggctagcatggaaaaaccccatctctactaaaaacacagtgcagtggcacaagcctgtagtcccagctactggggaggctgaggcaggagagtcgcttgaactcaggaggcagaggttgcagtgagccgagattgcactactgcactccagcctgggcaacagagcgagactccgtctcaaaaattaaaataaaataaaataaaatagcatgaatatgaccccaaaagcatgaacagcaaaataaaaactagatctgttggattcaccaaagttaaaagctcttgtgcatctaaggacatcatcaagaaagtgaaaggggactgggtgtggtgctgagcacctgcaattcctgcacgttgggaggctgaggtgggaggatcccttgagctcaggagttggaaaccagcctgggcaacatagtgatactttgtctctacaaaagtttttttttttaaattagccaggtgtgttggcccaagcctgtggtcccagctatttgggagtctgaggtgggaggatcgcttgaacccgggagctggaggttgcagtgagcttagatggtaccactgcactccagtctgggcaacagagcgagaccctgtctcaaagaaagaaaaaaaaaaagaaaaagtgaaaagacccccatgcaacaggggaagatatttgcaaatgatgtatctcataaggttttggtatccagacaaaaagacaacccagttaaaaaatgagcaaaggacctgaatacacattttactgaagatgatatacagatagccaacaatcacatgaaaagatactcaacatctttagtcattatagaaatattaactgaaatcacagtgagatactacctcatccccactagactggctataataagcgaacaaatggaaaataggcattggtgaggaggtggagatgctggagtctcatgtcttcttgctggtgggaatgtaaaatggttcaggcattggagaagtttgatggcttatctaaaagttaaacttagaaaaccacatgacccagcagttgcagtcctaggtatagacccagaatagttgaacacgggtacacaccctgtgcaatcccagccccatcactgttcctctgaggggtcctttgtgtttccagttccccgcctccaccctcaccccctccaaggaaccactcttccaatgtttttccctccagtgattaagaactgttttttttttttttttctagcgaagtatctcagaaatacctaagaaaatcttaagtgctaatgggtcaaaccattttcccctgcctggctcacagggtcttgacaatgttcacaaacagagggtggcagaagtgctcaatgaccctgagaacatggagaagcgcaggagccgtgagagcctcaacgtggacgtggtcaagtacgagagtggccctgacggaggggaggaagtgagtatgagcgtagagtggaacggggtaagtacagtacacagcgggcacgtgctccgggaggcgcccccaagtggcgcttgccaggccttcctcctgtctcatgtgctagaccttctgcttttctcaaattaagtgccaattaagctttctgtaagttcttcacttctgctaatactgaagtctgttatttgtttaaagtggtaattttcttctcaggaatccatgaaagctgtttggcttaactttgagcacttaaatgctgattgagtgtcctggctatttaaagcatgatccctgtctggtttcattttaatattgggatcagtgtggcagataactaacttgcttctttaactcacccatttcattgctaactccagtgctcctaacttcactgaccaggctgctctagattttgttagaatgagttgaaatgctttaaagggagatgctgtttaagtggaatttgtttttagaaaacaggtcagaaacaagagcttacatggc

SEQ ID NO: 13147 - DNA, 2300 bp, Homo sapien
tgtattataaactactgtagtgtagcgctgagttttgaaatgaacagcaggggctgcactgttaatgacgatacgttagcattttagcatcctttttctcaagagcagcaaaaacttatgttttcttgtcctccccacatttttgaggtgttggtaacaagtgttatttttccattttaaagatgaggaaaatgaagctcgggctggttaactgacttgctcagcgtcccatggtgagtccgagcgggcggggcgcaggccctgccgtctggcgcttctgtcgagacgtcggctttccaacctggcaggacccaggacgcattgctgcctgtggaaattaattttcttttggattatcaactgcatgtttaaaatgggctgtagacttttaaagtccgtggtttcctaaagtttctgaaatgtctaaaatgtgtttttaagagaatgaaagtcatacctgtagcctttattttggtccctatgtttttcattgcataatctccttatatacagttacttgtaaagccttttacaccaagtgtcaaggagatttctaatacgttgccaatctttacgcttaaagtgttgacatttactttgatgaccattgggaatggaccagtctggattctgtgaaatgcaccatgaggcccagcacctgctttatgctggactggtagaagcaggcagaaggtcatcccagtcctaaagccactcagaaggctgctgagacttgtgacctagaaatactgtaagccaggctgttatgcagagcctgttgcctttcctcgccgcggtttcacgtgggttttctctctcctttctgtctgacaggcctagccgcccgtgactctcacactgtctcctgcatgacgggtggcgcctcccgcagcttcccttctctctccagtgctgcccgctgtgtctagcagcctctaggatcttgtcagagctgcacctctctgtgaactggccattcctttcggtgctgctgtcctttttgggggggttcctgatttctgtatacatgtagctttgccagatatgtacttagtaatataaactgtattaataaaatccatttactgtgtaatacacgagtttaaaaattaagagcgattagctgttcactttggtaacaggtagttaagtgtcacacaaggtgttgttgcaatggcatgacggtgacctgttgacgtaactaagccttacagcaaggcatgtgccgcacgtgctccgtggtacttagagccctgggggccccgctcggactccgggtctccctaggatatgccccagtagcatttgctgtgtagtctgtgtgtgaaatttgggcattctgcttttctctactaatcttgaagtgctcagtgatttgtgtatttgtgtctttctaacttctaataaactcactccgactgacctgtgtcttggtgtctgtctgcttggtagaacttctcactctttatccatgaaacgccgcatggcacagctgctaggggtcatggggtgacagttcatctcaccaaggagttccttccaagaagaaatgctgctgtatgcacatcttcttcactctgtgttttttattttcatgttcagatactgccaagtatttcacttattaatacctgaatcaattaagatgagagctgggcactctcacctccctacaaggttgtctgaggatttttagttatttgtatagaatgggcattttatttaattttccaaccacctttgtagttaacatttaatgaaactgttctgtaaaatttactgaaggaaacagtacctccaactattgcatttagacgaaactgttaaaaggaagagcctctgtcagatccaaatggtttgggtcctgtactgtgttacttgtaccagatgcttatgtatctgttaaatgtggaagtcgattttgatgatattcttagaagctgctttaattttcctgagactttgtgtgttggcttttgtctcaaaatagcaggattcacattgcttttgggatgcgatcacttgtttgaatgagcttccttatgtccaaaggttttcatgatcattggattatctttaatgaaacttaaaaagaacaatttctagttaaagtatattcacgtacatggtaattggtggtttctgcaagactctgtcagcagtgagctgctggcaagcagggcggccttggtggagctcttatttgcacccggtgtggctcttgtgggaaggagggagaaccacctgcagcttcacgtttgttcacgtttttttcaggatggcactggatctttaaaacg

SEQ ID NO: 13148 - DNA, 2300 bp, Homo sapien
cagatgtaaggcctggccacagtgtgggactgggtctgcacagtgtgggactgcaggacagggtcctgcaggtggccctgccaggagtcctgccatatccctaccagaataccacccagccaggccagggctgagctggacgcccagacccccagggccaggatacaccgggaccctccttcctctcaacctcggatcctctttgcccagaactgtgttcccaggtggctgacgagcctgtcacgtgccagccctgcgctgcctgcgctcctctgaccggctgtggtgctggcacaggccacactactagagacaaggcagtccccccacccccaggctctcctggaccctgacactggaggttggtgggatatgctttctccaccttgtaccacactgaagttttgtggggcacagtgtgtgccgaggtggggcccccgggagccaaggacccagaggtgggtgaggaggagccgcctgcctgcagccccactgtggcctgagtggtgggggagtaaggactgccctgtgtgcaggaggggagaccctcgtgggcacggtcccaaggctgagggggtctgaggccccagcccagggggcaggcctcagacgcaaccccagttgggcttccatgtggagagaagaagcaggcggctcccagggagtcactgtaggacaccccaggctccagccctgagaatcacctctccccaagggccagctcagcagtggggaccaggtacccagcaagcgggcctgtccccagacccagggagaggcagaacatccccccagctcagatgggggtcagtctgtggccaccatcttcggatgagaaagtggagccgctgccctggaagagctgtgtctgaaccaggctcccagctgtgccacggcccaggcagacgcgttttaaaggcccgagccccgtgtgtcggggcttctcaggcagggctgttgtgcagccgccaccgtgtcagtgggactgggtcccaggtgtccctcgcaccccttcggcactgatcgtgtaggaacaggaggaggggggcaggtggggggcagagagcacccgcagggtccgggctgggcagccgagggcagcctcttcctcgcggagccggtcagccagcagtctcaccaggagctggttagcccaggttatgccaagggctggggaaacacgttcgtcccagaacctgagaaacaggaagcaggcaagctggcgctcaggcttggtggccccgcccacttcggcccagctgtgcccctggcacctgcacagaggtgcacacaccacatggctgcactcaccccagcggcccgtgtgctgcgccctgctcctccatggcctctgtcacctggaagagcacagtccaggtcagctgcaacggctgagggtcttctcgatggttaggcacaggctgctacccgcaggagccggaggccacctcactgccacccgccccacctccagaccggctctgcttccgcatcctggctaaaaatacgagctcaggggtgcaaccctgccttggtgctcacctggttgatgcacagcacagggctctggaaggcactgctcagctcacgcagcgtggcccccagggactgcagatgcctggccctgggggcggaggcctggctgtcaaattcacagcggaatggggctgccaccgagtcgatgaccaccaggcgagccatgccccgagacagcagtacggggaccttcttattcacacactccaacaaggtgtcctgtggggacagctgtcattgtctatgctggtcagcaagtccccgccccaggtgaccagaccccgtttggactgtcactcgaccgtctgaaaaccttcctacccacctggggctcacagtgcccatactctgtagtccccatactctgagcccaattctgtatttttctcaaagaggccccaactatagaagcttcaggctcacacaactggttcccttggccccatgtccttcctctggcccccccaggcagtcaccccttggctgtgccaacaccgtcctctgtagaggtgtcctttgcgcaggctcctgagtccttgcgggggtctgctctccttctgccatggtttcaccctctccccctcacaggtcagcagcaaccagccccctccttcagtggccccgcaccaggtactcagaccacccaaacctggccacagtgccaccaaagccagcccgtggtggccatgacctcttcagacgctcagcaaggcaggggcctgatgcccttcaggcgttactcaggcgagtcaggcctggcctgc

SEQ ID NO: 13149 - DNA, 2300 bp, Homo sapien
ctggctaagccttccttcctttgcctaccctgattattaaaccgagggcgggatgtactatgggattttcaggtgtgtgtgtgtgtgtgtgtgtgtgtgtgttcttaactacatggatttctttcagttacttttatttttatcaaagtaatacatgcatattgtctaaaaggtaaaatggagccacataaagtcttttagttttttttttttggagacggggtctcgctctgtcacccaggcttgagtgcagtggtgcgatctcagctcagtgcaagctccgcctcccggggttcacaccattctcctgcctcagcctcccgagtagctgggactacaggcgccagtcaccacgcccggctaatttttttgtaaatttagtagagacagggtttcactgttttagccaggatggtcttgatctcctgacctcgtgatccgcccgcctcagcctcccaaagtgctgggattacaggcatgagccaccgcacccggccgtcttttagttatttttttaaaaaatatttacatctgggctcctaaacgtgtttatgttgtaatgtttgatttgtcagtgttactgattatccatggacttctcttgggggctgtgaggactgagcgtgcctacacctgtgtaccccaacttcctctccccccagctccctgcccatacttagaacctagtttgggtgacatcagctgtcagggttgtgactgggtgcatactggccattgttgaacctggtgtggtggtgcaggggatggttttctttcttacagcatcttttttcgcccgagttagtaaatgctcaaaactcaggccccacgtgcagcccctgccccctgctccccatgccagccgcctggctgtcatccggggaccctcctgccagcttccatcctcccccgtctccccgggcctcagctacgtgaacctcagcacgctgtctgtggcgagaagccggagtgctcatggagctgccgcagcagcctggtgacagggcagggcctcgctgtcctgaccctccatccttggctgttggtttttatcctcctgttggtggccttgtgatcacagctgctgccacagctgcagacacgacgcttgcagaccagggacagagaagggctcagccagggagttcctttctcacctgtgtctcttatccaaaaaccaatgtttccagaagtccctgcagacttcacggctgtgaagggggctggggctgtgaggcttaccagggggagcgccctgccacagccccgatcccggtgagtcctcagggcccacagagccttctggagcagcctgtctgcgggaagccccctccgctggatctggtgaaacccaggggcgctttcttcattcccacccttccatctccttgtgttttctgtgtggcttttctgaagatcacaccagtgcttactgttttccagccgcacaatggttgtcttttcactgcagcgttcagcgcacccgtgttgagggggtttctgatgtggtgggtgtaagtccccgtggccgggtggggcgcttcgtccaccactgctccctctcgtgtgcgcttcctcgcacttccctgatcggctgatcagtctgcagcatttgtcgtctttctacaagtttgaaattagaaagtgatgcacttatctgagtccaaaattaacttccttgccctcctccccagatggcaggtcctggggatctgcacccctgtaactgctgccaccgccgttctgattcgcacatgctctgccccctgccctgactgccctgcgcagctggcgtttggacctgggctctgctaccctcccagcgctcccctccccagggcacatgtcctctcccgcggctcagcccagatccatgcctggtgggcgggtggtggaaagctcggtgctggttttttcctgcccccttctggagcactgtctccagctggcatggaactgggtgcctgtcgtttcttctcagtaccggaacctgctctcagcaccgggacctgcccagccctgtcttctggcttctgccccagctcacgaggctggtatctgtccgagtgccaggactcagggcgcagtgtccagcagccctttcctcgtgcctgtgcatcggccacactgtgtccagggtttccagggagcaggggatccggtccctacccaccttgtccccagaatcggaagcacggtgctctcacagtgctcttaacaaagcaccttttgtcactgtgttgccctgcgttgtgacagtctgacattttcctgtaatttatctgtgttatttcagccaa

SEQ ID NO: 13150 - DNA, 2300 bp, Homo sapien
ctcgggttcacagtgctcagaggggaggagaggggaggaggtgaagacacctggcagggaagcagggcctccatggatggggtgcattcacggcagggaggtgagtggcagaacggccagggtccggttgctctgctgggatggagcgggcccctggagagtgagatctggtgagagttcgaggtttgccttggtagcagtggagagcgtgagagcgggagctctctgagaagctgggaccgaggtccagctcccaggccagcagcgtatagcttgcctcaaagcatctgcacaaccttcaagctgatgtctgtttttgcagtccagcagtcagggtcagtaactcacataagggagtgtctgacaaggtttaagtggcattcccaaggttgcggagttcactcaagtcctcacatatgtggtctgataagacatcacactcttgcaggggggtcaggtcaccccaaaacatcagactatgtaagtgctgtgaatcacttcaaagctacacagcaggtcccagggcccaaggcagaggagtgagtccacctcggaaggctcagagcagctccaggcagtaaccacggcatttccagagtctggtgtgtgagcctaacagctctggtgtgaccgtccgtactcacctagcagcacgtgacatcagctctccccctgaagtcattgctcagctcgggtgctgcaggaagacatacaggtctgtcttgggccagccccttgcctgctgtgggctgctccctgtgtgtggccttcaccccggtgtagagagatgggctggtcacacccctgcccctcacagcggcgagaggacagaggcatgtgccgggctgtctgtggagctcccaggccagtgtctgggatgcggcaggtgcttggtgttaaagggaaaatattccaggatatctgtgaaagcacgttaggcagagaccaggctttcattcagaacctttgagagatgtgggaaccaccacactgcggtcttgcagtgggagagaggctgggctcagctctgaacaggccatgggctggtggcggcttacagctccagagctgggcaggggcagaggatggaaggttgctaagaggaacccccaggggcgaaggggatgcaggttcaactgacctgccagatcaggccgcccgggggacagtggaagatgaggcgcctaatcagctgtcaagggtgatgggacacgggaggaggtcgtcactaaacagactttgagccaggcctgttaaaccaagttctcagcaggatgtgcacagagggcccaggaggagcctcaggagccggactgccgttggccaaccggtgagtctgttatccgtcagtggacactctgcttccaggtgccttggcctcggcccgcgtcctgaaggcgggagacgttgcagccacgtgctggccttcccggtgctcctgccagcgtcccgctgcttgacacagtccaagttttgtatccagacccagcctgggacagcagcctcccgacagcccccaggcccagcctgtctgtgacagtcacgcctgctcagggaaccatccctccgtgcagatctgggctgtgttttgggtggtacctcgggtgtggggtcccctaccaggtgcgaggttcatactccccaggctgcctcctgtcctcagggcttggagagtcccatgttctgaaaatgacctcttttcgagccgggcaaggccgcatctcctttggcagtgtagtgtcttccctggaggtggcattcctttttgatttgccttctgtgcttgggaacctcacttcctcactctggccagctctgccagcagtttggagctggttcagcgccccaccgccctgccttggcctgcgcccggccctccagggtggcttctcgccagttcctgtcaggcctgcctgggcaaccaggcctgggcacctccctgtcccttgctcagaaaacccacaggctgtgggggcccgggagccaagcctggtgcgcgggcaggaaacgcatcctggagcaccagcttccctgccctgcccgcctcacggggtgcctgggggcgtgcctcagcctgctgctcctgtagtctgttcctgtctccctgagcaggctgaacatgggcatacgagtgaccagcgtgatcgtgtccaggccagtgccgcattctgtgtggtccaagggaaaaccttctccaagtccacggcccgccctttcctctgctgggttacggccaagggcgccaggcctcactggaggacatggatcctggacccggccctcgaggctgctgccttcca

SEQ ID NO: 13151 - DNA, 2300 bp, Homo sapien
ttgaagtgattcacagcacttacatagtctgatgttttggggtgacctgacccccctgcaagagtgtgatgtcttatcagaccacatatgtgaggacttgagtgaactccgcaaccttgggaatgccacttaaaccttgtcagacactcccttatgtgagttactgaccctgactgctggactgcaaaaacagacatcagcttgaaggttgtgcagatgctttgaggcaagctatacgctgctggcctgggagctggacctcggtcccagcttctcagagagctcccgctctcacgctctccactgctaccaaggcaaacctcgaactctcaccagatctcactctccaggggcccgctccatcccagcagagcaaccggaccctggccgttctgccactcacctccctgccgtgaatgcaccccatccatggaggccctgcttccctgccaggtgtcttcacctcctcccctctcctcccctctgagcactgtgaacccgagaacaaatcttctttgacaataaaccgtgtgattcgtggaatcatactttgatcatctccttatttcctccacacacaaggacccctgcactgccaatggccccaggagagggcagagtcagccacagggaccccacctcacaggcttcaacactgctgatgcctgtcatcccagcaccgtgggaggccaaggcggccaaggtcgcctgagcccaggagttcaagaccagcctgggcaacacagcaagacctactctctaccgaaaaaaaaaaaaaaaaagaaaaatagctggccagtgtagtggcgcttgcggtcccagctacttgagagcctgggaggtcgaggttgtgcctagctgtgaagacgccactgcactccaccccggatgacagagccagactgtctcaaaaaaaacaataaaaattcacgccttgtaataaggaattaaaggcaggatgaacaaacattttcttcttttttttgtgtgctttctgagatggagtctttttctgtagcccaggctggagtgcagtaatgtgatctcggctcactgcaacctccgcctcccgggtcctggttcaaacaattctcctgcctcagcctcccaagcagctgggattacaggcacgtgccaccacacccagctaatttttgtatttttagtagagacggggtttcaccatgttggccaggctggtcttgaactcctgacctcgtgatccgcccgcctcggcctcccaaagtgctcggattacaggcgtgagccaccgcgcccggcctaaaggattttctttccaaatcaaagtattaaaataactgttcagacctctcccacttcgatgcgaagccagcgcggtcccaggcggacgagcgaaggcatcgaaggccgggggcgcagccgcgggcccacctcggcctcccctgagcggacgcctccccgcgcgcaccgggggccccggagaccgccttccccgctccgaacgcacgcggcccggccccggcgaggtgcctgaacgctacccgagctgcggcggggctcccggggtgagtgctgcagccccaggcccgcctgctcccacaggctcgggcaatggagacccgcggccgcccccgccccttgaccctgcctcacccctcacgcccgctgccgcccacgacctccgaccccgctgccgcccggctcgcagcccggctcgcagcccggctcggcgggcctcacctcccgcgggttccgcactcctcttcccgccgtcctgctcctctcggccttctcctccaataggcgcctagcaccctgagtgggctacaccaatcagagacgaagcggcgctaacgtgactgactaactaaccaatccaaagtctcaatctccctgagaggggcggagcgtacccgggccagccctcgccgccgattggtgatcgacctcagggttgcaggggcggtgcccttacacggattggagagggcagcgatggggcggagttcaagctccgattagtccgcgctccgtggcgggcttggcgattggacgccggcgctgtcagccgcgcgcggaccggggcggggcgggcggtgccccgggctgggcgaggggccgggtgcggggccgctggccgagaggctgaggcggcgtcatgtcctccgaggtgtccgcgcgccgcgacgccaagaagctggtgcgctccccgagcggcctgcgcatggtgcccgaacaccgcgccttcggaagcccgttcggcctggaggagccgcagtgggtcccggacaaggaggtgggtggccgtcgccccggcc

SEQ ID NO: 13152 - DNA, 2300 bp, Homo sapien
tgctaaacaattcagctgataccagaagggctctggaagagagaatgaaggaggggaacacagtggttcactataaaacagaaccgtaagatcagtgcatgtgtacagcagggagaaagaaattgtgctttggtggaaacctctgcctcatcttggccacactttctcacgtgctccttacggttcatacagacgtagagtatttctgtgctattaagagttcgttacaccataaatacaattttcacgtgtcaacttaaaagtaaattttaaaaaagatgaaggaggatgattggcggaaagtgtctaaaaagactcctcatggtggcgatactggggagaggtgggcagcactggtctcaactctccaggacacgctcagtgaccggtgatggctccgtacactgtagatgccagagacacttccccagagtcactcgaattccgtcctgtccccgaggctctgtggccgctcaccccccaccaggcctccaaccaagcttcaatgaacccagtcaattagtgctactttgacttcttgaacctagttccaacgtctgcttagttctatcactgagggaattaaacgaatctgtaacacgtgttaagtatgaaagtcatattacaaaaattctttttctcccccaattttttttttatcgtggtaaaatccacagaacagaaactggacacacctgttagcgcacagccagtgggattaaatgcactcggggccttcccagttggccaaggggctggtgtgaggcaaaggcacctccgatcaggtcacagggaaccccacgggaggcccagcggatggcctggctcagggaccccacgcccacgccccaatgtctgcaggagtggcctgggcaactcctgccgtgtctgggcccatgggaaacgggtgcaaatctgcggtctccttcaaactgtccagtgggcgactgcgacctcgcttccgaggtggagggtggtatagacgaagggaaacggggggcagcctggcccgcagactgggtcctggccctccttccgagcaggaggtggcttcggaaccggccacccgcccgcggcaccgacgcctcccccggttcccgggagggacccctgcggggccgccagctccagcgcttccgcggacagcacgcgccctccccaccgagcctgcgaggaaggcgctccgccttccactttctcgggagcgagccccagctctcgggacgcagtccacacgcgctagcccagcacgaaccggcctcgggcagggccgcacccacccccgggaccagcccgcgccccgcaccccgcctcccggcgcccgccctggacaggtgcctcctgccctcccgggacccccgcaccgggacaccgcgcgcctcccgccctccccgcgggcgtaggagcctgaggcggcggcccggggacgcggccaacctgggagagagcgggggcgggggccggctggggaaggggccgcccggaggcggaggggtcgtcgcgggagcctggaagcccgcggggccgggccggggcggcggggcgggtcggaggcgctggccggggcgacggccacccacctccttgtccgggacccactgcggctcctccaggccgaacgggcttccgaaggcgcggtgttcgggcaccatgcgcaggccgctcggggagcgcaccagcttcttggcgtcgcggcgcgcggacacctcggaggacatgacgccgcctcagcctctcggccagcggccccgcacccggcccctcgcccagcccggggcaccgcccgccccgccccggtccgcgcgcggctgacagcgccggcgtccaatcgccaagcccgccacggagcgcggactaatcggagcttgaactccgccccatcgctgccctctccaatccgtgtaagggcaccgcccctgcaaccctgaggtcgatcaccaatcggcggcgagggctggcccgggtacgctccgcccctctcagggagattgagactttggattggttagttagtcagtcacgttagcgccgcttcgtctctgattggtgtagcccactcagggtgctaggcgcctattggaggagaaggccgagaggagcaggacggcgggaagaggagtgcggaacccgcgggaggtgaggcccgccgagccgggctgcgagccgggctgcgagccgggcggcagcggggtcggaggtcgtgggcggcagcgggcgtgaggggtgaggcagggtcaaggggcgggggcggccgcgggtctccattgcccgagcctgtgggagcaggcgggcctggggct

SEQ ID NO: 13153 - DNA, 2300 bp, Homo sapien
tccggcttgctgttctaagtggaggcggcaggcacagctgggacccacgcccctcagaagcaggctctgtggtggtcggagcaggcacctcaccaggccacgctccatttggggctgctgagaagctggctgtggccagtcctgaggtctctgcagccctcgggagcttggaggcccggctggtttttctaaggagttggccgggtggccatggctgcccacagtggggtgtgaccttgggcttgtggcctcctcagtgagggcctcctggcaggggctgagagcccagcgtcagtggggggcttcagcatagaccaccacatgtgtgtctctgggtgcttggtaaatgcaccctgtgcttcggtgacaagtttttttgtctagtcaagtgaagcagtggaaatgcagggagcatcttaaatctgttttatttctaactgatttcaattccacctttacccttaggccgaccaagcatctgaggtgccgggacagtaccaccttgccatggggcttcaggcctgctgtgaccccttggggaaagtgagccccatggccacctgcccagttcccaggtcttgtgctgtcagaattcctggtgggccctgagcccagtcaccttcctgtttctgtctacctttgtacattctgtgtgcatagaacactcttggccaacaaagtccagccttgtgagccctggcttgtgagtcttacagcttctctgtgcctgggtcctccagctgaggaagcatcttcagggcgtccccaggcctggcgcccgcccccgtggcacacaccggcctgcgtgtgcttcagctgcttccaggggttccctcacaggcgggggtcagggcacgcacgccaggactccaagtaaactagaataataagctttatgtctcagatacctgggcttttgccggctggcgcgcagccccagaatcagcacctccccatgctcgcctcgtttgtgaagtgggtgctagcacagccttccctggtttaggggtttaggttggctcttgctgtggatttcctagtcccttcgtggcgttgctctttggttccagtaacaggaccagggctaaaaaggcgttgttaaggtgaactgctgttgggtccagtgtggagggacctgaagtgccaggatgcatgctctgctgcgagacagtcaaaccccaagcccacctcaggccccatggttacgctgggtgcatctcccgcaggcctgggagcagcctgcaccccaccgcattggctctggagcctgggcacaggcggccagtccaccgtcctgcgtcacaaccctgcctgcctcaggctgcttgggtgcgtggggaggtggcagggcccagctttctcagcagcccgtggtcgtgccccagcgacgtggtgagtgaccaagctgcgttttaacgctttgtcgtgtctttcctagtgtcggagatgtatgcagtgtgacgccaagtttgactttctcaccagaaaggtgagctgaggccgctgagtgggggtggtgggaagaggggaggggccccaacaggacagctgccgctgccccttctggcaggggacggatgtcatcttatggctcgttttttttttttttgagacggagtttcgctcttgtcgcccaggctggagtgcagtggctccatctcggctcactgcaacctctgcctctcaggttcaagtgattctcctgcctcagcctcctgagtagctgggattacaggggcttgccaccacgcctggctaatatttatatttttagtagagatggggtttcaccatgttggccaggctggtctcgaactcctgacctcaaatgatcctcccacctcggcctcccaaagtgctgggattacaagtgtgagccaccacacccagccgttatggctcattttgagtgtcagccatgccctgtttccgtggaaagtgactgtgctgattctgccggacgctatggggtgggggtgcagcttgcgaggcctgtgcacccacctgccccccgccccctctgccccctccgccccgtccccgtgccgctttgccctcgtgaagtgtcttgcccctaatgtgtgcccagctcatggcgccccgaggcgcgagggcgtcctaagcagtgggacttgggtagttgaaagaaagctgaaaaacagccattttgatccatgattttgaaaaaagggcctcatttcccaggtgaggcggatccccgctgcgtggtggggagcccaggggctggcgacaggaggtgcgcgtgtgcagcggccggcacaggggcctcgcgtttaggc

SEQ ID NO: 13154 - DNA, 2300 bp, Homo sapien
gggcgtgtatttactcagtggctttagaactcgccaggtgagtggagacttaaactgtaagacaacaaagggacatttgcctcagcatgtcataatgatttcctctgctctaaatgctctaacgtatcattcggtttattgttggattcaaaccaaggataaagccccaaatgcaataactgagatccccaaaaaggtctgaatggtggctcatcgggagccagcacttcagccctcctcctgcaggcgtctgtgcagactaaacccctggtgcatttcctggtgagctttggcccatcctgggcctctccactaaactctgctgacggggagctcgcatcccgttatctgcaaactgtgctgacagatgcgtgtgccgtaacccatgttgctttccttccgttctctcaccggctcttggttgctccttctcgccactgcctgcccaccttcttgccatagaaaaagacattcacgcttacaccagcctccgggggagccagcctgcctctgaaggtcagcctcttcctcctcaccggggctccccgcatgcagcgggcccgttcctcccctcgccacctggcttctgtccacggggtggtccatgccaaggttctttgtgaaacctgaattcacttactttggttgacttaagagagatgttggatctgataagtgggtttataaagcataaatgaagataccgcagcagatgtactttctcagttctgtctcagcgggagggttacccagcaattgacagctctctgtcagtacctgccagccctgaacaggctgaggccagggggcgtgggggctcacctgcccttgggagcctctgccaacactgcccttccccccgaggcctgctgctccccagctcagtgtggcctcctgggacccctgactctcctggcacttctgtcagcctcctggatggtgaggtgagatgcccaggccagtgttctgtcctgagctcagggatgtgtgtggagccgggatggcatcaagctggttgccttgagcaggctgcaaggtatagatgcccaggtgcaaagggtagggtctggagaagcgggggtcaccccaggcacccctctctgcctgcctcctcctggggagcctgaggctcagatgaaggccagtgtttaggggcatcagatgaaggccagtgcctcaggaggccagggcaacacagcctcccggactgctctcccgggcagaccctccccagggcttctggcactgtgtcccccttgtggtggcttggggggtgcagtgagccccgctctgcccagtctcagtagagcccttcagaccccagcaccctgtcttccggtgggggtggggacaataggaacagtcccctgacctgaaggcagccaaggggccgcctgccagcctgggccctgtagggcaggccacacactcattctttcaaggccagatagtaaacctttgccagccacgtgtgctgtggtgaaggcggaggcggctgcagaagacagggtgacagacggccatggctatgatccagtggtgctttatcaggcaaatgcaggcggtaggcagagccatggtcgccctgctctagagcctaggcaggacgttacactgacaggcaaggttccccagtgttgggggtgggggtgcgtgccctaaccacagaaccgggcttatgaaagtgtggttctagaggcccggcatggtggcccacgcctgtaaccccagcactttgggagactgaggcgggcagatcacctgaggtcaggagttcgagaccagcctgggcaacatggtgaaaccctgtctgtactaaaaatacaaaaattagctgggtgtggtggtgggtgcctgtagtcccagctactcgggaggctgaggcaggagaatcgcttgaacccaggaggcggaggttgcagtgagctgagatggcaccactgcactccagcctgggcaacagagactcaaaaaataattaaaataaagccaggcacggtggctcatgcctataatcctagcactttgggaggttaaggcgggcagatcacctgaggttgggagttcgaaaccagcctgaccatcatggagaaaccccgtctctactaacaatacaaaaaaaaaaaaaaatagctgggcgtagaggtacacgcctgtaatcccagctactcaggaggctgaggcaggagaatcacttgaacccgggaggcggagggtgcagagccgagatcgcaccactgctctctagcctgggcaacaagagcaaagactccgtctcggaaaaaaaaaatgtggttccg

SEQ ID NO: 13155 - DNA, 2300 bp, Homo sapien
aagagcaggtccctccagcacctcttccccctgccagccaccctcctgccacctccacggtgggtgtcattgctagaccaaagcctggccttcctggtcattcatgcaaccaggacctctggggtccttcccttggtcaggctgtgctgggagcagtgggaaccagggatgtccctgagttacgtcttgtagggaggacggacagtcacacagacaaatggggcatgaaaaggcatgacaaatggggctcggccacacaaatgcacaatgtggccaagcctttcccagacagctggtcagggagctccagaggctttcctgaggaaggggagctgtcgctggcacctgaaggtcctgtagagagacgagggaagaagcatctagacaaaggccctgggtgggaggtcagtgttgacggagcagagagggagccaggcgccatctcagggaaccctcagtgggattctctccactaggatctggtgccatagcaggaagaaccctgtcgcatgtgggcaggaacgagctgctggctcccatcagctacttggcagtcacacgccaccctccctcccacagagtcttccgaggagtggccagaagctcaaacacagccgtgtccctctgtgcgtgagccagggactcaggcctcagacagggctctcccttgtagtgagcagagtggccctggcccttatttgaggtggtcacctgggcgctgctactgctaccactccagggctgcttcgcggagccactgtctttgggctttagctcccaccactccttcccagcaggcgtgggttcttagacttcagtggaccacctttaactggaaagcgtgcttccttcccaacagaacaagcggaccaacttgaagaagcccaactcggagcggacggggcacgggctgagagtccggtttaaccccctggcactgctcctagacgcgtctctggaaggagagttcgatctggtgcagaggatcatctatgaggtgagctgcagccggggaccagtgcacgctgctgggggcgaggggatgggcgctcacaggccgtgtgtcctaggtggaagatcccagcaagcccaacgacgaagggatcaccccactgcacaacgccgtctgcgccggccaccatcacatcgtgaagttcctgctggattttggtgtcaacgtgaatgctgctgatagtgatggatggtgaggcccgtaggagtgtggggtggacagatttactttccctgctttgcataaggaaaacaggcgtgttctagacaattaggaagcacggaagagagaattagagcaagaacacccatcatttcatccttgaaagacagctgttgccagggtttccttgcctttttttccagccttttctcttgatgattttgttaaaaacgtggctgtggttatgctctttctgtgcctcgtcattaacattgcagtctaagcattctgtgaatcattccatcttccccttctcatatgttccgtatggactcttcacactctgtgctccgtgtgaaaagcagcctcagcatccccctgggtcaggcatgtaggttgtcgcattgttcattccgtttgccttcgggagctctgctgctgggcgaggcgtgttggtctcctgtgggggttattttgaactttcagacagctgacattgtgctgcatttgaatcgtggtaaaatacacataacataaaatttcacatcttagctatttttaaatgtgtgtttcagtgtgttatgtacattcacatcaccatgcagtgtggcgtgaacatctgtggattggccatttcttaacccattccctgtgcccccttttcaaaatgtatgtatggtctgaaacaattggctcatggaaatcctgcctttaaagaaacaacactgagacttgatggcacaaaggtgaacgccttccgcgagattccttagagggaaatctctgagggccacgtcctacaggacaggcagtgccaggcctgcaccttcacccacgctctattccaggacgccgctgcactgcgctgcctcttgtaacagcgttcacctctgcaaacagctggtggagagtggtgccgccatttttgcctcaaccataagcgacattgaaactgctgcagacaagtgtgaggagatggaggaaggctacatccagtgctcccagtttctatatggtacgcaggggaggcctggggccacagtggtgctgtctgctgtggtactgccatggcaacagtcagccggtgccagagaagcttcagcacagctttctgtttgtttttttt

SEQ ID NO: 13156 - DNA, 2300 bp, Homo sapien
ctgatccatgggccgggtgcagtggctcacgcctgtaatcccagcactttgggaggccaaggcgggtggatcacctgaggtcaggagttcaagaccagcctggccaacatggtgaaaccctgtctttactaaaactacgaaaattagccgggcgtggtggcgtgcacctgtaatcccagctactcaggaggctgaagcgggagaatcacttgaacctgggaggcggaggttgcagtgagatcgtgccactgtgcttcagcctgggcaacaagagtgaaacttcatctcaaaaaaaacaaaacaaaacaaaacaaaaaaaactgacccacgagtgtcctctcttactgcaggtttatttactctgaggacactgaggcccggcatggatgcctcaccacaactcggctacagccagccaagtggaggggctgcccctacaaacagcgctctgtcctcattgatcaaagtccacacatcgttggtttggtcttgacctcacaatggtgctgtgtgatggacttggacctctagtgtagtccatgggtggtgcccctgccaagcagagggcaagctgttcatggagagtctgtttctcaaccagtgcattaaaagtgttggggcttccttgcaataagactttctttatgactgaggttgacacatttccctgaaacacacagcatcaggaatccctgtcctgatgtattgaaacattccttcgtttatgaaaacagtactgttactctctggccatcaggcctgtgtttcgagcccctttttcgggattgtggtggatttgtgctcatctttgtttgcttcattttctcttgcctggcccccaggagggacagcgacacatctgttgcccccactggggagcttgggtcttgttatgaactccgaaagagaagagcatcaccagcacttgtgagccacaagcccccactcagatcccttacggccgtgtctcagcagccacataaagtgtggggttggcatgaacccctaactgcaggttgctctgctaagctgttatttatagtttgaaccaccctgtggtaggagtagatatttgtctgtttccagtgggaggtaattagcacagccagctacttctctgctgacttcctttgagaaactccccaaggtgagaaatgtctcctgtgtcccgtccttgttggtgtctgctgtgctgcctcaaggggttgcagcaaggagatgccttcacgaagccctggtcctagcctctgctgtggatgaaagtcatggacacggggaacctgtgctcaccttcagagtcggggcagcagctcagcccagaggtggagctgggctgtgaagcctcctggcagggactctaatcccttgctgttggctgtcctggttctgtgtcacacagatggccacagtaaacccagagtgaccagctcatggacagtgtcagacctcgacgtcgggcctaattatggctcctcgcggccctctgcaagcccatttgtaaaccgtatgttggctgacaagcttagtgggaagctgcgtcctctttaatatgtacaaaatcacctgtcacttgtttttccaaactgacaaaggtctgctcatcacatctagatttgaaaaagatgccacacaaacgtaatttgtccctttcttcaacagacaggtatggagtctgggtggggccacgtgtaccctcccatccttagaaagagtgtgacaccaagggacagatgctggcgtagcgcgggttttgttttggagggttttttgtttgtttttacaaaattaagatatttctgagtttattatgaggcttttagttttacaatcatactaaaagataattgttcctctataaaatgattttccttctgtacctcttgccttcttctgaagaaaggagaaaattgctttttagtccccactatggctgatttccataaaacttcctgttgttgctgggtggtttctgaagcacctggacagccacattccctgtgaccctgagaccacaggccctgtccttggggaggctgcaggtttctggccacacatcctccaggccacgtggagcaagatggcagttggtccaggggccttggaatgcctcgccaggacccacggggcttgactagagctgtctcagaagccgctgcctggagcctgcatcataacttcacagcccagcagtgtatgcagctggggttgcggtgcggctgcatcgggtcagtttggcttaggagcaagccgtgtgaggctgcggctgatgggccctgtgttgcccaggcgctcagagcgca

SEQ ID NO: 13157 - DNA, 2300 bp, Homo sapien
ctcgtggtaggagaatggagcacccactctcctgacccaccagcaaggactcccttcccacatctcccttctgcatatagtttggtgacagaatagtgtcctcttgttagcctctactgctctgaaagatgctctgaggaggcagcatgggcttgaaggcctttgcctagggggagtgggtgtggagggtggtagacgtagaagggagcttccagttctgtggatgtcacagtctctcatttacaaatctgcccttcttttaaaaaaacaacacagtgagtttaaagatcagtagtttatttgtacaactttatgatttcagatgttggttttcctttttctcaagattaacaacaaagaggccatgtgagagagaggctgcaagcactttccctgtgcttacatatgctcctcagtaatggcgtagtagtcagggcttcctagagaaagagaaccagtagcgtgcgcgtgcacgtgtgtgtgtgtgtgtgtgtgtgtgtgtgtgtgtgtgtgtgtgtgtgtatgtgatttaaggaattggctcacatgattgtggacgttggcaagtccagaatctgtgagggcggccggcagcgtggaggcccagggaggatgttgcagctggagtccgaaggccaactctaggcaggatcccgctttctcagggcgtctctctgtttctcttaaggcattccactgattggatggggcccacccaccttctagagggtcatctgcttcactcaaatctaccaatttgaaagttaatctcttccagattggagactattattctaagtgaagtaactcaggaatggaaaaccaaacattgtatgttctcactcataagtgggagctaagctatgaggatgcaaaggcataacaatgacacagttgactttggggactcggggaaagggtgggaagggagtgagggataaaagactacaaattgtgtgcagtgtgcactgctagagtgcactaaatctcacaaatcaccactaaataacttactcatgtaaccaaacaccacctgtttcccaaaaacctatggaaattaaaaaaaaaaagttaatctcatctggaaaataccttttcagcaacatgtcgtctggtatttggccaaatatctggttactgtgacctagtcaaggtgatgtgtaaagttatccatcacaaacagctagattcattccacctacacttcaagggatcgccttgaagaagtcagtatttttgcagagatgcgtctccacccaaaggtcctaggtacctttgagcaattgtgaaagccataacccctcaccccgaaatgacctgtcctcatgcatatagaatcttacaatcacaggggttatggatcctatttagagcctatattgaaatcttgaggacgtcagtagttctctagaatccctgttccaggcgcctctgttcctgagcagtgttatgtgaacagtgtcctctgtctgtggctctgtgtcctggctgagaaaggcagcgctgccttcagggaactgggcccattgctgggagtcagagccttacgtgctcactgtgccccacgtggcttagacagtaccggctacagcccttatcccgactccacgggtgtgagcacagaggctgagtcacctgcccgaagcagcacagcgagtaagtcacagaggggatttgaagccaggctcagagcccaggatttgaccagtgtctctgtgcccactcaagggaggaagagtatcctgagtaagagggaagctgcatgtggatcacggggaagttgctctgccctcacatcagctcctcatgtgtacagctccagatgggtgggtgttgtcggagaattgctcataggaagctacagttccttctccacagtctccccttctagatgctgatctttccagatgacaggcttcctaaaaaccaaccactgagtgagtgctttctgtccgagctggcagtctcttgcactaagcttaggacttctttgaatgtaggagaatcttgactctcatttcttcccaatttgtagctgaaccgtgtgaatggcacgtcatcaccacagtcccctctgagcacatcgggcagggtcgctgctgtggggccttatatccaggttcccagtgccggaagctttcctgtgctgggggaccctataaagccccagtctctcagtattgcctcaaatgctgctcatggaagatccaaatccggtgagtggtcctggccctcttcctgggggagagtttgtgagcagggaatggggcctgcggtggaggggcggggggtggggcagg

SEQ ID NO: 13158 - DNA, 2300 bp, Homo sapien
tatggaaaatgtaagccaagtttcttagcaggatatttataattaaacattatacaacgacgaagccagccaaaatttttctagatatccttcaatgccaccacagtatgaatgcatcaatcaactattacaggatttaactaaaactactttcaaaattctgaaacaccataatgcctttcatcaaaatctagctagtgagaattagggagggaagtttccaaatgccttatcttataaagttagaaattgaaaattcaaagccatattaagaataataaatatttgtatgacattctgttcaaccatcacttttggatacatcatcctatttgatcctcaggacagcgctcagatattggtacatttttatccctactttagaggtaattccaggctcaaagaccttgacttcttcaaggtcacatagctaaaaagtggaagaaccagcgtttcaccccagatcttctgatgctcatccaattctctttccattacaagacaattattcatttaaaaccaaatgtttagaaacccaacaagtctgatgctaaagaaagacctaaggatcaagtagatcaaaccttaagacttggaaaacgctgaaagccggctacaaaacatgctggaatccgttaaaaacggggagaagagattatcaagagaaaggaaatcaaagaggaagaagggggatctaatctaaatgtccttgggtgcagcatagcagaatggcaatattcaagtagagaatgcagggaaactgcactttcctgtgaaatgtgattttcaacgtagtattgtaggttaaaaaaatgactgtgttactttactataaacgtgtttgagaattttacttacgatataggcgctcagaaaaccaatacctctccaactgggtacaaccagtcccacattttttcataagtcatgatgcttacctcccaaaaagccaatttttaaaaatcagaattcagcatcccctcctattcagattataggtaaagggaagggtcggtaggacgatggcaaatctaatggccaatgtctttctaggcgaaagcatccttaagggcaggacaaagacaccaccactacaaacgaacctcgttcaaccttcagaacacggagaacaaaccagttaaagcaaaacgaaccaacattgcagatacgggaaaagggaattcctaagatggctctccaaatccgtgcactcggcacctttcctcagtacaaccgcgaaggctacgggaatgcgcctgcagagtgtgggaactccgggcgcgggtgcccaccccgccgactcccagggcgaccccagaacgttcgtttcaggcgggtcacagctgcgccacccaccagacctgtgccccagcgtccgaccgcgcacctgagaggaccgaggagatgaccggccccaaatgcatctgcttctccccgcggccgcggaggccgagcaggaagggcccgcaggcggccccggccccgcgctgacagcccggcgccgcccccacctgcccgcctggggggcgccgcggccgggcgcgcccgcccagccacttccttccccgcccgcccggcctcgcaccggcccgcgggggctgggagccgcgggaggaaggaggtttggccagcggcccgcggaggaagccgccgccacctcccgcccgccctcacccaccggcatcatcgcggggagagtccgcgacgccctcggccgccgcctgacaggacgctccgcgccgagctgtgcccaccgctccggccgcctcctaaggccgcgctcccgccgccgtgctctccggcccggccgcggcgaggcggcagctgcggcgggctgcggggctctcgctggccctgtcgcggccgccggcgcgctgcgtcgctgtcccgggcacccggccgccgccgccgccgcctcaacctcagcctcagcctcagccccagcccgacagcctgcggcccgcccgcccggctcgctcttcagcccccgcaggccccgcccccagcgcgacgccccgcacgggtcccgtagccccctctgattggcccggtgggagcgggggcggggagaggggcggggcttcccggctccgcccgctaccctcgctctcagcggcggccaggtgcgtgcgcgtccgcgctcccggcggcgggggaggggcggacgcgcagtgggcaccggtggcctcccccgcccttgcgtgagccccgactagggaagaccgcggacggtgggaggactgaggcccgacagggaagggccggcccgggtcccgcagcggatcacggcagggccggga

SEQ ID NO: 13159 - DNA, 2300 bp, Homo sapien
tccctcgcatccgaaaaagcctcttgacacgaggcaggcactattatccctacactctcccatcacagagacaagcacactacgatgcagagaagatgcggcttgtttaggatcccaggcgagggtgtggcggaggcggtgctgaaccaagtctgtctaactggaaagtccacactcgcaaacacgagcccccgtggcctctgagggacaggggtggctccccaggaatgggctggtgggagctccctggcctcctcccttgctctgcccccactctgcagcagccagaagcctctccgagaaccagacaggctccagactgaccctgacctcgcggcggccttctccactgggccggcgcttcccagggcggcttacgccttctgtgtctggggccatccgcagaccttgccttctgatgcccgtgggagttcggtgctgccgcggggagcacctcagtccccctgtctgctctccgccgcggtccgggcgaatggcaccatgtggggggccccgagcgggtgcctacccccctggcagcctttactgagggtctgctcagggccctgcccagggctctgtcactccggcgctcaggcccgagggggcggcgcctctggagacgggactgcagggagagacccaggccctggagacgaggaccggaccctccccggggacgctggagctggacctcgagggatgctggcgcaggtgggcacaggtggcacaggtgggcgcggggttctaggcgggagatcgctcgggcgaaggccaaggctcgggagctggtgcggggggcgcggccccgagagccgcggaagacgccggtgggggagaagcaggtgccagccaagggcgtcgggccggggctggttccgagcgcgcggcctcgggtcacatgctcgctccgggggccccccgcgcccctcccactggcctctgggccgcagccccacggcgcgccggcagccgggggtcaggccgcggtcagagtgcgggcgcgcgccgtcgccgcagggacgctcccggcccacagtcggcccccgggagcccgggttcgagtcccggccctgccgtgatccgctgcgggacccgggccggcccttccctgtcgggcctcagtcctcccaccgtccgcggtcttccctagtcggggctcacgcaagggcgggggaggccaccggtgcccactgcgcgtccgcccctcccccgccgccgggagcgcggacgcgcacgcacctggccgccgctgagagcgagggtagcgggcggagccgggaagccccgcccctctccccgcccccgctcccaccgggccaatcagagggggctacgggacccgtgcggggcgtcgcgctgggggcggggcctgcgggggctgaagagcgagccgggcgggcgggccgcaggctgtcgggctggggctgaggctgaggctgaggttgaggcggcggcggcggcggccgggtgcccgggacagcgacgcagcgcgccggcggccgcgacagggccagcgagagccccgcagcccgccgcagctgccgcctcgccgcggccgggccggagagcacggcggcgggagcgcggccttaggaggcggccggagcggtgggcacagctcggcgcggagcgtcctgtcaggcggcggccgagggcgtcgcggactctccccgcgatgatgccggtgggtgagggcgggcgggaggtggcggcggcttcctccgcgggccgctggccaaacctccttcctcccgcggctcccagcccccgcgggccggtgcgaggccgggcgggcggggaaggaagtggctgggcgggcgcgcccggccgcggcgccccccaggcgggcaggtgggggcggcgccgggctgtcagcgcggggccggggccgcctgcgggcccttcctgctcggcctccgcggccgcggggagaagcagatgcatttggggccggtcatctcctcggtcctctcaggtgcgcggtcggacgctggggcacaggtctggtgggtggcgcagctgtgacccgcctgaaacgaacgttctggggtcgccctgggagtcggcggggtgggcacccgcgcccggagttcccacactctgcaggcgcattcccgtagccttcgcggttgtactgaggaaaggtgccgagtgcacggatttggagagccatcttaggaattcccttttcccgtatctgcaatgttggttcgttttgctttaactggtttgttctccgtgttctgaaggttgaacgaggttcgtttgtagtggtggtgtctttgtcctgcccttaa

SEQ ID NO: 13160 - DNA, 2300 bp, Homo sapien
aggtgggaggtgatgggccgatgcctggaggtggcaggctgggtggagaggaggatggggaccagcgggaaggacttgagggggagctgaccagcctgcctcaaatggacccttacctggaggatataggatgctttggtgtgaggcacggtagctgccactgtctgtgcccacaggtcctgcaggcaagaggggagcccttgtgccaatgcttcccttcctggaagagcaggctcatttggatcaccttaccccggggggcacctctctgaagagccttggcaaaacctgtcctttgtcaggcttcgtgggccagaagtaccccttcgtgactcagggacatcagctgtcaaagctggggaaaccaaggcccagagaaggagtgcaagttgcctaaggccccacaggaggtcagaagcagagcagctagaattagaacttaagtatgtctctgactttcagcctaggatcactcattatctagagcctcctcttctctccaaactctgctcccagaagaggggtgtcattagccattcatgcccaggtgtggataggtttaaaaatcccagggacgtctgtacactaagcctccttgctaatcacggcccaactacagaatgctatttatggaacagctaccacgtgccacaaattgtgctgggcgctttccatccctcgcatccgaaaaagcctcttgacacgaggcaggcactattatccctacactctcccatcacagagacaagcacactacgatgcagagaagatgcggcttgtttaggatcccaggcgagggtgtggcggaggcggtgctgaaccaagtctgtctaactggaaagtccacactcgcaaacacgagcccccgtggcctctgagggacaggggtggctccccaggaatgggctggtgggagctccctggcctcctcccttgctctgcccccactctgcagcagccagaagcctctccgagaaccagacaggctccagactgaccctgacctcgcggcggccttctccactgggccggcgcttcccagggcggcttacgccttctgtgtctggggccatccgcagaccttgccttctgatgcccgtgggagttcggtgctgccgcggggagcacctcagtccccctgtctgctctccgccgcggtccgggcgaatggcaccatgtggggggccccgagcgggtgcctacccccctggcagcctttactgagggtctgctcagggccctgcccagggctctgtcactccggcgctcaggcccgagggggcggcgcctctggagacgggactgcagggagagacccaggccctggagacgaggaccggaccctccccggggacgctggagctggacctcgagggatgctggcgcaggtgggcacaggtggcacaggtgggcgcggggttctaggcgggagatcgctcgggcgaaggccaaggctcgggagctggtgcggggggcgcggccccgagagccgcggaagacgccggtgggggagaagcaggtgccagccaagggcgtcgggccggggctggttccgagcgcgcggcctcgggtcacatgctcgctccgggggccccccgcgcccctcccactggcctctgggccgcagccccacggcgcgccggcagccgggggtcaggccgcggtcagagtgcgggcgcgcgccgtcgccgcagggacgctcccggcccacagtcggcccccgggagcccgggttcgagtcccggccctgccgtgatccgctgcgggacccgggccggcccttccctgtcgggcctcagtcctcccaccgtccgcggtcttccctagtcggggctcacgcaagggcgggggaggccaccggtgcccactgcgcgtccgcccctcccccgccgccgggagcgcggacgcgcacgcacctggccgccgctgagagcgagggtagcgggcggagccgggaagccccgcccctctccccgcccccgctcccaccgggccaatcagagggggctacgggacccgtgcggggcgtcgcgctgggggcggggcctgcgggggctgaagagcgagccgggcgggcgggccgcaggctgtcgggctggggctgaggctgaggctgaggttgaggcggcggcggcggcggccgggtgcccgggacagcgacgcagcgcgccggcggccgcgacagggccagcgagagccccgcagcccgccgcagctgccgcctcgccgcggccgggccggagagcacggcggcgggagcgcggccttaggaggcggccggagcggtgggcacagctcgg

SEQ ID NO: 13161 - DNA, 2300 bp, Homo sapien
ttctttgagattttatctttatcttttctatggctttattgtgagatttcaaggtattgatttatttttatttatctgcctgcttggtttctgtaaggctttttgtttgttttttgttttttgtttttgtttttgagacggagtcttgctctgtttccctggctggagtgcagtggcgccatctctgctcactgcaagctccgcctcccgggctcacgccattctctcactcagcctccggagtagctgggactacaggcacccaccaccacacccagctaatttttttgtatttttggtagagacggggtttcaccgtgttagccaggatggtgtggtgatccgcccgccttggcctcctaaagtgctgggattacaggcgtaagccaccgcgcctggcctctgtaaggctttttgaatctttggcatgatttttttctcatcacttttggaaaattctcagccattagctcttcagatatttctgcctcacctctttaatttccttctaagataccaattacccatatgattggtatctttcctgctgtatccctcttattttctgaatggcttcttcgatcttgcagtttattctttaactgtctaatctgccaaatccatccaattttttgttttgtttgtttgagacagagtctcgctctgtcgcccaagctggaatacagtggcgccatctcagctcactgcagcctccacctccagggttcaagcgattctcctgcctcagcctcccaagtacctggaattacaggtgcgcaccaccaccacacccagctaatttttgtatttttagtagagaaggggtttcaccatgttagccaggctggtctcaaactcctgaactcaagcagtttgcctgctttggcctcccaaagtgctaagattacagattacaggcctcccaaagtgctgagccactgcgcccagcctccatccaatttttatttggcttttttttttttttttttttttttgagatggcgtttcactcttgtcgcccaggctggagtgcaaagatctcggctcactgcaacccctgccctccgggttcaagtgattctcctgccccagcttcctgagcagttgggattacaggcgcccaccaccaagcccggctaatttttgtatttttagtagagatggggtttcgccatgtcggccaggctggtcttgaactcctgacctcaggtgatccgctcgctaaatttttttcttttatgatttctagttctctactggaaaatatttctgaaaaaaaaaatatatatatatatatatatttttaagactattaagcccagtgtctggagcccctgtggaagttttatattatctgctgagaagaatatgcacagaatacagacataaaaatatgcagagcaggccgggcgcggtggctcaagcctgtaatcccagcactttgggaggctgaggcaggtggatcacctgaggtcaggagttcaagaccagcctggccaacatggtgaaaccccgtctttgctaaaaatacaaaaactagctgggcttggtgaccagcgcctgtaatcccagctattcaggaagctgaggcacgagaaccgcttgaacccgggaggcggaggttgcagtgagccgagatcgcgccactgcactgcagcgtgggcgacagagtgagactccgtctccaaatatatatattttatacatgcagagctaaataattaacaatagaaagggacaagacacaccactgaaatgggagacttgacttagtctttaacgtcacagtaaagagggtcccttttcttaggttaaccaaccctcccggtatgtctagaactttcctagtttcagcgttgaaggtcccgcgtcccaggaaacccatcagtcgtgggaagatgtggaggattagccagcccacagtgacacacgcgggcacacccctaacgcaccctctccccgccccttcttgcctgcgacaccaggcggccgccgggggcgctgtggtgcggaggcgccgctggggaggcactctggccttgcggcgtctctgctgcttccgccttcccggcatcccctgcgcgcgcctgcgcgctcggtgacctttccgagttggctgcagatttgtggtgcgttctgagccgtctgtcctgcgccaaggtgagtacggggacctggacctggctcccgaggtgcgagacggcgggggcgggagggcgagaagccgccttggccccagctgatcttggggttccacccctccgccggcacgcgcctgcttttctgcccggctttccctt

SEQ ID NO: 13162 - DNA, 2300 bp, Homo sapien
aagctggagaagaaggaaagttggtggtgaaattcagtctgaatttgaaggcctgggaaccagggtaactgatgctgtaactcccaatccaagacaaagcctgagaacctgggatgggagatggctggtgtgaatctcggagcctgagggtctgagaatcaggaactctagtgtcccagggcaggagagactggatgtcccagttcaaaaagagagtatttacccttccttatcctttttgttctgcccgggtggactctcagtggactcggtaatgcccatccatgttactgaggcaggtcttctttactcagcctactgattcaaatgctaacctcttcctgaaacaccctgacacagccagaaaaaatgttttaccagctatctgggcatcccttggcccagtcaagttgacataaaattaatcattacataaagtttgtctcaaatttcaagaatcagtatcatatagtctctttgacaacagtgcatttaaaccagacactgatgaggaaaacatagttgatagcatataatacatatcacaattgtcttttttcacttaatattctggacatgtttatctattggcatgaatagagccatgacactttcaaaatgatacacattaactaaggtatgccattgttttagcttgtcccctgttggacatgtttttcaggttttaattattacaaatattatgaaaatatacccttcctccctggaatccttaatagcgtcacccgattttaattttgtccacatctctaatcagcatcttacgtatctattatgtctccttcacaagaatggtagtttcatgtgggcaaggactttgttttgtttcctgctatatctttagtgttggagacagtgccttttgtgcagtaggtgttcagtaagtatttgctaaacaaatgaatgtttccatgcatgtctttgcacgtgcttcgtttacatgtgctgatgtttaacaaagattctgaggaaaagttggattgtaggagacgtgtgttttaagttttggttagtttttagtttttatttgatttattttttttgagatggaatgtggctctgttgcccaggctggagtgcagtggcaccatcttggctcactgcaacctccgcctcctgggtttaagtgattctgctaccttagcctctcgagtagctgggattacagggacctgccaccacacccagttaatttttgtatttttagtagagacagggtttcaccatgttggccaggctggtcttgaactcctgacctcaagtgatccgcccgccttggtctcccaaagtgctgggattacaggcgtgagccactgtgcctaggctgtttattttttttttgaaacagggtctcgctttgttgcctaggctggagtgcagtggcataatcttggctcactgcaacctccacttcctgactcaagggatcctccagccccagcctgctgagtagctgggaccacaggcatgagcccacacccggctcatttctatattttttatagagatggggtttcaccatgttgcccaggctggtctcgaacttctgagcacaaagtgatccagccgccttggcctcccaaagtgctgggattacaggtgtgaaccaccatgcctggctgttttaagttttaattagctgatttcagctactcaggaggttgaggtgggaggattgcttgaacttaggaggttgaggttacagtgagctatgatcacagcactgtactctagcctgggtgacagagagagaccttgcctcaaaaaaatgatactgcaaactacccttcagaataagtggtcatacccatttaccataaatgtatctctcctcataaatattctgaaaatatttgctctttttgccaatttgatgggtgaaaaaatggtttgtcattgttttaatttgcatctgcctggtaactgagtttgagtgtatattcatttgtttattgactatttgcattttttcctgtgacttaatgtgaaaaacttgtctagtacacaagggtttcttggctttttggaaatagtatactaacttttactattcttttcaggtcactcagccaaaggagctcagaagtagagtatattaacaaatacagacagctcgaagcacaagagcttgatgtgtgtcgcagtgtccaaccaaccagtgggccaggtaaacaggtctctttaaatattttagataggatgcatgagtggttcacatgctaaaatattaggttcatagtgcatgcctgtaattccagctactcaggaggctgaggtgg

SEQ ID NO: 13163 - DNA, 2300 bp, Homo sapien
gtagcttgggccgggcacggtggctcacacctgtaatcccagcactttgggaggccgaggtgggcggatcacgaggatttgtgagatcaggagatcgagaccatcctggctaacatggtgaaaccccatctctactaaaaatacaaaaaattagccgggcgtggtggcgggcgcctgtagtcccagctactcaggaggctgaggcaggagaatggcgtgaacccgggaggcagaggttgcagtgagctgagattgcgccactgcactccagcctgggcgacagagtgagactctgtctcaaaaaaaaagaataaagtagcttggccgggtgcggtggctcacgcctataatctcagcactttgggaggccgaggtgggcggatcaccaggtcaggagattgagaccatcttggctaacacgatgaaaccccgtctctactaaaaatacaaaaaattagccgggcatggtggcgggcacctgtagtcccagctactcgggaggctgaggccggagaatggcgtgaacccgggaggcggagcttgcagtgagcggagatcgcgtcactgcactccagcctgggctacagaataagactctgtgtaaaaaaaaaaaagcaaaaaaaaaaccccccaaaaaaaactagctttaagcaaatcattcattcaataaactttttttttttttttgagtactgctatggaaaaggtgcctcctaaggggctgaggttataaagatgagtactagggagacccatctgctgatgtgtgtatgtttatgtgttagaaaggctggtgtagggatcctggagccagtgggttgcggggcagagggaagatgatgggtgtgtgaactcagaagagactgccacaagctgaggagagctcactttggggctttttgctgatgatagccttgatttttcttctcaagtaaaagagaggatgtttgtgctgaggaaatgttctgaagtcaagtgacagcatgagatttatgatgatgttaaataccttttagctactgatttttgtttttcttttctctatgctacttctctagacatctccttcagtgggaagttcagaagatagtagggcctggaatagaattacttacagaataaatccttacacctcttacactgaggaaaggagaactccctctttgaaacttagtaattatctctccacttcggctgagaaatgtcccagaatagaatcttaccgtccccttgtacattgatgtttcctaagttctagagtaactggcttctttagaacagtagcaggctgcctagcccttgggtgctagctggttctggggtggggcggggtgggggggctgtgggtcctggggtggctctgactgtgaggtctctgtctgaggagggctgcaaggtctgtctgaggtgctgcctccctgactgctgtccccgagtgtcagtgctactgacctcgggtcctaaccttgctctggtttacctgtttgtgactgacccagcttttccaggaccagcccttgcccacccttgtgagctgcagttatgcacatcatggaatgtgtcctgtaggggtcacatggctcccggtcagtgttagactggcacatcttcttccctgtgcttgcttgctcagatgacagtgtacctgcaggcctggcaggggttgtggcaaggaggggccatgggaggctggcccagtggttctctgtgcttgaggtaggtggagaggtttctggttgtcacagtgaccttgggcacagttggcagtaaatgagcaggggcgagggtgcagaacattactctgccgtctctcagggggccctaaggagaaacactgggggccgtgactgagtgggtggtctgtggtctgttggccgatgctctttgcttcctcttaaccaggagtgatactagccccctgaggaactgcatttagcagagagaactggtttagtccccagtcccccagtggtgcctttctgtcagcagtgtcatgtgtgttgcctgatgccatgtggggggtgcccccttttttattttgtaggtacacgaacgaacagaagaaatggatttcctgctattggtagtccgcaaactcttaagaacaaattcacgttttgtgaaggtaaatttgatttcatgagtaacagacatatttaggattaagattcattgtttagttttgtttctctctatagtctgttggtgtctatagagcattctgggaccccggacagatactaaaatctgaggatcctcaagtgccttatatgaaatggcatagtaaagtatttgcatgt

SEQ ID NO: 13164 - DNA, 2300 bp, Homo sapien
agcgagctatgcaaaaaggtggctggggtgtagggaacgggtttgaggagcagcacacggccagtgtggctggaatgggtaaaccagggcagatgataatgagcaggtgttttgtctttgtaccagcgaaatagcagtaagcaaaatagacaaaaagcctttgttctcatgacacattcggggtgggtagataagtacagatatggagtaagttacatgatggtgagtgtatgaagaaaaaggggttattgggtagggagtgtcagggaagcaccattgagattgcaggtggagtgatcagggaatgtgacaagtcacatcctgaaggaggttagggagggagtcgggtccatacctggcaaaagagtgtttggggtaggagaaggcaagagtgtgcttgatggttgtgaaacagcaccatcaagcaaggaggccagggcagctggaccagtgtgaacgaaggggaaacgagccagaagagaggcctgggggtagcaggggccatgcagggcccataggacctggtacaaccttgctgtgctgggcaagatggaaaatcgttggtaggttttgaaaacagaaatgacataacctgaagttcacttaacaggatttctctgggaatagactagaatgaggcaaaggagagaaaaggaagagacttaggagggtgtcacaagaatctaggcgacaatgggtggtgcttagaaaaggacagcagcggtaggggacaggaggtgggggtagatcccagggagattctgaaggcagagctggggaggatgtgctgaggtctctgatggagaaattgtgagagacacatttggtcggcctctagacatgtggcctgagagactgggaggatggaggctcctgcgagatggtgaaggctgtggaaggagcagggtggggcaggtgaggagctgggattcgggctgagacgtgctagatgttcaggtggaggtgtcatggaagcatctggctgtgtgagcctggagaccagggccagggagcagctggcgggggcgtcagcccgtgactggcgttggaaggcaggaacctggccaagctcttctgggagtgcacagagggagggtggccccggtgtgtaaaggtgggcagtaagagcagaggggcctccagggcagtgggaagaaagccagtgaacacagaggcctagacacccagtgggaaaagggtcttgaggggatggagtggaggagtgcatcagatgcccatggcgggtcaaggaggacctcccaacggggctgttgtcagtgaccttgacaagagcagctttggtggaagcaagcgtctgcttggagtgggctcaagaaaggatgggaagaaatgaacaaagaaccggtggcggcacacaacactccacaggtgctttgctgtaggggagcagaggaaatggggcagtaagtgaaggggtggcccaagggagtgagtgttgctgatgggagatccccagtgctttgcctgtgtgagggggaaaggtgtggtggaggggaggaggcaggccacagatgaggatactaaagcgcagagacactcggcagcttatccagccaggcacacccacatgcacacttctacccacccacccacccacgcgtacagatgcacagatacacacacccatccagacacacacatacccagacacccagatccacccacaggcacacacagacgcgggatttgaattctggcagtcccttgcatcagctgctcttctgtactgctgttgtaatgatgctcttttggagaacgttactctttcgggtgcagtccaggtaggcctttttatgacacgttgggtcttacgggttatgcattctttacacctagagactccctgtactcagcaagaaaggatgggaccagcaactccccatcctgggcgggagtggtcggtgcgtggccaaacgtttctgcctgttcactaattcttaaggctgcatgtttcaaatggctttatcactatgcattgtgatttattatgcaatgatctcttattagcatggtgtttacagtccttttttttaaatggcagttatagatttttgtttgactagaactttggtctgtgatgaagatacaaattatcagagtctgcgattgagttgggcttctaaaaccagctgtaatcagagaaaaggtaagacatttgtgttaaagcacaataatgagtcattggtgacacagtggcacattcaggtgctttttttttttttttctctgagacggagtcttgctctgtcgcccaggctggaaggcagtggcgcgatctc

SEQ ID NO: 13165 - DNA, 2300 bp, Homo sapien
acagggtttcactgtgttggccagactgatctcgaactcctgacctcgtgatccgcccgccttggcctcccaaagtgtcaaagttaattttttgtagatagttttgccaaatagtctaagtgatataatttctagtgtcatctaattttgattccagaaaaatccttgtcttgccacattccccctcactcacaatctgggctcactattgattacacatcaggctactgtctagggcgttacccacattttacagttttaatgagaggatgttttctggtatctatgggctctataataggattgtctttaaatgctgctgttttctatgtccctttataatgagtaattgtgggatcagctttttttccttcctcttttctgtgtctctccccttcctttgtcctccttcttttttttcttctttccctctccctgctttcttgctctcccacttttcagtccctcttttccttctcttttttcttccttctctctccccatctttttatttttccatctctttctctcctgttctttcttcttctctctcccttctcttctctccctccctcaatcctctccatttttctttcttctctcctctccttctctcctcctctttccctctgaagcactggttatgtgaatcggctaactgatttagttatgttattatttctaatctcaggcttgtttcttttcagcgttgtccattaggaagcacgatcttgaaagtgaaattacttgacatgggtgagccgagagctctgctggccactgccctttccccgcctggtctgagtgacattgagcgcaccatccttctactaaaggaggtaggactgcctgctggttagtactgttggcatctgtagagctgtgttctactgtggctccctcagtctgtgcctcactttcccactaactctgatcctcccgcctcactttcccgctaactctgttcctcctgcctcactttcccgctaactctgttcctcctgcctcactttcccgctaactctgttcctcagcctccttctggcttgcttcatccattcctggaaaccctgctcttcctacttgggattctttgactgcacacctgactcatactctgctctttgaacttgtaaccgaggccttggtacaagctgtatcctagtgtacatactgtgctggggctgtggacgttctgcttctgaccttcgaagttgaggatgcttctggtgttttaccttctttattatgattgattgattgattaactgggtcttgctctgttgcctaggctggagcgcagtgatgcaatcatggcttactgcagcctcaaacactgggctcaagtgaccctcccactgtggcctcccaagtagctgagactgaggtgtgagccaccacacttggctgcctttaaatatgatacctccttgggtttctatgaaatacactgtgtcaagttaaggaagtttttccccatacatagttcagtaaggttttgttgacagtgacagctgggagatccttcacttagtactgtgcatgccatatttgttcaagagtgaggtgagtagaattctgtgaaagtcctttagtgttacctcccaggatcatacttttaaaaaaaaagtaaaatgtgttctaagtttcaagggaaaatttaaaaagttttttttggtaacatatcaacctttcataaattgacttagaatgttattcaccaaaattaggtctttgtttcctgttttggactctccaccttaaggggaagaagtatgagtaagtcagtgcttgataataacactaattttattttataaaggttggagcacttgcagtgagtgggcagagagaagatgaaaacccccatgatggtgaattgaccttcttaggaagagttttagcccaacttcctgtaaatcagcaacttggtaaactcatagtccttggacatgtatttggatgtctagatgaatgtcttattataggtaagtgtgagaacaaataaatgctaatgggaagtttatataacaccactctcacaatcttacattcttcttgtttattttttatggttagcggcagctctttctttgaagaatttttttgcaatgcctttccggcagcatctcgatggatataggtactgaacattcatattttaaagtgtcactgtattttaatggtattgaatgacactgttatctgtttataggaacaaagtgaatttctctggcagtagcaagagtgactgtattgcacttgttgaggcatttaaagtaagttttctgttgtgtaaa

SEQ ID NO: 13166 - DNA, 2300 bp, Homo sapien
ctttgagacagtcttctggcagactgatgagtgtgaacatgactaggtgggcacttggagacctttgagtggtctgtccggaactgtgttttatggaacttactcagggataagcggaaggtcaaggtaagaggagtagaagccggcctggagtctttgcagtagtccaaagcagaggtactgagatgtgcagccagtatggtgctgttggacatgaaaaggagccaacagacgggaaggaggatgtcttggatttgcctggtgattgcatgtggggggcaaagaagtgagaggagcccaagagcatccggctttccagcctggatgctggggaggatgcagcttcgaggagaagacgctgaggtctggagtttaaaattacttctacggagtcttaggagagactctaaagaagggagataaagcagaagggcatgaatcaggcagtgggtggaaggaaaatgcgtgcatttatgagtgaagaggatggggcgtgaaggagagcggaggaggcggagcgggtcagggttgattcatgtacctgctccacacacctcccctgctgggcgtctttccaaactgctcaaggtgtacatttccaggagagagctcattacaggacgatttttatagtagaggaaggggcccaggtctgtttttgtggctctgtgatgatgtggggacccaggggcattagaacttgcatgcatagcaaggtaaacttgatgctgtcttccttctgcctggcacatccagcaggcaccttttgctccatgcctgctcctcatgccccagagtggggctggaatgggacaccgaaatatgggctggggcaagagagggcatttatcaatattacttggtgttttattctgttctctcggtgctataaagaaatacctgaaactgggtaatttataaagaaaagaggtttaattggctcatggttctgcaggctgtataggctgctgcttctggggaggcctcaggaaacttacaatcatggtgaaaggcaaagggaagctggcatttcttacatggctggagcgaaaggaagagagcaaaggggaggtgcttgtaaacaaccagatctcgtgagaactcacaagaacagcaagggggaaatcgcgctcacaatccggtcacctcccaccaggcccctcctccaatattggagattacaattcgacatgagatttgggcagggacacagatctaaaccatatcacttggcaatcaatttatatcacttggcaatcaatttatatcacttggcaatcaatggttttggcccaggcgctgtggctcagtcctgtaatctcagcactttgggaggctgagatgggcagatcatgaggtaaggagattgagaccatccgggccaacatggtgaaaccctgtctctactaaaaatacaaaaattagctggacgtggtggcacacgcctgcagtcccagctactcgggaggctgaagcaggagaatctcttgaatctgggaggcggaggttgcagtgagccaagatgacatccctgcactggcgacagagcgagactccatctcaaaaaaataaataaataaataaaaataaatttaatgctttttttgaaggggaattacaaagatcactgagctatatacatttgtgtggttttctgtatctgttttattttatgatagtaaagaaagacattctgttataatcatgaaaattcttttgcaattatgaaagtaattatgaagtaagatttctttgccccaaattccatgtgactttagtgtttattctgcattatattatacaaggatgatacttggttttggtttaatgacatgtcattataacttttatttctcttcaattaataattttccattggagaaattaatacatgttattgattaattataaattgaagagttactggcattttgaggagagatgtgacagaatttctgtcttgagagaaatgaatatgcagtttttaaacagatgcctgataaatttatttttaaatttacatttgtggaacagagcctttgtggaattctcacgaaatccaacagagagatttaaaacccttcctgcagtatatatggcaattaagatgtctcaactaaaagtttcacttgaactcagcgttcattctgcagaggaaattgaagggaaggtgcaaggcatgaacgtctcaaagctcaggaacacaaggtattttcgggagggaggtggcagacaggccgtgcctgctttcacattctcaggtgctatttttacatgaccgttgatctggcattgcttca

SEQ ID NO: 13167 - DNA, 2300 bp, Homo sapien
tagatcctatgcaagtctcctttaacacatcagacaggtcccagacagttacagatctccttctaactattgatgtcacagaggtaaggatgaagtaattgagcttttccttcttcttaatctaaaatcatcatgttgtatacaggaagtttacacacacacacacacacacacacacacacacacacacacagaacttgtgcaccttggtaatcttgttaatgtgggtgagtttgaattatcactctacttgttaaattgaaatatgactaaaatggaaattgaaacatacttattctagaatcaaagttaatttttaaaatatcaagtacatttaaaatgctgaaataaatcagatttaacaagatacatgttagaggaaaaaaaagtgtgtatatttttgaaacaaagtcttgctgtgttgcccaggctggagtgcagtggcacgatctctgttcactgcaacctctgccttctgggttcaagcgattcccctgcctcagcctcctgagtagctgggattacaggtgtgtgccaccatgcccgggtaatttttgtgcttttggtagagacggggttttaccacattggccaggctggtctcgaactcctaatctctagtgatctgcccacctctgcctcccaaagtgctggcattacaggcgtgagccactgtgccccgccgaaatgcttatatgacctcagaacctttatttatgtaagaatgagtcttgtaccgccaagaaaaggatatattccacacatttccttaccttagttcaccaggggaccccctctttttgtctcataaacacctgttaaaaacctgtaaatacttatgttccgaggattaacgctggtgaggtgtcgtacagcacagggtgtcagccctatgattcaagctcattttcctccttacaaaagtcctttctagatttcatctcttctcctcctcttcctttttaggtggttgaagtgggacacttttggggatacaggattgatgaaaacaactcagagattctgaaaaagcttactgctgaaatcaaccaactgacgctggtgcccttgcccactcacccacatccagacttggtctgtctggcaccttttgctgattttgataaacaacgctactttagagctcaagtcctttatgtttctggaaattctgctgaggtaggtttttctgtaacaagtcactggaagggaaatgagacagacagacgtacagcagtttatcaaatatcttttataattgtaggtggaaattaaaataattgcagttagcaaagtagtctgtttccctcattgatatgtggatttaagctcaggtcactccaagaattctataattataggattagagcagactgctgcattgctattgctcaggtagggcattgtttttgaccccgtcgtaaagtgtatacttgctttattttctaggtattctttgtagattatggcaataagtctcatgtagatctacatcttttgatggagattccctgtcaatttcttgaacttcctttccaggtaaggtagagaagactctagggaatgaatgctgcatgctggacaggattcctgggtggattcctgggtcatatggtgccctgcctcggcttacagctaggggagccaaggcccaggacagggagggacttgctttgtcacaatagccaaatttggtttctgctcttccaaaaatacatgaaaggattcagatttagcaaaaaaagttgttttaatccagtagtatcttctaatactgtttctgagttttctggttatgttgaaaccagacagactttttaggtaggccacagacatagtcacacatgcccttaccatcagtatgaagacaatctaaaaattattctaaatatttcttattgttgttaaaaagcaaaccaagtttctttaggaaattctcactaccccaacattagttttattgggacttttatgagaatattattgaaggtacatgaacaaggtctgttttcagtggtatttgggatgagtgttttgcttatttataaagctgtttgagctgtgcccttctgtccttgtaggctttggaatttaagatttgcaaaatgagaccatcagcaaagtctcttgtttgtggcaagcactggagtgacggggccagccagtggttcgcctctctggtgagcggctgcaccctccttgtgaaggtcttctctgtggtgcacagcgtcctgcacgtggatgtgtaccagtactcaggggtccaggatgccatcaacataagagacgtcctcatccag

SEQ ID NO: 13168 - DNA, 2300 bp, Homo sapien
gctgtaaccctgggaagatggtgcttctgaacaggcatgagagggtggggggatctttaaacaacaacaacaagaagttctatcaattaaaacctaaaaattaatatctacacttatatgtacccacaaaaattaaacaaacaaaaaattgaatgagggtggattaaaagaagactctcactgtttaactgggttttctggctactgtggctaaaaacaagctaccccaaaacttcagtgggctacagcaaccttctttgcctctgtgggtgaggaactatgtcagggtacacagggatggcttgttgtgttcccaatgttggggcctccagctgaaggatttggaggctggtgggtgtccaggctcacatctggtggttgctgcttgccagagacctcagttgctctcagtgaggacttccacaagtgatctgtctgtaggctagtttgggtgtcctcagcatggtgggttggtgctgagggtcctgagaatgagccaggtggcagctgtccctgtttttttgtttgtttttttgagttggagtctcactctgtcacccagcctggagtgcagtggtgccatctcagctcactgcaacctctgcctccaagtgatcctcccacttctgcctcccaggtagctgagattacaggtgtgcaccaccacacctggctaatttttgtatttttagtagagaaggggtttcgccctgttggccaggcttgtctcaaactcttggcctcaagtgatctgcccacttcagcctcccaaagtgctgggattacaggcgtgagccaccgtgcccagtatattagttcattctcacactgctaataaagacatacccgagactgggtaaattataaaggaaagaggtttaattgactcacagttctgcacgactagggaggcttcaggaaacttacagtcatggtggaagggaaagcaaacacgttcttcttcacatggtggcagcaaggagaagtgccgagcaaaagggggaaaagaaaagccccttacgaaaccatgagatttcatgagaattcactcaccatcacgagaacagcatgaggttaaccaccctcatgattaactgccttccagagggtccctcccatgacacgtggggattatttaggatgagatttgggtggagacacaaagcttaaccatatcacctggcctgtgtcaccttttgtaatctagctgcagaagccacacagcgtgagttttactgtagtcacagtcacagctagaccactgtggcttctaggtcccactgtaattcacagtgtggttggaaactactgagacgccttaggcaagggagtaacattgtatttgttttgaaaagctactcctgtgtgctatatggagaaaagattggaagaggcaggagtaagagatggggaattggtcggaaagttgttaccaagtccaggtgagaaatggcagtggcttggaccaggctgttggccgcagccatggagaggctattagggagtgataaaggtgacaggacgtgccagtggtcagaggagggtggtgataaaactgggatacaaaactttgtaagtgtgcaccattgttttaggatgagaaggtggaacatttttttaggcttttactaagtgctagacttgtttgacaggtcataaatatgtacatagccctttctccagaaatctccctaataagaatttaacccatggaaagaattcgaaggcaagggaaaaaaaaacccattcatgataaaatattcttttcattatcttatctaccacattagaaacttaataaagtattaatacaaattattaagtattaataaaaatactgaatttactattcttataactatattttataactatattttgattgtgaaaactggcagaaaaatgcacaagtgaaattaattgctgtactagggctggcagaatttaggataattttatcggtcaatttttacatgctaaaacatatactttaacaattctgaaataatggactcttctgaaaacattccatttaggattgatcagaatggcaagtactatactggagtcctttgtggtttggggtggaatccagctacaggggcttccatactgcccgagcacgacatggagcttgcgtttgacgttcaattcagcgtggaggatgtcgtcgaggtaagggtagtgcagcatcacggcaccacaaccctgtctctctctggttttgcttacctgacagtgagtgcagggtctgctgtggagctcgcggtgcagacacacacctctggtcctggagatgt

SEQ ID NO: 13169 - DNA, 2300 bp, Homo sapien
ggtcttttatcctgtgaccttgttaaacttctgtattctagtagttgtttgtagattccttaggatttcctacatacaagatcattattattatgaaagctttctttctctagtaatgcttcttgttttaaggcctattttgtctgatattaatatagctaccccagctctctttagctaccatttgtgagctttttctatccttttacttacagtatatttgcagttttgaattttttcaaatatttttttctgcctcgtgcccgctctcttctcccctagggagacattgctttgcacgtctgtcagtgcgctggtgttaaacgcgtgctgacacggtcgatacggcctcactggtctttgaggctctggtcactcttcttcagtctctttcctttttgtgcttcagattggttaatttctgttgatctgtcctaaggttactgatcctttattatttcatctcaggtcgacgtggatgcggtacagagaattttccatttcagtcattgtacttttcagctctaggatttctgttgtttctttggtagtttttaatttttattgagattatccctgattcattgttatcctatttttaaaaaacttcttggcacctgttcacagtggctgccttgaggtctttgagtgctgaacccacagctggccacacactcagcctctactggctgctcttctgtgtgtgggccacacattcctgtgtctttgatgtctcctaatttttttgttggaaattgggtactttagataatgtactggagcagttcccccagagctgctgtttttgggttttgtggttttgtttgtttcactttagaaaagtgcctagtcttaacctgtaagtccatcccctgtgatgtgaggtcactgatgtctgggttctgctgttttgttatgtttttaattttaatttttatagaaacaaggtctcactttgttgcctaagctggagtgcagtgatgtgatcatagctcactgcagccttgaactcctgggctctggcgatcctcctgcctcagtctcccaagtaggtagggctacaggcatatgtgaccacgcccagctcgttttgttttctttattcttatttttattttttagcctggcttcctaggtgttgtccttgtatctgatctgcacagcttagtgcttagccagtgatcaatcaaaagttgtctttaaatactgccctgaaggcttctgccctttgccattggagctaagtatgggttgaaaagtgcactccaagttcaggcactttttgattcttccctggcctctatttttctcagggcttcccaggtttttcccacgtgtgtgcacccctccatcagtcagggatgtgtggagggcctgctccccctctgtggcactctcctttccagagtctcccttttacctcctgaatagtctggtctgctgctggccccaagcaggatgtggcgtgaggctggaaagctatgggctttccccatctgtttccttcattgctgtttttactgacaatgctccaagtcaaggtgtgaggatttttccccctctgatccagatcacatagcctttatggccctgggagtgctgtggtgctgggttcaggggcaggtgtatggggtgggagcggctccctaccccagcaagaactccacatactccactgttctcacctggagctggcagtttgtcatgaatgaatgcttctcaacttgttgtttgcctttgcctttggttaatttccagagccttcaaatggttgttgttggtatgtatgtatgtatgtatgtatgtgtgtgtgtgtgtgtgtgtgtgtgtatgtatgtatgtatgtatacagttttgccttgttttatagttttttagtggggagaggctctgcagaactctttactccctcattgttcaaattccctatctttttaagctgatgatatttccaacttgtcatgattgcttgagagctaatggtacaaaatgtcctgttacatttcagagaacttgactcattcatgtggtgtgcagtgctggttgctaagggaacatagagacaagactaggtcttacagatctgtcacactccatttctttctgcttttgaatatgccatagattaaaatattttctgatcataactgcataaatgttgacctttaaacagtttattctagttccaattctgtgggaagcatataggatttaaatctttaaaaaaatcacagcagtgttttcagttactaatatataattaagataatttcttttttttttaaattagtttgttctgt

SEQ ID NO: 13170 - DNA, 2300 bp, Homo sapien
ttgtctcccttagattctaatgttcaagtcccccacaccccagtgtcttagaatgcaactgtatttggaggtagactttaaagagatggttgaattaaaatgaggccccaaattcaatctgactggtatgtctataaaaagagaaagtctggacatctggagatacatcagggatgcgtgactgctcagaggaaagaccctgtgaggcacagcaagaaggcaccatctgcttgcccaggagacaccaacctgtgacaccctgaccttagacttccacccccaagaactgtgagaggtagacctccttgcactgtaaatcactcgttctgttactgcagtcccagaaaactaacacagacctttgctgggcagaatgcctttgcttctctgcagacaagattacttttgcactattgcactgttgttatcaaaataattatatggggctgggcatggcggctcacacctgtaatcccaacacttagggaggctgaggtgggtggagtacctgaggtcaggagttcaagaccagcctggccaacatggtgaaaccccgtctctactaaaaatacaaaaaaaaaaaaagaaaaaaaaattagcctggtgtggtgtgcacctgcaatcccagctattcggggagggggctgagacaagacaattgcttgaacctgggaggcacaggttgcagtgagccaagatcttgctactgccctccaggcaacagaataataataatttttattatggaatcagtgtcaaatgctggtgccttctgggggcaacacacagtttcccaccaaagtgcatcagtgccccaggcagtcaaggtgccaggagacgaggaggccgcggatcttctgtccacctgggagcaagcctgcagcttgggaccctcctgggaccctgcacccgccagtgccctgccctcctgggctctcatgggagtgaaggagggtgggctctgtaggagttaaagaaagaggaaagaaacatgaaaagcggctcaacaaaggcaggtttattttggagaataaacctgaaagggacttctggccgattttggtcaggagccatctctcctacagactaaggatctttaagggtttaggaagtggggagcttatcgcaggctcggaatgtttctatgtgagggaaagtttattgcgggcttggaatgtctctggtcggaggggaggttatctcgaggttggcatgtttctgattggagatgttatttgtggtttacggtcgtgctgacattagctattgggctgatgtgttttgggctggatttaggcagctttttaatcaaagggaacctaaaatggcggtgtttgtccaagaaggccatactcctgctctgtcccgctccagcccttgggggcccctcgggctcttctcttggatggtgtgtgaatgggcacatgtggaggggctggtccagctctgcctgcctctggccatccaaaggagggacagcagggcctgggcagcaatgccggccttggagccccggggctgtggaggctgcttgacaggacacggagccccctctgtgctcaggtcgtggagggcctcgggcactacggtctgccaggcaccacatgtcacagctactcaaacacccagggccgccacggagggccaatggccgcaggatggctcaggacccgccccacccctgtcgctgcctttctggctgccccctagtccctggacaggcgctccccagccccaagcaggccccagccaatctcctgcccaggcaggagctccccctgccgccctcacagacctcacctcttcctacacgtttccaaggccgcgccccgccccgcaccccgccaggccccgccccgcaccccgccaggccccgccccgcaccccgccaggccccgccccgcaccccgccaggccccgcccccaccccgccaggccccgcctctctctccgaccctggacagtccccgggacccaccccgcccccaggtcctgcccccgcccgcctccgcggggcctcccaccctcccgggcagactccactcccgccccctccccgtgggtgcccccgccggccccgccctcccaggctgcccccggcgccccgggcctcctccgcgcagtccctgagtcccgcaggccctgcgtccccgctgcacacccccgtccactcccgtggtccccggtccggcatggcgcgcgcggtggggcccgagcggaggctgctggccgtctacaccggcggcaccattggcatgcggagtgagctcggcggtgagtccgagaccctgggcggggta

SEQ ID NO: 13171 - DNA, 2300 bp, Homo sapien
gtgtggctggccaggggcgcaggaccggtgctcccgaccgctgcgtgcttctgtgttgcgtgtgtgggtggggggacgggatatagagagtgtgtgtcccggagcagtggagcggcgggaggcggtgctgtctgccggcagtgcggggtggggtttgggtgttgtcctcagtacccagatccagatgtgggctgacgcccgttttcattctccaggctgcgaagagacgggtaggggaagcgcttccggccccccaggctgggtggaaagcgactgcaggcttacggatctcagaaagagtggagagcccctgccactttattccatacccccttgcgttttcgaacccctaaggtcatcaacgacccggaaagccgggaggggatcacccaccccactttctggggagtgcgtgcgtgggcggggaggcttatccaagtaaaagggggtgggcaaaacggaaagggtcactttgacgtactgagtctctgcgaaggcctcaccgtatgtgccggcagccgcgtgtcctggtctccgccgggtcacgaccttcggagtttccgagtgcgcctcaggcctgggacgcgcggcgctgtctccccagtctcggagccgtgtgcgcagcggccggcagggggcactcgcgtcacggggagcccgcccgccgcgcccgcctggcttgacccgggctttggggctgacccggagcctggcccggagctgcctgcggccgcggatgccggcgacatttggggcccggctaggcacagagcaactggtcgccagggaagggcgggggggcggcctcccagccggagacaaacaagcaattaattccggagctgagttcccatctgccaggcctgctgacaacaggtccggcgcacgcccgcaggacctcccgcttcccgggcggcacggcgcgcacacccacttgcgggcacacgcgcggctgtaaagacacgtgccgttcgcagacgcgccgaggcacagatacgccggcgcggtcgctgcccggctcgaggcgcacaccgcggcgacactaacccacgcgcgacagttagacctaaagtggcccgcgacacgcagagtacgctgggcttgctggaaaggcgcctgggagtctcggggccggggtcccgccccttcctcggcccacctcgccgtgggccttgggcaagagcgtcccctccgcagcctcagttttcccgcctgtagagggaggggcgtcggcgcctcctgggagacgcgcagccctggtgtcccgggagaggggcgggaggcgcatgcgcgcgcgcaactagatcctcgccgccgcccccagcgcccctccccggggcagggactcacctaacaggttggggtccttggagtgcgcggggccgcgtggggaagcggggaccctaccccccccacgcgccgcccagcactgggcaagggcggggcactctctgggctcccgcccctcgccgcccgccccgggagcccgagccccgcccttccccggccccgccctcgcctcccgagcgcgcccaccggagccaccgcgctcctcgcgacactcgcaggctctgcgaacttccgagcggctgggccgggccatgggggcgcctcggggccggatcacgtagccgcggcgcccccggagagccagcgtggccgggagcgcctgccgggctcttcccgcgccccggccatggtcggccgcggcgtccctctgtgcgctgcgcagcccgcggtacgcgcggcccggcctggagagggaggcgggcggcgggggcccgggacggcgaagatactcgcggtgtgcgctggatccctgggggccgggcctcctgctgagggtagcggacccgcaggcgggacctccggggatggagggagtgggtgagcgccagggtcgtgcccagggctcctaactttggcaagagcgtcacgctggggcagggcgcgcaggggtctggatccgacggacgtcccaggctcactgtccgcttccgcccccacaccctgcaggtggccgagggcggcccggcccgcgagccgccgccgctgctggaggtgtccccccgaaagaggctacccgccgggcccgaccaggacccatgcggcagccgccctgctcccgaaggcgccggggccggcccagagcagggccactcggccggcggaggcggctggtgccgccactgccacacgaagctggtggagctcaagcgacaggcgtggaagctggtcagcgggcccgggaccaccctccgggtaagtgacacttccttaggccgacccctccgagcagg

SEQ ID NO: 13172 - DNA, 2300 bp, Homo sapien
gtggcctcactccagcctgctgcccccgcacaggccctggggtgctcaggagagccgcaccacctctgcaggggcttcctagggacccctctctggggctggagggtggagtttggggcactctggggttacacggcccttggtgtgagtcctggccactggcctgggcacacatgcttgtcttttgagcttcccgttccctcccagcgcggggtgacaccgttttccttgtaaagttgctaagaatggtcacttaagttcttcccctgagactcagttccgctcccagcgtttggtgggacatggttggtggtgcctgctgtagttttcatcacagtgaccgcagcattggccctgtgctctggggagggtcggggaagcgggggcgtgtaggggagactgggctcggcagctccacttttcttcccccagtacgcctccagctcctctggcggggagagctcctgtgaggaaggccgggcccgtcggcccccgcacctgcggcccttccacccacgcactgtggccctggaccccgaccgcacgcctccctgcctgcccggtgaccccgattactcctccagcagcgagcagtcctgtgacacggtcatctacgtggggcccggtggggcggcgctgtcagaccgggagctcaccgacaacgaaggtccgcctgacttcgtgcccatcatccctgccctgagccgccaccggccctccaagggtccccgagacgcagaccacttccgctgcagcaccttcgcggagctgcaggagcggctggaatgcatggacggcaacgagggtccctcaggaggtccaggtggcaccgacggagctcaggccagccccgcccgagggggccggaagccctcgccaccagaggctgcatcccccaggaaggccgtgggcaccccgatggctgccagcacccctcgaggcagttctggtccagacacccaccagggtacccctgagccctgcaaggccattgtctggggtgaccagagagaggacagcagcgcttggcctgagctgctggtcccggaaaaggctgcagtgagtggaggcaggaggccactgcccagcccggctcccccacctcctcagttgctggaagcctgcagagccccagaagagcctgggggagggggcactgatggagtggcacggacccctcccgtgggcatgagtgggcaggtggctgggtccccgatgcttcctggggccacctgcccccgcctggctgctggcagtcgctgtccggagcggggcctgctcaccaccacagtgaccctgcagcggccagtggagctcaacggcgaggacgagctggtgttcacggtggtggaggagctgtccctgggggcgcttgccggagctgggcggcccaccagcctggctagcttcgacagtgactgctccctgcgggccctggcctcggggtcccggccagtcagcatcatcagcagcatcaatgatgagtttgacgcctacacctctcaggcccctgagggggggcccctggagggggcagcctgggccggcagcagtcacggctcctccatcagctcctggctcagcgaggtcagcgtctgcactgccgacagccgtgaccccacgccgcagccccgcttcagccccgactcgctggcagggcttgaccctgggggcccccctgccctggatggttccctgggggatggaagctctgggttcctggggccagacagacctgacagtcctgggccaacctggggtccgtgccctggggaagtggctgcagtggccccatcccgacccggcagggagccccaggccgggccctcgcggtgggcatccgcagcccagaccatccactccagcctcccccggaaaccgaggactgcctctgccaccacccgtgtgggctgtgctcgcctgggccagagcccacctggccgtggaggcctgtttgaggacccatggctgctccgggtaggggagtgtgatacccaggcagcttctgctggcagggcccccagccccacacttggctccccccggctgcctgaggcccaggtgatgctagcctgtgcccagagagtggtggacgggtgtgaggtggcagccagggcggcccgcaggccagaggctgtggctcggatcccaccgctgcggaggggtgccaccacgctgggtgtgacaacgccagctgtgtcctggggagatgctcccacggaggtggtggcctgctcggggagcctgaaggcctcccccaccagcaagaagggtctggctcccaaggcgggcttcctccc

SEQ ID NO: 13173 - DNA, 2300 bp, Homo sapien
ctggtccagacacccaccagggtacccctgagccctgcaaggccattgtctggggtgaccagagagaggacagcagcgcttggcctgagctgctggtcccggaaaaggctgcagtgagtggaggcaggaggccactgcccagcccggctcccccacctcctcagttgctggaagcctgcagagccccagaagagcctgggggagggggcactgatggagtggcacggacccctcccgtgggcatgagtgggcaggtggctgggtccccgatgcttcctggggccacctgcccccgcctggctgctggcagtcgctgtccggagcggggcctgctcaccaccacagtgaccctgcagcggccagtggagctcaacggcgaggacgagctggtgttcacggtggtggaggagctgtccctgggggcgcttgccggagctgggcggcccaccagcctggctagcttcgacagtgactgctccctgcgggccctggcctcggggtcccggccagtcagcatcatcagcagcatcaatgatgagtttgacgcctacacctctcaggcccctgagggggggcccctggagggggcagcctgggccggcagcagtcacggctcctccatcagctcctggctcagcgaggtcagcgtctgcactgccgacagccgtgaccccacgccgcagccccgcttcagccccgactcgctggcagggcttgaccctgggggcccccctgccctggatggttccctgggggatggaagctctgggttcctggggccagacagacctgacagtcctgggccaacctggggtccgtgccctggggaagtggctgcagtggccccatcccgacccggcagggagccccaggccgggccctcgcggtgggcatccgcagcccagaccatccactccagcctcccccggaaaccgaggactgcctctgccaccacccgtgtgggctgtgctcgcctgggccagagcccacctggccgtggaggcctgtttgaggacccatggctgctccgggtaggggagtgtgatacccaggcagcttctgctggcagggcccccagccccacacttggctccccccggctgcctgaggcccaggtgatgctagcctgtgcccagagagtggtggacgggtgtgaggtggcagccagggcggcccgcaggccagaggctgtggctcggatcccaccgctgcggaggggtgccaccacgctgggtgtgacaacgccagctgtgtcctggggagatgctcccacggaggtggtggcctgctcggggagcctgaaggcctcccccaccagcaagaagggtctggctcccaaggcgggcttcctcccgaggcccagtggggcggcccccccggccccacccacgcggaagtccagcctggagcagaggagcagcccggcctcggcccctccgcatgctgtgaacccggcgcgggtcggggctgctgctgtccttcgaggggaggaggagcccagacccagcagccgggctgaccactctgtccccagggccacgtccagcctgaaggcccgggccagcaaggtagaagcagcacaccgtcttgccggacacgcgtctctggagcggtacgaaggcctggcgcacagcagcagcaagggccgggaagcccctgggcggcctccccgggctgtacccaagctgggtgtgccaccctccagccccacacacggtccagctcccgcctgtaggagcggcgcagccaaggctgtgggggcccccaagccccctgttggtggaggcaagggccgtggcctagtggctggtgggtcgcgggctctggggccttcggtgaagctgtctacggcctctgtgacgggcaggagccctggcggccctgtggccggtcccagagcagccccacgggccgggcccagtgtcggggcgaaggctggccggggtaccgtcatgggcacaaagcaggcgctccgggctgctcacagccgcgtccatgagctgtcagccagtggagccccgggccgaggtggctcctcgtggggctcggcggactcagacagcggccatgacagcggcgtgaacgtgggggaggagcggccacccacgggcccggccctgccctccccctacagcaaggtgaccgccccacggcggccccagcgctacagcagcggccatggcagcgacaacagcagcgtgctgagtggagagctgccgcccgccatgggccgcaccgcccttttccaccacagcggtggcagcagtggctatgagagcctgcggcgcgacagcgaggcc

SEQ ID NO: 13174 - DNA, 2300 bp, Homo sapien
ctactcgggaggctgaggcaggagaatggcgcgaacccgggaggcggagcttgcagtgagctgagatcgcgccactgcactccagcttgggcgacagagccagactctgtctcaaacaacaacaacaacaaaaaaaaaaacaacttaggcattgagttctaatttttggttaattttcagttttaaatatttttatttggttcttttccaaatcttctctgacatgttttatagttttcagtctcctgtgatatgtttgaatttttgaatcttttaaacttagcaagcatcgttatttgatgtgatctgatcttctgcttataattccaaaacctgaagtctttgtgcatctgtttctattgtcttttgtttttgctggctcttgattgtgaatttaatttcattttgtgtgtggttatctttgtgtgctagagattgtattgaaaaattgcttgtaagaataatttgagccttaggatgatagttcctctcctttcctctcctctcctctcctctcctctcctgtcccctcctctcctctcctctcctctcctcccctctcctcttctgtcccctcccctcctctcctctcctctcccctcctctcctctcccctcccctcccctcccctctgctcccctcccctcccctcccctcccctcttcttttcttttcttttcttgatgagtttcactttgttgcccaggctggagtgtagtggtgtgagctcagctaactgtaacctccacctcccgggttcaagcgattctcctgcctcagcctcctgagtagctgggattacaggcatgtgccaccatacccggctaatttttgtatttttagtagaggcagagtttcaccatgttggccaggctggtctccaactcctgacctcaagtataccaaagtcctgggattacaggcatgagccacggcacctggccaatagtacctttctttaaggatggtgttggtttgctttttgcaggtgcctagtggggcactacctgtctggaagtattttacacgaagtttaagccttgagatttcctggagcaggacctctgaagtcaccatcacaaatggcaggcccacacaaggactgatttacttctgactcacccatggccttcaggcttagagttggggccttgtcggattcctctctcttaccaactctgggctttgactctgttgtccctaatgccatgctgataaataattaataactggctcttcataaaaaaaaacagttttgatctgtagcacctgccaattcccatggtgtaaacactcctgccatggctgacttcaagttaccaacacaacatcactgagtgtgggattggaaaaagatgcccatggctggctcttaagagtcctctgagccttgctggttctccctcacctgccattgagggggctgatgggtgcaacagtcattcctgaggctgcaaagttctttaaagcagaagcagctgactcttgcttatgttttgcagtacttgctgggctctcaactcctccaaggttttggcctggtagtgcattctttgctacctgatttgctcttttctgctttaaagaagattggaaaaaaattttttttttgagacagggtctcactctgtcacctaggctgatcgtggctcactgcatcctccacctctcaggctcaagggatcctcctacctcagccccccaagtagctaagaccacaggtgtgcgccaccacattaggctaggttattattattttttttttgtatttttggtagtagagacggggtttctctatattgtccaggctggtcctgagctcctggccacgagtgagccacccaccttgacctcccaaagtgctgggattataggcatgggccaccatgcctggccaattgaaatattttaatccagcttttctagttgtgttcagtggaagagttggtcctagtcactaatctgctacttatggacagagacatctcctattttctgttgtaaggacaggaaaaagcagaaaatatagaaaaggaaataaagagcaaccatctctcaatagtactgctgcccaacaagaacactgctgacatttggaaactgttttccaatttgattcttattggaaagcataacaaccagccagggcctgtgctgctggagcgggcagttatgtgcagggagacagctggttacggctggctcctggcctcgacggagcttctcagcctcttggagcctctgtcccctcagctgctgaaggaacacatctcctgcacttctcaagttgctgccggtgc

SEQ ID NO: 13175 - DNA, 2300 bp, Homo sapien
tatattcacagtgctgtgcagccagcaccaccaccgagctccgaagcatgatcaccaccccaaaaagaagtcctgtgttcatgacacagtcgctccccattgcccctctcccaagcccccggcaacccctcatcttcctgtttacggatttgttgtctattctgcatatttcatgtaaaaggagtcatacaacacgtgaacttttgtgtccagcttcttgcagcagaaagttttcaagctccagccatgtagcaggaatcagtattttatttcattttatggctgaataatacatattctgttgtgtggctagaccacgatttgctcatccattcatccgcgatggacatcgggccagaaggagattcttaaagcattcatttggtgaagtctcttctgctcagaaccttccaggggcttagcaagatctacaggcctctttgtggcccagccctggggccccggggactcctctgcaccaccccaccctcatcctttttggctccacgccctgcttgccatcttccacctcaccacactctgtcctgcctcagtttcccacctgccttctcactgcccaggctgagcatctctgtctgtttcccatgactgggctgtacttatccttccagtccatgttggaacgtcacttccatggggacaccctcctcagcctcctagtcacgccacgtcagccacatgcaatgaccgtgggccccattagacccattcaaggacggcacatggggctgagttatcctcccattctcgcctctgcagcctgagctcctcaagggcagtgccaagtctgattggtcttggcaacccccacagtacacagcaaccctgccagggcgcctggcacggaggaggtgctcactgcaggctgtgcggactcctggaggggcgtgtgtgtgtggtgcgtgaggaagtgccaggtagcagtgctgtatcatgggtagtgctgtttctgcttggcatggaatagcaagttggcatctggtacaaactagtaacttcttatccagttggcccaagcacagaattggtctatacccataccagaggatgtgacatatttttatttaaaaaaaaatcaataaatcatttgtgggactgtcaccagtaacgatgtgactgaattaacctctcatctgccatgagggtgatctttttgttacttgatcttaagtaactcacagaatctggggcacctgtcaagcaggacctttgggccaggggttgatctctaagccactggagggcaggactctcagggaaccctcaggtgcccaccagcccctgcttctctgggcactcgatgtgaaaggtccaggctgaggagcggtggtccctgatcccaggacaaatcccccctggtggtggccctttgggtctgaaatccccgctctgagctgatgtggttgcatggatgctgctgaacaaacccgagggggctgctgctgacgcgatgggcttctggtgaactcctgagggaacagcttagctaggggcagctgggctgcaccatcaacaccttctcctgaacattggcccccttgatccccgactgacccagatcttctgtatccccgggcccagccacccggcctggcctggtcccactccccagcacaggacacctccgcacctttgtataggctgggctcctggcctggagtgccccatctgcacaagcccctctcccttgggaggccttctagaacgttccgaccctccactcctttcttgagcccgaggagtgcttgtgcttgggtgtgcgtggtgtagcccagcccgatagctcctgctcagcctgtcccgtgtgtctgcagccagggtttggaggatgtggcgctgggcgcatgcttccctcggctgcccctccctccctgccctggcggggtgtggggtgcccatgccagagagtgactgaaggcgtccccaccatgctcactccctgtgagctgccctgcaggggccaacttatcccagaaacaggctgtcccccaaaccacacgttgttgactttgaagcacggtgcatgttttggcagcagattcaccttcttaattatgtctctcggctgctatttcaaccagcgtgtgctccgagcatgtgccagcctccacaacgtctgcgtcccccacaggacggctctgcattgtcccctcccatggctccttgtcgtcgcggggctggcgatgccgaagccaccctaccaggctccctgtctcggctctccttccccatcgctgcctggctctgcgctgaccacggggggagccccgaccacccca

SEQ ID NO: 13176 - DNA, 2300 bp, Homo sapien
gaaacagcccagcccagccagctcgctggactttcccagcgctcaggagtgcccagccactggacatgctccgccctcccgctgaatgacagctggccttagttgctgtgttcccggggcactgctcagggtgggtgcaccacaaagatctggggagggtggggcatccgatcattcccagctcccggggagagatgagggtgtggcggaggtcacctggctgaacagtgacagagctgggcccaaacctgggcaccacgtcattggcaccactgcccgtgggcacatgtgcccacctgccggctgcaggcaggcctgacacaactgggctcttccctggcactgcctggcacaggcactggggaccctccgcggacccggcagctcagcactcccctgggccagccttatcttgccctgcagagcccaggctggagtgaggcgcaatggacggaggcgaggagggtgcagccgagccctatcagatacggccggaaatatgaccccgctgggacctgagccctgagccgagccatcagctcactaataaattacccagagcgaatgtccacagggtcagcccgcatcgcctttccagggagcacagagagggggcggcacccaaggtctgtgggctgaccgttccctcccctctgtcaatgagaagggtcaggaaggagttgtcccggagccccccgacctcgggcagtgcagcctgacctctgaaatctgggaggagcagctccagccctgggaagccaaggataagcgcccagattgggcacaggcgggagagggtcttgtctggctacaggacctcactcttcccaggaagccagactgccagcaggaccacccagccttcctcagtgctctccctggaacaagcgtcagcgagccaaggccctcctgccaatctggcccaccccgtttgtgtagacacagagcgcactgtgtgccatatggccctgtaagagaaaagtttgctcccccatgccctgtactgaagacggcagtgaggggagggccggtctgctgaaccccatcccagtggctgcgttgctcatgctctgacggtgggttccaggactctgtgtccatgcagccccacggctggccctgagcagtcaccctctgtgcacactgtcccccagcctggcacaccctgggctcccaggggtcctgtagctttacccaagggagatgcacccccattcctaatggagaaacacgggtctctccacacctcctccagcagtcccctgaaacaggtcaaagccccacaaaccaggcaggggtctgcccacatgtggtggtgccctgcgccagtgatgccctcaccagcctctttcagacctgcctttacatgcaccagcagacgggggggctggcgaggacgggccaccaagcctgagccaggctaccacctccgggctgtgtgactctggacagggtgcctcaactctctgagctgcactttcacctacaaatgaggggcagactcagcagcgccaggcagggcagttggacgcccacccaggacagaccctgagaaaggctgatccctcacccctgccatcgctcactgacccatacattgccccttcctgccagggcaatatcgagggtcggccagtgtgccccaaaacggcagcttgggacccattctttgcctctccctctggcaaccccaggtcaggactcacaggggcacaggggcctggggcagggcgggcactctcgccaccacggaggccccatgctgggtcagggtcttattggaggctggactctgtgatcacctcacctcccgcagccccacagtgccctccctctcccactctgccccgaattccaatccataggtttttccaagagctgcacagctctggaattgacctgggagggggcacatttgggccgggaggggtaggaacagcagcaaactctggtcttatctgaaatcatggtctgttgtccaccgggggcctgggaaacagccacccccttctgctccggggccagcggcctgtcctcgggttcactgctatttctgccaaaggggagaggtaattatagcctggccgctgccagctggcccagctttgcgatccagcagagagggctggagacgggacgaaggccacaacagacccggccctgccagcgggcggtggcgcctccagatcagagccctcgggaaggaggcctgggcgggcctggcccgttcacctgtgtgccctgcagttctgcccgaggctcaactctcaagggcctgggaggggtgctgccggccaaga

SEQ ID NO: 13177 - DNA, 2300 bp, Homo sapien
accacctccgggctgtgtgactctggacagggtgcctcaactctctgagctgcactttcacctacaaatgaggggcagactcagcagcgccaggcagggcagttggacgcccacccaggacagaccctgagaaaggctgatccctcacccctgccatcgctcactgacccatacattgccccttcctgccagggcaatatcgagggtcggccagtgtgccccaaaacggcagcttgggacccattctttgcctctccctctggcaaccccaggtcaggactcacaggggcacaggggcctggggcagggcgggcactctcgccaccacggaggccccatgctgggtcagggtcttattggaggctggactctgtgatcacctcacctcccgcagccccacagtgccctccctctcccactctgccccgaattccaatccataggtttttccaagagctgcacagctctggaattgacctgggagggggcacatttgggccgggaggggtaggaacagcagcaaactctggtcttatctgaaatcatggtctgttgtccaccgggggcctgggaaacagccacccccttctgctccggggccagcggcctgtcctcgggttcactgctatttctgccaaaggggagaggtaattatagcctggccgctgccagctggcccagctttgcgatccagcagagagggctggagacgggacgaaggccacaacagacccggccctgccagcgggcggtggcgcctccagatcagagccctcgggaaggaggcctgggcgggcctggcccgttcacctgtgtgccctgcagttctgcccgaggctcaactctcaagggcctgggaggggtgctgccggccaagagggtccaggacctcactggactgtgccccacagggagatcccgaagagcctgtttctgtccctcggggagccaggagggaaccaggtgagttccagccccagggagagggggctcacttcctgcttgggtatgaagatgccagagcggagagattgccaaaggcaggtgcaggtggggaacctgccccagctgggcagcaggtgtgggcagagactgggcagagcggagagattgccaaaggcaggtgcaggtggggaacctgccccagctgggcagcaggtgtgggcagagactgggcagagcacacactgatgatcctgagtgacctgaacaagctccagagtggccacccttcccccttctcctgggactgatggtttccctaaaacggagacagtcccaggccggccctgtgtccacactgaggccaggccgcctctgggggaagcagggaacacggccacttcaaacttagcagcgggggtgctcctggccacacaggagcttccaaagggcacctgatgttgcgcgaaacagcctgggcagtgggagaaggggctgcactctcaggggaatgcaggcagccgtgccaggcatgaacccagccagccttccctgaagggccttggtggggggcatcctccgagggcaagtctacgcaggcccagcctagcaggaatggattcgttactccagtaactgaagcctagttctcagtgtttgggaatccctgagaactggctcttttctgagccgtcagtcagaaggaatccctgtcctgccctgtgtggccatgggacccccacccagcactggacgccacgccatttcttgggcactactgagctttgcagtgccctggacagttggcaaacagcccccattccacatatgggaggaagggcctgggggggtcccccgccctgtctgtctggagctctcgaggcctagggtggcccctgcacccagcagatgagcagccatcacccggtactgctgctacctcgagccctaactgcacctcgggatgtgagggcccatctaggcatggagaggggcctcagggggccaccaggcagctcctgctcctgttcctacctggtagggcctgcaggcacctgagcaagcccagtgggcggtcagcccagccaggggcctccccacaagttctccctcttacttaagtcgagaacgcatgttgtctggggagctgccagcgtggttccagtggtgagcgttgggctgggagccaaggcttttcccaggagcccagccaccccgcctggctgtgttctgcctccgccctgcagaggaaaggccagcgaggcagtgtccatggtcccagtcttcttccaccggaagaaggcacaacctgcatctgcagccccagggccattgggttaggcctgtggccaaactac

SEQ ID NO: 13178 - DNA, 2300 bp, Homo sapien
cactctgagggacgctatttgctgaaatgcaggcatgtggggacacatcagtggcccgtgagggccggagggggaaccctggaattgggtttgccccttgaaatctgcagatgtgccccagacggagatgaggcagatgaggggtgccgggtgggggtggctgagaccagacacctggctcctgccagcactgatcagggcccgctggcttcaggtccaattccggaccccaggctggcctctgaaggctcttgctggccgtggctggcctgaggacgcttctcctggccaggagccctccaagggtgctggacatgggtgggcctgaatgctctttgccgagatgaactggacctgtcaaagacaccttcatgcaaatttagtgagtggaagaggcctcaggcctaatttgtgccagttggattaaggtgtgagtgcagtctgatggcaaatacgctcaaatgagaatcagcttaatgtagctcaggcctggttctgattaaattgtttctccttcaactgtttggaaacagcggctaaaggtcaatttattccggtggttggaggagcctccgctgtttacccgccctccttagagccgacaggccggagctgctggaggagaaagcactcgccactggccactgcccctcctcggggcctctggccggcctggagtgagggttggtctgagtgcccagggcttttgcaccagagtgggttccgggagggccacaggtgctggaaaacgatgctggctgcaggaaggaactcagaagcttgatcttgggcagggtcttcaggagctggccctgccccatgtccccggcctcctccttcctctgagtcctgtcctttccctgcagagcagagcctgggggctggtgggagggggttgcactgacagcggacccccaacggcttctgaccctgaccctgccctctgtgcagtttggcctctgggcctcatggctggcctggctggccatcaccacgctggccttcctgaaggtctaccacaactaccgtcaggaggacctgctggacagcctgatccacgagaaggagctgctgctggcccggccgtccccacgcacctccttccaagaggagaagagcgctgtcatttaggcacagtgcaggcagggggagctggccccgacctccctgctgcgctcgggggcacgggcctgcctggggaagcagctggggggctctgcctgggccctggccacatgcagccctgcgtgtgtcccctcgacgccacgtgtagtgaggtgagcgccccagtgcccacctgtgagcctggcagtggactgggtgggtgccggctccctgatgaggatggtgcagagagactatgggtgtggggcgggggcggggggcacctccaggcctcgcacagggccccttggctgtcccagtaggacctgactggccagcctatgtggagggcgtccagcttgtctcccccaaccctggccggatgctgtctccatgccagctggcccaggggtggccagatgtcacttagccctgaacgaattctgcatgaattctgccatccaggcagaggctgcgtgtggggaggagctcacggcaccttccagcctctggccccaggttggccccctccccagctgagtccccctcctgggtgggtgccataggcctgggagaccctgtggccgggctcagggaggcttctgaggcctgtgagttcacctcactgtgtgtgggtcctgtctgtgcttggctgagggtcagggaagtggtaatctgggctccacagaatcgggggcatcatctggttggggatttcgggggcacacgtaccacatagaggactgggccaggagccatggcaggggtctgtgtgtgggtgagtatgggaggatgtgattgtgagtgcctttgtgcatgggagggtgtgattgtgtatatgagtgcatgagaggatgtgactgagtgtgcatgtgtgggtgtgacagtgcaggtgtgactgcatgtgaaggtgtcactgagtgtgcacgagagggtgtgactgcatgtgagagtgtgtgactgcatgggaggatatgagtgtgcatgagtgtgcatgtgagggtgtgactgagtgcatgagagtgtgactgcctgtgagtgaatgtgtgactgcatgtgcgagtgactgcctgggaggatgtgattgtgcatgagtgtgcatgtgggtgtgactgcatgtgagggtgtgactgttgtgcgtgtgaaggcttgattgtgagtgtgcctgggaggatgtgagtgtgagggtgtgactc

SEQ ID NO: 13179 - DNA, 2300 bp, Homo sapien
tgaatttcctgagtgagctccctttggggagaattggggatactccaagagtggtaaaaaccctgagtggattctccaagagaagagtggccgttgctgacctcgtggctggccttcaaggcccgactttaaagtgactgcaaaatgaaatgcaatccacagaagagaagaagttgcaaatggtggcaagcgtaagaagatatgctcagcctcatgatgccaaagcaagtccaagttcacacagcaatgagcgcattctgtggaaactggcaggatttgcctacaactgctgtttctcagccagcgaggggaggggtctacaacccagatgtgagggtaaatttgaacaacattttaatttttttatttttatttttattttttttgagaccaagtctcgctctgtcgcccaagctggagtgtagtggcgtgatctcggctcactgcaacctctgcctcccaggttcaagcgattctcatgtctcgccctcccgagtagctgggactacaggcacccgccaccacacccggctgatttttttgtatttttagtagagacggggtttcaccatgttagccaggatggtctcgatctcctgacctcgtgatccacccgcctcgccctcccaaagtgctgagattacaggcgtgagccaccgcgcccggctgaacaacatttttaaagccggtttggcaatttctgtcaacattttaaatgtgcataccccatgacccagcaattcctcttctaagaatttctcttataaaaatgcctgtgcaagaacgcaaacatatgtgtacaagaatgttcacatgacagcatttgagacagcaaaaactggagacacaaaacatccaccttaagaggaatagttatgcagattgtggaatcatcattataatggagtcttatgcagttattaaaaagaacaaaataggtgtatgtgtaggcagggaataatctccttgacattttgttgaataaaagaatcagccttcagaaaactatgtatggtatgaagcatttttgttaattctgtgtgtgtgcttatgtgcttagcaaaatgtctagaaaaatagatgccaggctattgaagtggtcacccctggtagtgtgatggggtaggggagggggatgaggagaaggctttctattttattgtatacatatctctattacttgacttaagaaatgagcatatattacttagtcaataaaacaaaaatattttttaatgcttgcaacaaaaatgctgatggaattttaaaccaggaggagcaatgttaaggcttcctcactctgggaattggactaaaggtgacttagtcttaaaggcaactagaaaaggcattaattctattaattaatgcctcagcgatttccatctcagcaaagatgtcttaatgaggcgctcgggacacccattatttatcttacaaatgcagctccagggtcctgcccatgtcaggcagtgtaacacacgtccccgcggagggctggcgctgcagaagctcccggtccaccccctcctgcccacacctggcctcaccctccccatctcttcgaggatgacctctgtcccagtcccttggaccccgactcctccacgatctggcccctcccctcatacattgcatttcgggacccccgcaaaggaatcacttcagcctggactgcaaaccgcactcctacacctcactatgagcaccttgggggtgtcctccaacaccccccgccccgccctctctctcctggtctcctttcgttcgagctgatgaggaactgacgacccagagtcggcctgtgtgaggcccgtacaggtggctcccgaagtctttagcggcacagggtcggtccctccaggccgacctggtaaaattcccgcatctcccgcaggccgcccttctctggcccctggaccccgggctcctggcccgcgcgcaccaggagctgtccgcggtgctgaccgcaggcgcttcccgcgctcggccgatgcgcacgcgtcccgggaggggcgcgcgggacctgccggcgccgccactgcgcagcctcccgcggcctccccgcccggcgcagcctcccgcggccttcccgccgccgctctcgcccgggccggccatggcgctcaacaatttccttttcgctcagtgcgcctgctacttcttggccttcctgttcagcttcgtggtggtggtcccgctgtccgagaacggccacgacttccgcggccgctgcctgctcttcaccgagggcatgtggctgagcgccaacctcacggtgcaggagcgcgagcgcttca

SEQ ID NO: 13180 - DNA, 2300 bp, Homo sapien
tcatcctaactacttgggaggctgagataggagaatcgcttgaaccccggaagcggaggttgcagtaagctgagatcataccactgcactccagcctgggtgacagagcgagactccatctcagaaaaaaacaaaaacaaaaaagaaccctttaaaatgcaggtgagtgtcttttgccccagcaacaccaatcctgggtctttacctcaagatagcaccttaaaggtgctcaaagaccaagctatcaggatatttgtggccctactgtttagaattctgaaagaataaccccagaagtggttaatttccaacaatacatggatttgttgaacacaaattggcttatgcacacagcataatgtgcagtcatttaaaatattgtgtcagagttagtggaaacacggtcaggttttgtcactgacagatgtaagtggcattcacggcggcctgcgttgtgtggttggcattgcgtgtgtgtcacacgcgtggaggcgtctggacaggtggaaagtacctgcaatcacagcaactggcctcgggcagcggccgttggttgttcagaattctttcggcttgcctgtattttctggtgtcttaaaacaatgactatgtatttttttgtggccatgtatttttgagatacagttttttttttttttttttttttttgagacagagtcttgctctgtcgcccaggctggaatgcagtggtacaatcttgactcactgcaacctccacctcccgggttcaagcgattctcctgcctcaacctcctgagtagctgggactacaggtgcctgccaccacacccggctaatttttgtatttttagtagagacgggtttcaccattttggccaggctggtctcgaactcctgacctcaaatgatccacccaccttggcctcccaaagtgctgggattacaggcatgagtcaccgcgcctggcctgagatacagtttacccagagtaaaatgcatagaactaaagtgtatgagttttgacaaataaagaggtccgtggagccctcacccagaacaagactgggggcactgcaccacctcagagggtcctggccttctgtagtctacagtgtattgtgggtaacacaagttaatcagaaacgtaaattctcagctggcagagagaagctgtgtataagcctgggctctccgattagatcgttctcaccagggtgctctgcagccagggggtgccggggaagatgccctgcaggtgccctctgcccggccctgggggaggagggaggccctgctgcaggggagctgggagccactgtggccgccatggaggctgccactctcccagctccagtgtcacctcggcgggtgggggctggttgtggggacaaaaggcctttgtactcgggacagcctcagccctactgtagggatgggaggagagaacggccacattccgaggttgggggaggtcactggacacaaggcctttctttctgagctgctagtgcatgtcggcctggctggggaccccgctggggcctctgtggccgctgagggcaattccaaccagcttcatgggcagtggctggtggggctgggggtgactcctgctctggggctagagagaggggctcagtctcgggaagaggggtaggggcggtgtgtgcgactcagccaccctctgatgctgaggcctgccaccagcccggtgccagccctcggggacggtgccacgccagggcctgcggagtggtggtggagctccctggtggtggagggttgcccacatccttctcctcttcctttccctggtctacacctccccaaggtgtgaaaaagcccaggccctctctacagcctgcaggcagcgccatgcccggggagggtgcagtttgaggaggggaggggccgcctcgggatgtttccattcagaactgggacctgtgggccaccagagaacctaaaagcaaacatgtctggccagcgacgggattaactctcagactgcaaaatcaaaacacttcctgttagtgtgagctcactcagttatttaggcgaaagcacactgccttcctgagctgggagagtttgtctctccccgccctggggtccctcctggatcttcctgccttgacagccccacagaaaatgctaagagcccaggaaggttgtgaagggtgtgtgtgtgtttgtgtgtgtgtctgtgtgctgtgtgtgtctgtgtgtgtttgtgtgtgtctgtgtgtttgtgtgtgtgtatgtgtgtgtctgtgtttgtgtgtgttgtctgtgtctgtgtgtctgtgtgtctgtgt

SEQ ID NO: 13181 - DNA, 2300 bp, Homo sapien
acatgcactagcagctcagaaagaaaggccttgtgtccagtgacctcccccaacctcggaatgtggccgttctctcctcccatccctacagtagggctgaggctgtcccgagtacaaaggccttttgtccccacaaccagcccccacccgccgaggtgacactggagctgggagagtggcagcctccatggcggccacagtggctcccagctcccctgcagcagggcctccctcctcccccagggccgggcagagggcacctgcagggcatcttccccggcaccccctggctgcagagcaccctggtgagaacgatctaatcggagagcccaggcttatacacagcttctctctgccagctgagaatttacgtttctgattaacttgtgttacccacaatacactgtagactacagaaggccaggaccctctgaggtggtgcagtgcccccagtcttgttctgggtgagggctccacggacctctttatttgtcaaaactcatacactttagttctatgcattttactctgggtaaactgtatctcaggccaggcgcggtgactcatgcctgtaatcccagcactttgggaggccaaggtgggtggatcatttgaggtcaggagttcgagaccagcctggccaaaatggtgaaacccgtctctactaaaaatacaaaaattagccgggtgtggtggcaggcacctgtagtcccagctactcaggaggttgaggcaggagaatcgcttgaacccgggaggtggaggttgcagtgagtcaagattgtaccactgcattccagcctgggcgacagagcaagactctgtctcaaaaaaaaaaaaaaaaaaaaaaaactgtatctcaaaaatacatggccacaaaaaaatacatagtcattgttttaagacaccagaaaatacaggcaagccgaaagaattctgaacaaccaacggccgctgcccgaggccagttgctgtgattgcaggtactttccacctgtccagacgcctccacgcgtgtgacacacacgcaatgccaaccacacaacgcaggccgccgtgaatgccacttacatctgtcagtgacaaaacctgaccgtgtttccactaactctgacacaatattttaaatgactgcacattatgctgtgtgcataagccaatttgtgttcaacaaatccatgtattgttggaaattaaccacttctggggttattctttcagaattctaaacagtagggccacaaatatcctgatagcttggtctttgagcacctttaaggtgctatcttgaggtaaagacccaggattggtgttgctggggcaaaagacactcacctgcattttaaagggttcttttttgtttttgtttttttctgagatggagtctcgctctgtcacccaggctggagtgcagtggtatgatctcagcttactgcaacctccgcttccggggttcaagcgattctcctatctcagcctcccaagtagttaggatgacaggcgcctgctaccacacctggcaaatttttgtatttttagtagagacagggtttcaccatgttggtgaggctggtctcgaactcccaacctcaggtgatccacctgcctcggcctcccacagtgctgggattacaggcttgagccactgtgcccagccttaaagggtatttttaatgccttatggaaagcaggggttccaataggctttccagtccagtctcttccttgatctttataactccaaagagcctggcagacactgagcctgcgggggaacacgagaaccattctgccttggaaataagactaacctactggatgcagaccagaatgcaatacaccttgacagtgtaaaactaatccctggacttccggccgggtgccgtgactcaggcctgtaatcccagcactttgggaggccgaggcaggtggagcgcttgaggtcaggagttcgagaccagcctggccaacatggcgaaaccccatctctactaaaatacaaaaaaaaaaaaaaatagctgggcttggtggcacgtgcctgtagtcccggttactcgggaggctgagacaggagaatcacttgaacctgggaggcggaggttgcagtgagccaggattgtgccactgcactccagcctgggcgacagagcaaaaataataataataataatacctggacttttactttcacgtaggcaaggtggatcccacagggaaggtcaccacaactactcacaataactgaggaggccagacacattgtgaaaaccttactgcgaaggcatcagagagctgcagag

SEQ ID NO: 13182 - DNA, 2300 bp, Homo sapien
aggtgagaggcttcctgccaggaggccctgagggtgacctggccagggacaccagtgctcaaaggtccgggtgggtcccagccccagctcaccctccgtttgctggcagtggcccctctactctcccccaggactcccgacagctctgcagagaggcctcatccccacccagctgggcagactccgaccttgccaccgggtgccttcccattctcctggctgccagccactcccctcttgcagcctcagtttctgcatctgtaggttgggagtaatgagattccccagccggcccgctgggaaggctgggcatcctgggggagggagggggaagggaatgccaggagctggctggagccaggtcagggaggcatgggcccagccccagccgcagcagccactctgtgggcccaagcaagccccgggccctgggcctgtccatctgtaagcagggtgatggcactgccgggcgaagtggctgagggtgggcccagcccagctgccctccctaggcattcatcaggcccagcgctggggcagggcacccagcccacaccacatggatggggatgaacctccagctgggctgcccgacagggacagaggcaaacagggctcccaggattccggggccagcacaactctgtggctgccgtagtgtcagctccaggccccagaaaggactgcaggggaccaggctgctcctgggtgaccccagatgtcctggctcttctctaggggatcttgggctgaacaggggactgaggccccagaggaaggcaacacagggtcaagacggatccctgagggtccccagtcatttgtaaattacctctgccctctgcaaagtgtgaatgctgattcctcggcctctgcccaaacatatgcactctctcaggttcacgctcacacatccccttaccattcggcagaccccaccggctctgccccagctcaccccctccacctggccctaccatcctctgcccctcaccaagggggaccctccaatccaatcccataaatcagggtccccgagctgcactcaaagcctccgtcacctttccgtgcttgtggaacaaaccccccctccgtcttctgactctcacccctcccacctcagtgtgtgcagaggagccttccctgcacacagctgaagtggccctgtgtcccctaccctggactttggccaggccattgaccaggctgctgcctccacccatgccttggcatctgggtcattttttattgatggtagcttggcccgacttgggggcttcacacacacctcccgtccagcagccctaggaggtgggactgttatcaccacccctatctcagcaggcagcagagccaggacccagaccggcccagccacagcaccctcccactgtaccacgggactgcgctgttcacagggccactcctgacctctggggagtccctccaggtaggccaggccaggcctgtgctctgtaatgcagtccacgcagggctccctgctgcccggggcagggcggtggtccgacagctcccacccctcagggcccgtgcacccgcaatgcccaacctgcccagcccacccagcccagccaccgtcagagggaggttggcgatgactcaggccttgagtcagcagcatcggataaggatgcagccaaccctctgccagcataagggatccccagacagccccgagctctgctagctgggcttgtggggacccctggctggaaccgaaccaggctcatcagcgctcaggagcccgggagccacctccccgggaaaattcacatgcacacacacacgcacacgcgtgcacacagaggaggcctgccatcagggtgggtggggctggactaacaccagcccagggaagagaagccagagatggtggggcgcggtgggcagtgaggcggggtctcagctggaggggctcactctgactgtggagcacccatgtgcctcctaaacagaaactccacacaggccaaggaaacagagctaccagctgactcactctcccagcaaacaccagctcctccccgagccaggccctggaagagaagtcaacatcacgagctgccatctggggggtggcaccaggctgtgaaggatccacagactggcatatgcaggaggaaatggggcgggcgaggagtaaggaccccaaaaagcaggggtagggaagggccctcccagcgccccactgtaataggggcctcatcaatgccccatgctcactgaataaagcactgccagcgaaaggtgaaaagaggaacaaagaacattctcctgga

SEQ ID NO: 13183 - DNA, 2300 bp, Homo sapien
aaagccctcctctgcactccctgccgaccccagggacttctccaacctctctccaactaaatcacattcaccccaccttcttcaccctgctccggcctgtgctggcctctctggaccaggtgtgcagctcggaagcacgactgggtgcaagggagacagccccaggcaggagcggccctgggggcgctgggcctccctcccccatcagggcaggaaaggtggacccctcgcccacacctgacctcctactccagcctctgagtaaggctcaggactctgactttcccccaggcaggtggacaggggagggggctgcaggtcaaagctcactccccaccaacctcctcacattcctccattcactggatcaacaaacacacccactgcccagcaccgctgccaggcatcagctcccaacgcagatgagtcagccccgcccgtgccctccagggtggggtggtaccagggcaggcaccaatgttcgggtccaggagtgcaccaggagacccaaagcccagcttgagggagggcaggaaggccttctgctctggaaggggccctggagcccggtgtggagggccggaggccggccttccaggtgcattccaagaattgcagagtgcctgtctaggagcagcggccgcccaggttggagggtgtccagtgagcgcctgccttggctggctcctcaggcacacccggggctgtggcctgcagctgctcctgcactggggctgagccagcaaacttccggggctggggctgctgggcagggcaaggtccgcacagggagcagacagacgcagcctgcaattcggcgcttatccccaccggagcggaggcacaccaaagccaaaggacacgcagctggcctcaaagcagaagctgcatcggggctgggaagccattcaggagcccttttctctcccctcgccctcaccctgagccctggccgccacggcccacacagcaggccctccggagagagatgtcaggactccgagtggagacactttatccgcatgttcttgaccctcatacagcccttacgggtacttattctattttacagatggggaaactgaggctccacagagtcatatccgagcctgaggccgcacagggagtgctggcgccggttctcagggcaggggttgtgtctgctctgtcacatgtcacacgggggctcccccaggcctgccttcctctgccctccctctagctgccagtggcccccaaaccccaggcctggtgcgctgcttcctgcagctctgactgagggtcagacgtcagaagggacttccagagctggggtctggctctcatccaaccaggctggctttcagagccgactatgggcacgccccatgctggtcaatgtcggcggtggggggatgggtgcccccctcaatctaggagacagatgaggccggacagcagaggggtggcagagaaaacccaccccattgcgacacctccgcggccctcatgcagctgtctccaccaaccggcgaagtgcggctgcccaagaccgccgagaccccatcaagggtggaagggggtcaggcagggctgcggagaggaggccacatgggtggcctggttgatgggtaggctctctctccccaaagcctgggaagagccatctctgctgagggatccccgaacgcggggactccggatccggctggctggaacgggagtcccgggccggggcagagagaggtgagcggcgcctgggaggccagtcccaccggaggataggggtgtaggtggacgggaggcggtggagggcagggacggggcggacagtgggggctgaggcgggagacggccccgatctgcgcgtcccacccccatctccgcccaccaggagccaggccagcagggaccgcgagggggcggccaggttattcacgggagtggggagaccccttaaagcgccctcagggaccggccacagtgggcggggccacccccagccacccacctccccccccaggccccgcccccggcccgcgctcgctccccacgtggccgctgacgggcggggcggcacctcctcttcctcccgcccgccccgcccgccccgcgcccgccaggagccaccgtccgagccttgcggagcgcggcagtgggcgccggctgcccgcagcccctgacccggccccggacggagcgccggccgcaccaccgccctctggccgttgcctcaccgggtaagtccttggcctcggggtccgcttggagcttcaggggaaactgagtccgggaggaggcaggggcgtgcttgggtccag

SEQ ID NO: 13184 - DNA, 2300 bp, Homo sapien
cctcattccctgaaccttgcagctctcatctgggggcagttgtgtccccaggtggcatctggcaacatctgaagacatttttggctgccacggctgggcagggggtgctgttggcattgagtaggtagagaccagtggttctgtttaacatcccataatgcacaggacagtcccacatgtcaccagtaccacagtcgctgaaactctcatctctagggatccgtgggaatagagggggtgatggggctggacaccctggcagacaggccacagtccttagtccaccagggaggggccggctgctgacctgcaccccacactcgcccgtccaggtgagctgctccccggtgtctgcccagctcctgtcggtgctgcagggcctcctgcacctggagcccaccctccgctccagccagctgctctgggaggccctggagagcctcgtgaaccgggccgtgctcctggccagcgatggtgagggggcggggcaggggcgtaggcacagcctggtgggcagacactgaggtcttagaccatgggggggggagcctgcccttggccccaacccatcctctgcccaggggaggtggccgctttttcctgcctcttcctcaagcccccatccctccctctccggctcccttctcccttgaccctggacatcccctactgcagcccaggaatgcaccctggaggaagtggttgagcggctcctgtctgtcaaggggcgacccagaccgagccccctggtcaaggcccataaaagcgtccaggccaacctagaccagagccagaggggcagctccccgcaaaacactacaacccccaagcccagcgtggagggccagcagccagcagcagctgctgcctgcgagcccgtggaccacgcccagagtgagagcatcctgaaagtttcgcagcccagagccctggagcagcaggcgtccaccccacccccacccccacccccacccctgctccctggttccagtgccgagccccctccccctcccccaccaccccccctgcccagtgtgggggctaaggccctcccaacagcacccccgcccccacccctgccaggcctgggggccatggcccccccagcacctcctctaccaccacccctgccaggctcctgtgagttcctgcccccaccacctccaccactcccgggcttgggatgcccgcccccacccccacccctgctgcctggtatgggctggggccctcctccacccccacctccactactgccctgcacctgcagcccccccgtggcgggaggcatggaggaggtcatcgtggcccaggtggaccatggcttgggctcagcatgggtccccagccatcggcgggtgaacccacccacactgcgcatgaagaagctgaactggcagaagctgccatccaacgtggcacgtggtgagggtccccagacccccaagggaagcttcccctaggacgggggctggtctctgctggggagaggggcaggtggcacatggaacttgtgtgcgcgtcctgcccgtgcgtggccagggcagcctggcccttgctctgggctcggcgcctgtggttgaggtggggacgggggaggagcagggcaggggctacctctgaggacccccctccacatgctcccgtgagccagtgcatctggggtgccatggtgccctggggccctgctacaggtgctcaggtagggaggtagggtgcctgctgtacgctggacctggacctactgggccccaggcaggacatcctttagaccctctgggaggctccagcccctgcctgctggatcgccaggccccggggctgcgagagcctcactggccgtgtccccacccgacagagcacaactctatgtgggcgtccctgagcagccccgacgccgaggctgtggagcccgacttctccagcatcgagcgactattctccttccctgcagccaagcccaaggagcccaccatggtggccccccgggccaggaaggagcccaaggaggtggggacggggaggggactcagaccggggccgcctgcctggccaccctccggtaccagcctgttgggtggggggttttctagatcactttcctcgatgccaagaagagcctgaacctcaacatcttcctgaagcaatttaagtggtgagtgagggaggtagcccccatcccaggccacggagcctcgcctccacctgagccttctgacttgggcccagcagtgccctctgcaggccgccatgggaagtgcacactgcatcccctaggcaggattgtaggcgggtaatag

SEQ ID NO: 13185 - DNA, 2300 bp, Homo sapien
cctcttcctcaagcccccatccctccctctccggctcccttctcccttgaccctggacatcccctactgcagcccaggaatgcaccctggaggaagtggttgagcggctcctgtctgtcaaggggcgacccagaccgagccccctggtcaaggcccataaaagcgtccaggccaacctagaccagagccagaggggcagctccccgcaaaacactacaacccccaagcccagcgtggagggccagcagccagcagcagctgctgcctgcgagcccgtggaccacgcccagagtgagagcatcctgaaagtttcgcagcccagagccctggagcagcaggcgtccaccccacccccacccccacccccacccctgctccctggttccagtgccgagccccctccccctcccccaccaccccccctgcccagtgtgggggctaaggccctcccaacagcacccccgcccccacccctgccaggcctgggggccatggcccccccagcacctcctctaccaccacccctgccaggctcctgtgagttcctgcccccaccacctccaccactcccgggcttgggatgcccgcccccacccccacccctgctgcctggtatgggctggggccctcctccacccccacctccactactgccctgcacctgcagcccccccgtggcgggaggcatggaggaggtcatcgtggcccaggtggaccatggcttgggctcagcatgggtccccagccatcggcgggtgaacccacccacactgcgcatgaagaagctgaactggcagaagctgccatccaacgtggcacgtggtgagggtccccagacccccaagggaagcttcccctaggacgggggctggtctctgctggggagaggggcaggtggcacatggaacttgtgtgcgcgtcctgcccgtgcgtggccagggcagcctggcccttgctctgggctcggcgcctgtggttgaggtggggacgggggaggagcagggcaggggctacctctgaggacccccctccacatgctcccgtgagccagtgcatctggggtgccatggtgccctggggccctgctacaggtgctcaggtagggaggtagggtgcctgctgtacgctggacctggacctactgggccccaggcaggacatcctttagaccctctgggaggctccagcccctgcctgctggatcgccaggccccggggctgcgagagcctcactggccgtgtccccacccgacagagcacaactctatgtgggcgtccctgagcagccccgacgccgaggctgtggagcccgacttctccagcatcgagcgactattctccttccctgcagccaagcccaaggagcccaccatggtggccccccgggccaggaaggagcccaaggaggtggggacggggaggggactcagaccggggccgcctgcctggccaccctccggtaccagcctgttgggtggggggttttctagatcactttcctcgatgccaagaagagcctgaacctcaacatcttcctgaagcaatttaagtggtgagtgagggaggtagcccccatcccaggccacggagcctcgcctccacctgagccttctgacttgggcccagcagtgccctctgcaggccgccatgggaagtgcacactgcatcccctaggcaggattgtaggcgggtaatagccccatgctgccccagctaggggctgtccaggctcccagggacagagcgctgggacctccccccacaaggccacagacaagtagtggctaaaccagtgggccctgactctcagcccccgagtcctttcctgctgcgggtgtccagcactggcccgagggagctggctggacccgacccatcctgcatctcctgagcagggcccatggagggtagcgagggtgggagtcagcctgggtccccttcaccgcgtgaccgtgggcaacaactcgactgttctgtgtcccccctgccctggccaccccatgactacgtggggaaaccctgccaggtggggtcccaaagaggctgggtgggggtgactcatgattcactcacccctgcccggtcctctccctgctccagctccaacgaggaggtcgctgctatgatccgggctggagataccaccaagtttgatgtggaggttctcaaacaactccttaagctccttcccgagaagcacgaggtaagaggaccacccccacaccccacccccagttagtgccaccaaccaagggagaggctgtcccgggggctcccagcagggagacagagaagggagg

SEQ ID NO: 13186 - DNA, 2300 bp, Homo sapien
tgcccaccgccactcgggcacgtgcacacacacaagcacactgccactctccggcacgcgcacacacaagcacaccgccactcaggcacgtgcacacacgcatgcacaccgccactcgggcacgtgcacacacacaagcccacaagcacagtcacacacatgcacacaggacacacagacacacgtacacacccccccaacacacacaccctcacatacatgtacagacataagtgcacacacacgggcaccatctctgaaaggggaatccatggggacctgccacagccactgggcagggagagggacaggtacggaccagtgaggcacagctcacgtctgtcaggcacactgtaggtgtccactcccgtcggtggagggtttgcagcccccaggccctgtcctgtgatccttccggtgctgggctgagcctggggaggagccagggagtgcaggggcactggcaagcaggaccacaccccaccgccagggcatctgggggctccgaaccaagagcccctctccagccctggctgcccctgcaggcctgctcaccagccgccagctgcccatcttctgccagctgatcctgagaattgggaacttcctcaactacgtaagtcaggggcagctccccatcccacctggtgccaggggctggtgagactcactccctgcccctcccagggcagccacaccggtgacgccgacggcttcaagatcagcacattgctgaagctcacggagaccaagtcccagcagaaccgcgtgacgctgctgcaccacgtgctggaggtgggccgtggtggcgggggcataatgggagggcttcaagtccccccggacctggggtgtagaggcgtagaggccatacccccatgcccaccactcaggccgccggtctccctgtctcagggctccgtctagagccagcagcctcagtcagagccacgcccccacccctcccagcaccccttccttcctgcagcactggctcccctgcacgagccttgtccctccccaggatacctgtccctgatctgggggacagtccctaggaaaagcagaaacatcacaaagtcatagccaggcccaagggaaagatttgagggtctggagtactgggggttttctggaccttaattgctaagggttagagctgggggagtgggaacagggtcatccccaggtggagagtatgaccacagtggatctcactggacgtgtcccattgcaggaagcggaaaagagccaccccgacctcctgcagctgccccgggacctggaacagccctcgcaagcagcagggtaggtagctcctgccagcccgcccacctcagccaggtgggggcctgacttctgtccccaggcagtgaggtggctgcccgccagggctgggtctcacagctgcagcgcagccccggcgccacggagccctgcccaatagaacacttcccttttgggacaggaccgggtctgccgtggcctatccccttctgacttaagcgaggaaacaggcctagagtgggcaagggctggccaggtcagggtcacaccacgggcaggtctaatacagccccttcacaaggtggaccttcacgacagccgtgagcaggctcgggcctccctcattgtatagatgaggaaacggaggcccaggaaagcagtgtcacctcctgggtcacacaacccaggcaggagggcagcctgggccaccccactacacagtccgggcccctagcacggagttcttcccgggctccacctgccctggaaggttctctggctcaggagctgctcagccttggggagaactaggcaagcaggacaggctgaccgttagggtccccgcccagatgctcacagggggctgagggtcagctggaacaggcactcaaccccaacactgcacgtgcagcctcagagtacagcctgcagggtgcacagtggggtgccggggggtgcaggggaggggctcccctgtcccagcgaggctgacgtcagccgttgctgtctctgcccggccctcctcacctttcaggatcaacctggagatcatccgctcagaggccagctccaacctgaagaagcttctggagaccgagcggaaggtgtctgcctccgtggccgaggtccaggagcagtacaccgagcgcctccaggcaagtgggcacctgggcctggggctggcgggagaggctgccctgatagagtgagctgggcgagtggctgtgctgtctcctggctccagggtggatcctggggcccgagtttccccaggtgtgcatggtcagggcaca

SEQ ID NO: 13187 - DNA, 2300 bp, Homo sapien
tcctcatggtccccttgccactgtccctaccctgtgcctccaggaagtcctcctgacttcactggaaagccctctcctctccctgggccaccctggaggcccctaagactggggacagccgaggggacaggtggtggccgctcagccctcatccctccctccactcactccagctcctccactgtaaccgcaggccctgccctcagtgctgaagcagcagtccagcccgctgggctccagagagatgaggccaggcccactgaccgatgcccttgggctcagagggtgctagaggtggcaggaaaggcaggcggcaaggccctggtgggaggaccccattcctggggtggctgcctcagggtgctgggaatggcatggcccagtgtcccccaccctgccacagtgtagacagaccaaggacgctgaggccgggtcctgctctgagacatcagaggaggctttctggggaggaggttttgcagggcgttcaggtagacagcggaatggaggaggctgcacctgggctggctcgggggcagggtgcctgcccttcactggtgtgtccctccatccagtggccaccagtaaccctgcaggagatcccgtgggcagcacgcgctgtcccgcctctgagcccggccttgatgctacaacagccagcgagtcccggggctgggaccttgtagacgccgtgacccccggccctcagcccaccctggagcagttggaggagggtggtccacggcccctggagaggcgttcttcctggtatgtggatgccagcgatgtcctaaccactgaggatccccagtgcccccagcccttggagggggcctggccggtgactctgggagatgctcaggccctgaagcccctcaagttctccagcaaccagccccctgcagccggaagttcaaggcaagatgccaaggatcccacgtccttgctgggcgtcctccaggccgaggccgacagcacaagtgaggggctggaggacgctgtccacagccgtggtgccagaccccctgcagcaggcccaggtggggatgaggacgaggacgaggaggacacggccccagagtccgcactggacacatccctggacaagtccttctccgaggatgcggtgaccgactcctcggggtcgggcacactccccagggcccggggccgggcctcaaaggggaccgggaagcgaaggaagaagcgtccctccaggagccaggaaggtaactcagggaggggccccgggcaccgtcccacgccagggcgctggcacccagccggtccctccccttccccattgggcactgcaagttccagcggcacccaggagaggtgacttgggtgcggcacgggagaggaggcggcagtgcgtccaccgcagggcggctatgtgggctgccgcggcccgtgcaactattcctccaacctactaattccgaccttcacgccacctccgttagggagtagggggcggacaccgggcaccaggtcccaggcaagtggctgccatgtggcttagtggccagagaaccgggcagccctcagagggtgttggcatggctgtcccgggccccccagccccacccactccgagtcagggttgcttctgtgtgataagccgttgagtgcgtttcttttatttggaagcagaggttccccctgattctgatgataataaaacaaagaaactgtgtgtgatccagtaaggtatgtacgcagccggcgctccgtgggggctaacagcagctgcagggcagtggggctggagcttgctgcccacacccctccgggacactaacctggcttctctccagcccgcgtggtgcgtcagtgtggccttgccgctcccgcagccctggtggtgggcttcccgccccatcccctccctctccgcaggttacctgctcaactggtgcctcctgcaggcaggacgcaacctcagtgctggccccgggcatgcgggcctcgagagggcaggtggcagggccagccggactcccttagcaagcaggatccgggccctggggcgtgggcgggacctcctggctggcaggacaggctgaggttgctcctgtctggtgtcctggcgctaactgcagttccagtaaccctgtggctttcctgctctgtctgttggtggagggctatcttcactctaagtgtgtcaatggcgtggggccttctggggcatgtccccaggaagtctgtgaggagaccgggacagtcgcaagggcagatgctgccagggacaagtacactgcaacccccctcctgttggacagtgtcctcccacc

SEQ ID NO: 13188 - DNA, 2300 bp, Homo sapien
cagacaagggccatcgagggcccctggaccagaaagcgaagagggcgttgggggcaggaggcctgtggggccatgtgtgggggccgtctgggtggcgggagctgttggggcagggctgagcgccctcagcagcccactggagaaagcgctgctggggtcctcgtgtggggcccagggcccgacgtggaagcaatggagggctgcagggggtggcagtggggatgaatgagtaaggacagagtgcagcctgggtctcagacagggggtgggggacaggccacagagattccctatctcagcagagaggagacaggctcaggctgccacgccttgccaaaacccagcctggccaggccagcccggcaccttccacctagataagttgtgctgctccagagaaagagcctggggtcagagtggacctgcgatgcatggcacaacctgctggacagtggcgatgaggggttcagggacctgggcacccagaagcgggcacctgatattgtacccagcaaaactgctcctaataatgtcattttttctctctcttacaggcctcaggcccaggcccaaggccaagtgagagagcccaggccacaggacatgctgccattctgccaagagaggctcttctgggggccaggctgggactgggccccggaaaccaaaactccgtgccttacccagccggggccctcctggagccttcttggggtgttgtggctgggaacccgacaggcaccagtgccctgccaggcctggtgccctcctggaccgcctgcacgtgccagcctcccacctgcttcctaaaggcaaccctggcccacacccgcatgcgcccggtgcagcctgccaagggccagtcggggggtgctgcgtcctgccagtgtccaccacagctctgcctgcccttcagcccagcaaggtttaatcaaaatgcaatgctttgcaagtctttactgcttggaggtggctgagttgggggccctgggcaggggtaagctggcaggcagtgccatggcaggccagggtcccctcccatggggtctggcccccgttccagcatgtccagcccctgaagttggagtggggggcggtctgcctttgctgccactgccaggcctctgccctgcagctgaaacttggccatcacatcaacagaaaacccctcccagtgccagctgcccagcgtgggcaggccctggggacaatacaggtccacctgaggggctgcagggtgacacccagcagccgctgccccctcactgcccacccagcgagggcagcctacccgagcctgccccctgccaggtgtgtgccctgaggctggcggctggatgcgtggccaataaaaagcagacctagcccggtgtgcgactgtcgtgttcagaggctgcgggagtgggcggtggacgtgggctcccacaaacatggtgagcgctggacaggccccgtgtgaacactcactgttgaggggcccccaggccccgtgtgaacactcactgttgaggggtccctgggcccccaggcaccgtgtgagcattcactgttgagggtcccccagtcccccaggccaggggctgtccctggagccctcaggaggcagtaagaaacatctagaagagggcagacccagtggtgaaccgcatccaacagtggtgagatgggtgcagctctacaggggcgtaatttacaaaccaccagactccctggttatgtgtgtgctgcggtggtgtttgctctccagcagatcaagtttgtgcaatgatccattttgagaatctctccgtcaccccaagaagtcctctcgcacccatcagtccgaccccttccccgtgctcctccccagccctggcagccactcacctgcactccagacgctccagatgtcatgcatgtctcctggcttccttcggctgttttcacgcgccatcctcacggcaggctgtatcaggacttcattccatttcatggctgaagcacattccattgcatgcagggaccacattttgtttgtctgctcttctgtccatggacatctgggttgcttccagtttggggcttctgtgaatcctgctgctgtggacatttgcgtagtcctcgtgtggatgctgctgtggacgtctgcgtcgtcctcgtgtggatgctgctgtggacgtctgcgtcgtcctcgtgtggatgctgctgtggacgtctgcgtagtctcgtgtggatgctgctgtggacgtctgcgtcgtcctcgtgtggatgctgctgtggacatctgcgtagtctcgtgtggatgctgctgtgaacgtctg

SEQ ID NO: 13189 - DNA, 2300 bp, Homo sapien
cccacacctggggacaggcccactgtggggggtaaggggtggaggtgttctaattcgggctgagccgtgtgactggcaggggccccagctgttgggcctgggcaggactgtttttagaaaagccccaactccctgcccctacccgggcccgtggctatttatagtccgggcctggagaagtcagtgagtcactagcgttcgcctctgcagggtcagtccaagcccccttagtgaggtggtctagcatgtcccccagtcccccaagcctctatctgacatctgctagcccagagccccaggggtccccaggaagggctcagagctggtggccccccccaggccttggcagcacctccttgtctgatgggactttgtggttcctggtggacatttaacattgtcggtttctctcatctggaaacaaacctccatgacgctcttggtttctcctgttgcagtctgcctcttccctacctgcacagctctctgctgtgccccaaattccctccttgacacccccagacccactgccccaccctcaggtgcagccccttctcagcaggctccaggttctgccaaatctcagagccctccaaccctgctccagccccttcccaagctggggccggtggtctgttcacccccgaccagctgtcacccccaaggtggcactaggaagttcatgcatgaagactgcttttccactgaggccccactgactgcttggaacccatacaacggcattttccccgcaaggatgctgagggagaggaagtgtcgatgtgcccagtggaagaagaggggactggggacatgggtgcagggggcaggaggccaggcttcaaacagcccctctcccccaggctggggcacggtcaggtgccaagagaggaggggtggggaggctgcaggcaggggtgggcagtggtgtccttggctgcacctgaatcactaactcagtgtgagcgacctttgctgtgacaggcccaagctccactccttcctcacagggagtgtcccgtctccatggactccctgtcactagccttggagttgccctgagcccaaggggcctcgtggctccaggctctttggcaactgagagccgtcagggagggaacaaaggaccccgcctccctgctctgaagcaagaacctgattctcttttccgcccttggggccccaggacccttctcttggccaccagggctggcttcctccaagcctcatctacttgggaggggtggggcgggatgggtgagacaggacaaccagccgggaacacgggagcctcgcagaccatcgcctccctctggggcctagtccctccacaggctgggccgggaaggtctggtgtgggacctcttgggaacctgggccccacggtggcgtgcatccctgggggttgctcccatgccagccaggtgacgctgacaggatgggtccctttaccccagacttgggtgctgagggccggagctccatgctggagcccgcctgctcgctacagccaggcccgagccacagcgcgcccgggcgggacgcggggcccctgccgtggggcagaagtgcgggcagttgcggggacacaaagtcctcggagaggacgcgctgcgcggctcttcgcggccgccagggggcgcgcccgcgcccagggcactcggggttccacggggggcaggtgcgctcctcgagagtgcggaccctctaggtggggtgcaggacgcagctccccttttgcaaaccgcactccttccctggagggaacgaccacccctgcagttgctggaaccccgaagtcctgggcccggcaagggcttggtggggggtgaggtcgcggtgcacaagccctggtccccgacgggctagcgagaaactgcctccgttggcaaattcgtgggggcggctccccaggccatctgcctgcctggccgttggtccgtgcggcccctcacccctaaagtgctcgagactcaactgggcttcccgggcagcggcgagggggcggggatgtggcggccggaggtcaccggggcgtcactgcgcccgccctggccctcccccggcccgccccctgccccgccccctgccccggcccggctccatttaatggcgcggacgccggcggcggcgggctcctggccgggccagcgcagcggaagagccaagccagcatgtcggggacccgagcctccaacgaccggccccccggcgcaggcggcgtcaagcgggggcggctgcagcaggaggcggcggcgaccggctcccgcgtgacggtggtgctgggcgcgcagtggggg

SEQ ID NO: 13190 - DNA, 2300 bp, Homo sapien
acttcctctggataactgggctccctgccgaggaccacagggctccagcgcgccctggtcagggtttagaatccccgtccttctgctgcagtgctgacctcagggcactgggctgtttatgtctggccatgcccagtacacgggctgaaggggcctgccctgggtctccatagcgcactcccagcctcccgtgccctccaggtctagctagagccagtgtccagccagcagacgggtggaaagctatggccatgtatgcaggggtgtgagatcacagggtgtttctctgtggtgtggcagcgccaggtgggagctggcatcctgtgcattgagggcccctgtgctgtggctgttggggctctgggcaccctttccaaggggccatcaggtaacgctttgccttaggctccagggtgcaccagagaccttctgggagtcagaggggcagctgccttggccagggaatgcctggggttgcttccagaaagaggtcttccccctaccccacctctgcactgttgatggtgctggttactgggccgtggctccaggacagagggtccctgcagttacacacagccctgcctcattgcaggaacaccagtcccgggcagctgagacctgcacacctgtagcagtgacctcggttctgtcccagacctcaccccactaccaaaaggggcagagaacaattcctttgggttgaaggaatgaatgaatggtgggagcctgcaagcagagcccagaagggagtgaagcagtgtaagtgggtgaacccactgcaccacactggtagtcacaggtgtgtgcacactgggcgccagggccccttgctctgtgccgggcacagtcgtcgtacaaactgccattgagtgccagtgccaagaggttgggcccaggagcctcacggcctctgaaaagcaccgccggcctccccctgcgcttgccactctgctgccttcactgcctggcgtgagctcgctgacagccaggccctgggccagggctggggatggacacagaggcaggagagctggtcgctcccattccagggggagaggtgcaaacagccactccactgtcccctcctccccaagcctgcatgagagctgaaccaggaggtggtatagcatgggcctggcacagctagggccgagggggaagcgggcagagtgcagtggcgttgaggcacggcgccgtcagacatgcagtccgctaacgctgtggggaggagaaggctctggagcatgggaggtagcgagcctcgtccaggtgttgctgcaggtagggctgacgatgggggctgcattgcaggggagaaaggggcctccttgggaaccctgggccaagcagacgctgtggccagaggagtcatccatggcagtaaagggcctatggactgcagggcagagaagggcagtggcaagtgggccgggagtggagggggccctggcaggtcaaaggaggtcaatggacagcccccaagccaggcagatggcaggtggcatcccaaggatttagggacggggtggacaggagcaggacgatggctgcagggcaaggctgggacccgcacgggtgacaagctcagtgcaggggcagggcatgcgccatctgggcagtgtggaggtgaggagcaaggacaaagcctgtgtgtggagacgccttgcacgtgtcagcagcatggcgtcggcgtgggagggaggaggtagcgtcggcgtgggggaggagcgtggcgtcggcgtcgtggggaggagcgtggcgtcggcgtggtggggaggagcgtggcgtcggcgtggtggggaggagcgtggcgtcggcgtcgtggggaggagcgtggcgtcggcgtcgtggggaggagcgtggcgtcggcgtcgtggggaggagcgtggcgtcggcgtcgtggggaggagcgtggcgtcggcgtcgggaggagcgtggcgtcggcgtcgtggggaggagcgtggcgtcggcgtcgtggggaggagcgtggcgtcggcgtcgtggggaggagcgtggcgtcggcgtcgtggggaggagcgtggcgtcggcgtcgtggggaggagcgtggcgtcggcgtcgtggggaggagcgtggcgtcggcatggtggggaggagctgtggggtggcaacccagaggcaaggaggtgggcagaggcccacgaacctggccctgaccctcagctcgtccccagctcacagcacagccctcccctggctgcctccaaggagtctccagttactgagtggccactccgtgccagctcagcccacccctcaccttcccagtgcctgtggag

SEQ ID NO: 13191 - DNA, 2300 bp, Homo sapien
ggtggtggtggatgggaaagagtacgacttccacctgctgcccagcggcatcatcaacaccaaggccgtgtccttcattggtgagtgccctgccccgacctgtgtgtgagcaggaaagggggtgtcagccagcccaggagccccacgcatgggggcacggggcaccagagcctggtgatgactgctctagcagtaggctggaccccagcctccacctgccccaccaggcactggtgcacagaaacctgcatagcccgggcctgggctgggaacgcagctgagaggacacagggctgatgggaggaggggcagagtcacatccaccgcgcaggagcgggagtgcctgatccctgatccctgatccctgatccctcacatgcacatacttcctgtgtgggcatggagaccacacgcccatgtgcccgtgactccatgtgcatacctgtgagtgagtatgtgcttgcgacaggcctggcttctcgctgcgtggcgaccaggctgtgtggacaaggccgtgccctccccggccctgccgagccatgtggccgtcctcttgcctgggctgctgtggccacgtggcaggcctggttccagccccttcccagtccgtgctgcagagggacctccttccacatcgcctgccccctcctgggtccggacacagctcctcccctgcagccacctgtgaccactcagtgctccaagaggcgagccacctctgtccccagggttccgtggctctttccctccttctctcggtcagaagcctgctctgtgcaccctggcctcagctcttagcccaaaacccccttgctcagagaagcttttcctgatcccagtggccaagccagccaggccccttcttgtactttcccttccagctgtttccagacttcagcaaggccatccttgtgatgtatctgaccccttcccagcccgtcaggaagtgggggtcaggcgcctcaggtgtgtgcccagcagatgcatgggcctggacccattcaatgtgagcagagggaggaagatagcgcggaggtggctgccgcaggggccatgtgtggtcaggggctgagctggagtgactcacccaagaccatcccctggggtgcagacccagtccctggccctcccagcagtggggccaggacagtgtgggggcggtccctagttcacagcagggaggccctaagcagtgaggtggcctgcccgccatgtcgcaggagcccctagccctggcagactgggcagtagcgctggctggccgctccgggttgtgctgcaggaagcccttctccagccgccagcctcgtcctgcccagccctgggccccacatggcaggaaacaaggccaaagaggcaccgcttagcaagcggcaggacgtgccagggctcacacagacaccctgagcttgcaacactccgggcctctgccgcgtgtttatttcaggatgccgtggcatttgggtgaccttttgtgctcaccatggcttgcgtcgtctccgggtcactctcgtctggactgaagtcccgtctccctcagctgagcctgtgccatggccagcctcagcgggaactggcaaagggaaaggggttccttggggaggcagcaggggtttctgaaggcttcatcttcaagcaaggggtttagagctcaggagtgtatttgtgtttttttgttttttgtttattttgagacagggtctggctgtgtcactcaggctggaatgcaatggcacagtcctggctcactgcagcctcaacctactgggcccaggggatccccctgcctctgtctcccaagtagccaggactacaggcttatgccaccgcacctagctgatatatatatatatatatatatatatatatatgcatttttttttttttagaaatggagtcttgctgtgttacccaggctggcctccaactcctggcctcaggcaatcctcctgcctcagcatcacaaaatgttgggattataggcatgagccaccatgccccaccagagcggtgcatttgtgacaatcgatgaacctacactgacaggtcatgatcacccagagtacatagtcacctctgggttcacacttggtgctgtacattctaccagtctggacaaacgtatgctgtgtatctgccactatagtatcgtacagaattttttactgtcctaaaacccccgagctccacccatttcattcatctctcccccctcaaccctcggcagccactcaccttatgctgtctcctcagttttgccttttccagaatctcagagttggaattgtacagtatgtcgc

SEQ ID NO: 13192 - DNA, 2300 bp, Homo sapien
gccaacacggggaggggcggacgccatccagagaggcttgagagggtgcagggatacatatcgggagatacacacacccctgacccccaaagccaagctgcagggccaggcccgcctcccccagctgcccatggcaggaggggaagacagcaaggctgcccgtgccttccccagctcacaaagcctagtggtctggtgtgttcaggaagagcgctcgccggctcgggtggcattgtgggccaggccttgcccattgtgagcctcagctgctggacaggcttaccaggggtgtggggatgtccgggagctggatgtaaggactgtcggtggaggcggggcaccctcagggattctgagagctgtgtgcagggaggagggggagcagcagggccaggctgcacaaggctcccacgacagctcacatgacgtcctccctgttctcatgtaggagattggaggcctgctgcagacccgcggccacgagtggggagtgaccacaggcaggaagaggcgctgcggctggctcgacctgatgattctaagatatgctcacatggtcaacggattcactgcgtaagcaacccatgctgccatccccactgggaccgtccctgactcccgacacctgcagaggcaagcagcacttgacgcaggggctgagggccaccaagtctccttggacaaggtttccactgatctcgacccttccacaaagcacggcccagaggttagcggtatggaggcctgtgcagggtgtgttggagccagccgtaggagcacaaactcccaccccagggctgatgccgtgaaggatgagggcatcccggcacttgtgagaggttaaaatgcttcatgtggagagcggaagtacccaggacgaaaggatgcactgtcatcctgctagaaggacggcagcatgggtgccggcctgttgaggcatccgctctgcaggcccctctgctttccacagactgacccaggctgcccagctgttcgggctgtctcccagggatctgaaagaggctttgtgtgaggggtgggctcacagcttcctttccagctcagtcagacaggccaaggctgtgagtcgcacatctttcaccagggttgagagcatcagccaaaattcctggagaattaaccagacccctgctaggtgggtatagagctaatccggcaacgggaagcagaggaaccgagtagctgagggtgtggcgtctgggatccgtgaccctcactttccttgtgcgcgatgcagggttcacggcgcagcctcatcacgtgctagggccagcatggaggacaggcagggtcagcagtgctcagcagacccatccatagcctgctgcatctggcgccccttcaggctttgcccacggagggaggaaaaacagagcccatggcacagggcctggtgccgaagatggaccaggaagggaggctgccatcattggcatcagtgggtgggtgggcagggaccaggaaggtgactaggacaagggtgccatgctcacgggctggacacagggcagtgctgggccctaaacacggctgtgctgtggggaaagtgcacgtgtggggacgggaggggagaagtggagcctgggggagcaggggtcccggggggcactcgaggtacaggggacttggaaaggcagagatgaggtgcagggcgtgagcagaagcccccaccctctggcatgtttgtcaatggcgcttttttgggatcacttaatctctcttttccactcagtgtaaatcagcagtccctaacttttttggcaccagggaccagtttggcgggagatgattttcccacagacagggcaggtggcaggggtgtggcggcggatggtttcgggatgaaactgtcccacctctgatcttcaggcattcgattctcacaaggagcatgtggcctagatccctcgcatgcacagttcacaatagggttcaggctcctgtgagaattgaatgacaggaggtggagctcaggccgtaatgctagcttgcccgccactcatctgctctgcagcccaattccaaacaggccaccaaccagtactggtccacagcccagggactggggacccctgctgtaagtaacagaagcgagaggtcaaaagcaagcggaagaaaccccagcactgctgaccacttcttgggtttgcccggccccttggctttccacaggctggccctgacgaagctggacatcctggacgtactgggtgaggttaaagtcggtgtctcatacaagctgaacgggaaaaggattccctatttcccaggtatgtgaa

SEQ ID NO: 13193 - DNA, 2300 bp, Homo sapien
gctagatacagggtgctgattggtgtctttacaaaccttgagctagacacagagtgctgattggtgtatttacagtcccttagctagacataaaggttctccaagtccccaccagattagctagatacagagtgctgattggtacatttacaaaccttgagctaaacacagagtgctgactggtgcgtccacaatcccacagctagacataaaggttctccaaatccccaccagattagctggatacagagtgcccatgggtgcatctacaaaccttgagctagacacagggtaccgattggtgagtttacaaaccttgagctaaacacagtgctgattggtgtatttacaatcccttagcttgacataaaggttctccaagtcgccgctagactcaggagcccagctggcttcacctagtggatcccacaccggggctgcaggtggagctgcccgccagtcccgcgccgtgcgcccgcactcctcagcccttgggcggtcgatgggaccgggtgccgcggagcagggggccgcgcaagagcccacggcaggggggagactcaggcatggcgggctgcaggtcctgagccctgcctcgcggggaggcagctgaggcccggtgagaattcgagcgcagcgccggcgggccggcactggtgggggacccggcgcatcctccgcagctgctggcccgggtgctaagctcctcactgcctggggccggtggctccgattgcggggcccgccgagcccacgcccacccggaactcacgctgacccgcaagcgccacgtgcagcccgggttcccgcccgcacctctccctccacacctccctgcaagctgagggagccggctccggccgcggccagcccagagaggggctcccacagtgcagcggcgggctgaagggcccctcgagcgcggccagagtgggcgccgagagcgagcgagggctgccagcacgctgtcatctctcacagggcgaagcccacgccacaggacgggtcggttctgtacccgccggggcaggggagagccgcctctggtgagcagaaccccggagaagggacgacgcgggtgcacctcgcggcatggggacaccaagtcagacgaacccgctgtgcaagaacattttccacacagcggcgcatacccccgcccgggggcgctcggcagccgcacgcggccctcagagcgcagcccccacacgcctttacttctggaaggcggagaccgccacagtgaggagctaagccagctgaggcaacacagaaaaacccccgttcctacccaaaaccaaaaagcggggcgcggaggcgcgcgcctgcggtcccagctaccggggaggccgagaagggaggatcgcctgagcccgggaggcgcaagctacagtgagccgagactgccactgcactcagtctgggtgacagagcgagaccctgtctctaaaggggaaaaaagagctaggaagaagcgggctgcctcttaacttcggagaagtaaatgaggaactataaccagtgtctaccgtttaggaaccaaacaaaagctgacaggaatcccgccaccgacccagccgccccagactttgccctggcctatcccgcgccgctcctcaaactagacccgccccgacgtcgccctggcctatcccacgccgatcctcaaacgaggcccgcccccgatgcacaagctccgccctcgttgcaccgtcctgaccctcggcctcgcccccgccccctggctcttcccgcgcagccgaatgccgcgacctggctcccacccttcgtcgcttcgcgccgcataggaaccccgcccctagtctctcctcccgcctatcctgagcggcgcgcgcacaaatctctcccacggacccgcccaccctgatcctcaacctggcccctggcctttcccgcggcgtcgagtccagtacaccgacgcacgagtcccacccccgatctctccctcggcctatcccgcgccgctccgcgcaggagtcccgcctcccacttcgcccgcagcctatgacgcgccgcgtcgctccctctcctcaaacccgctctcgcccgcggatgggcgcgcagctgtgacgtcacggcgtcgttggtaaggggctggcggccggggagctgcgtagctcccggccccgcggccatgcccaagcggagctgccccttcgcggacgtggccccgctacagctcaaggtccgcgtgagccagagggagttgagccgcggcgtgtgcgccgagcgctactcgcaggaggtcttcggtgagtgtcgggcgggctgccgagggt

SEQ ID NO: 13194 - DNA, 2300 bp, Homo sapien
tggcaccagacggtgctccctgctgggtgggtggtgtgatgcctgcccaggcagctgcctgctgtggggtgacttgttcctgctgagttagggcttctgagactttccaggcccccgtgccctctggtggctggtcccttccctgtgcaatgccgagacccggtctgagaaaccccagccctgcaggccatgggggcagaggcccgagccacggctgtgcctcaggttgcgcctcccgcagctgttcttccacctgtcccgggagcgtgtgttctccgaggaccgggcccgcttctatggcgctgagattgtgtcagccctggactacctgcactcggagaagaacgtggtgtaccgggacctcaaggtgcgctggcgggcaggcaggggggcagggccctgggggcctggcggcactgacctgaggccacctttcccctagctggagaacctcatgctggacaaggacgggcacattaagatcacagacttcgggctgtgcaaggaggggatcaaggacggtgccaccatgaagaccttttgcggcacacctgagtacctggcccccgaggtgtgcgccccacctgcgtgcatacgcgttgctgcgtccccacgtcctgagcacacgcaatgctgtgtcctctctgtgccccaagcacgtcacacctcccccggcagtgtcccggacaccccttgatgccgagtcctgcccatctgccacccgtgcaggtgctggaggacaatgactacggccgtgcagtggactggtgggggctgggcgtggtcatgtacgagatgatgtgcggtcgcctgcccttctacaaccaggaccatgagaagctttttgagctcatcctcatggaggagatccgcttcccgcgcacgcttggtcccgaggccaagtccttgctttcagggctgctcaagaaggaccccaagcagaggtgagggccgcccatcccagctacaggctacacctccatcccctcatccccaggctgcacctgcccctgcgccaggcggtcctggcacctcccagactacactgatagccaaagcttgatgtccttggccagggctgatctccaaagcctcaggcccaagcagagtggcgggcaggccggggtcagttgggcctctgtccccaaccctgcagcctgcacccacccactcaggaagcccctgccctgccgtgagctctgtggtgctttgctacccacagctgctcagggacgctgcaccaccggctcccctccctggccccggaacgtcctgtctggcgggccctacatcacaggaggaaggggcctgaacccagggcctgggcaggtggcggtaccgacactgtggccttgtttcctgcctgcaggcttggcgggggctccgaggacgccaaggagatcatgcagcatcgcttctttgccggtatcgtgtggcagcacgtgtacgagaagaaggtgcggctgctccccgcatattcacgcgcacgcatgctccccacatatccacactcacgcatgcacgtggcacgctcgccagatttcccacacactcgccctcacctcaggagcctgctgcagtcctggtacaaggagggccttgctgcaccaacctcagcgcctggtgctcagaggctctggcactgccgggttccaccaggaaactggcctggtcctcatttcctcctcccctcggaggtgtgtcacactctgagtttcctcctcccctcggaggtgtgtcacactctgagtgccagccttggggttcccttccctgacgctgtgcagtgaaggctggctggtggtggaccaggggtgctgccccttggcctccacgagttcctcctgtttgacctcaatcccttctgccgcaaggagagcccagccctatttctggctgtgcagggacagggacagcacctacttttctggcacatgggggagtccgccctggagggaggcagctctttctgcatgagtcgccatcctgggtgctcatctttcagggaccctaggagccctggccatcaccccagctgatggggtctgccagctgggttcggaagcctgcactctgagatgctgggtgccctgtcaccaggtgtgcttctgccccgttcccagcctgcccctcccctgaatgcctgtcctaggctgtgtgcagctggtcgggctgggcagccctgggacccagctgggcacctgttctcccattaacacagggtgccctggtcctggtccccgttcctgccttgaggcctgccaccctcctgccctgccctccaagggtatggggggcct

SEQ ID NO: 13195 - DNA, 2300 bp, Homo sapien
ggaaaactggggttgctgagccctgccaggcttgggcaatgttaccccacccttccctgaaccccatgctctgagctggggccgcagccatgtgttccctgtaagcctggactccccgctgagcccagtaggccaccaggtgtgaagtggacgcctctcctggctctgcctccgactctggggcccctcatgccaccccacgcatgccgaccagctgggcactgttggcagcgccgcttgctgaccctggtgcctgcccatagaccatgaacgagtttgagtacctgaagctgctgggcaagggcactttcggcaaggtgatcctggtgaaggagaaggccacaggccgctactacgccatgaagatcctcaagaaggaagtcatcgtggccaaggtggggccggggcggtggggcagggtggagatgagggtgcggggtggcagctcacccagccctgctttacaggacgaggtggcccacacactcaccgagaaccgcgtcctgcagaactccaggcaccccttcctcacagtgagtgggagcccagatggggctgaagggctggggccaggtagcgactcctggggctgtctctaggggacgatgtcctgtcttcttgggcacgtgagggctttacacaccgtggactccgccgctggtgagacaggcctgccctggagggtcaggctgtggaggtgcccagtgtgggctaggggctgtgctcgctgctcccgtgtgcgggcaggtgggtggggcaggtggccctggtcttccttgcactctgccgaggctccaggaggccccagctccccatgccctgcagccctgcctgccaggcttttgttgaggcccgggctctgtcctgcagaacctgttctggggacttggcccaggaggtatttactgtgaagggggccagggtccagccacttggttagttccaggtcactgtgtttggggacgattctcctgcagatggggcctttgctttaaaagcacagtcgcctgtggtggaaggcgggagggtgggtctcgcctgggagggtgtgtcctccctttgcgaaggccctggtgctgggagcactgtcccctgctgaggtcccaactcaccctggaggacctgagcccaggccaccttgctcacctttcaaacactccttggcacctcaggggctgccggggcccagcctgatggtggcgtggcatgaggcagtgtggtgtggggcagtgtggtgtggggcagcgtggcatgggggcagtgtgatgtgggggtgtatggtgtggggcagtgtgatggggtgtgtggtgtggggcagtgtggtatcgggcggtgtggtatcaggcagcgtggtgtcgggcagtgtggtgtggggctacgggcggtgtggtatcaggcgacgtggtatcaagcagcgtggtgtcgggcagcgtggtgcggggctgccgtcctgcctgtggggccgcagttccagctccccttccttgcaggccctgaagtactctttccagacccacgaccgcctctgctttgtcatggagtacgccaacgggggcgaggtaggggctggggctgcgggggatggacttcgcggcctgtgggccgcccatggtggggccggtccttcccggagcctcggctactctccatggcaccagacggtgctccctgctgggtgggtggtgtgatgcctgcccaggcagctgcctgctgtggggtgacttgttcctgctgagttagggcttctgagactttccaggcccccgtgccctctggtggctggtcccttccctgtgcaatgccgagacccggtctgagaaaccccagccctgcaggccatgggggcagaggcccgagccacggctgtgcctcaggttgcgcctcccgcagctgttcttccacctgtcccgggagcgtgtgttctccgaggaccgggcccgcttctatggcgctgagattgtgtcagccctggactacctgcactcggagaagaacgtggtgtaccgggacctcaaggtgcgctggcgggcaggcaggggggcagggccctgggggcctggcggcactgacctgaggccacctttcccctagctggagaacctcatgctggacaaggacgggcacattaagatcacagacttcgggctgtgcaaggaggggatcaaggacggtgccaccatgaagaccttttgcggcacacctgagtacctggcccccgaggtgtgcgccccacctgcgtgcatacgcgttgctgcgtccccacgtcctgagcacacgcaatgctgtgtcctctctgtgcc

SEQ ID NO: 13196 - DNA, 2300 bp, Homo sapien
cctgaggagcggtacgtgggctgtggcggccaggccaggcacttgggcagccccagcgcttaggagggacacggggatggcggggtgctggcacctctgcctgtagccatcctcactccccagtgctcccaggccctcctcagagcccagtttggaaactggcccagtcctgcctgtggggtttgggtggggaaactgaggctggagataaaaactggctagggaccgggtgcagtggctcacgtctataatctcggcactttgggaggccgaggtgcgcagatcacttgagaccaggagtttgagactagcctgccaacatggtgaaacccccgtctctactaaaaatataaaacttagctgggtgtggtggtgcacacctgtaatcccggctacttgggaggctgaggcacaagaatcgcttgaacccgagaggcagaggctgcaggagccgagattttaccactgcactccagccagggcgatagagcaagactccgtctcaaaaaaagaaaaacccggtggagagggccagtcctccttggggggcggagtcctgcttgggaggcggagtcctgcttggggggggcggagtcctgctggggggcggagtcctgctgggggttggagtccggttgtggggacagagtcctgctggggggctaagcctgggtgtcccccacgtccaagagggcttcgtgaccctgagtgtatgtggccagaccaggtcaagtggtggcctcctcagggctgtctctgggaaccccgacagctgtggaaccacgcttgtgaggctggcgggtgggtgaaagacgtggggtggagctcctgatctggtacaggcctgcagcctcacctgacctcctgcagggaggagtggacaaccgccatccagactgtggctgacggcctcaagaagcaggaggaggaggagatggacttccggtcgggctcacccagtgacaactcaggggctgaagagatggaggtgtccctggccaagcccaagcaccgcgtggtgaggcctgtccccacttctgcctgtgcctggggctgccttggactgtggagggctgggtgggtcatggggtcccagctcggcccaggagacactcagcactccacggcatctccacctaggccggttttccatgtagggcgcagctgcttcccaggtgggtcctcttccccatgtcagaggaaaactggggttgctgagccctgccaggcttgggcaatgttaccccacccttccctgaaccccatgctctgagctggggccgcagccatgtgttccctgtaagcctggactccccgctgagcccagtaggccaccaggtgtgaagtggacgcctctcctggctctgcctccgactctggggcccctcatgccaccccacgcatgccgaccagctgggcactgttggcagcgccgcttgctgaccctggtgcctgcccatagaccatgaacgagtttgagtacctgaagctgctgggcaagggcactttcggcaaggtgatcctggtgaaggagaaggccacaggccgctactacgccatgaagatcctcaagaaggaagtcatcgtggccaaggtggggccggggcggtggggcagggtggagatgagggtgcggggtggcagctcacccagccctgctttacaggacgaggtggcccacacactcaccgagaaccgcgtcctgcagaactccaggcaccccttcctcacagtgagtgggagcccagatggggctgaagggctggggccaggtagcgactcctggggctgtctctaggggacgatgtcctgtcttcttgggcacgtgagggctttacacaccgtggactccgccgctggtgagacaggcctgccctggagggtcaggctgtggaggtgcccagtgtgggctaggggctgtgctcgctgctcccgtgtgcgggcaggtgggtggggcaggtggccctggtcttccttgcactctgccgaggctccaggaggccccagctccccatgccctgcagccctgcctgccaggcttttgttgaggcccgggctctgtcctgcagaacctgttctggggacttggcccaggaggtatttactgtgaagggggccagggtccagccacttggttagttccaggtcactgtgtttggggacgattctcctgcagatggggcctttgctttaaaagcacagtcgcctgtggtggaaggcgggagggtgggtctcgcctgggagggtgtgtcctccctttgcgaaggccctggtgctgggagcactgtcccctgctgagg

SEQ ID NO: 13197 - DNA, 2300 bp, Homo sapien
gcgcggcccgaagacgggagcaggcggccgagcaccgagcgctgggcaccgggcaccgagcggcggcggcacgcgaggcccggccccgagcagcgcccccgcccgccgcggcctccagcccggccccgcccagcgccggcccgcggggatgcggagcggcgggcgccggaggccgcggcccggctaggcccgcgctcgcgcccggacgcggcggcccggtgagtccccgcccgccgtggccgcccgggcctggatttcctccccgcgggccgggccgctttgttcgcggccggtcgggccggggcgcgagccgcggcgccgccagaatggaggagcgggagcaggaagtggccgagcgggcctgggcggggagggcgcggggcgcgcgggcccggccaagggagggcggccccacgccgggcgccgggggtgcaggctgccggccccagcctccctcatgaccttggggaggccgctccgccgggcgaggccgggacccgagagaagggacgccgccgggcctggagctggggctcggggtgcccctgcgggccgtggggctccccgggcgctgggccagcgaggcagccggcggaggtgccccggggttggagaaagactcgccgcggccggccttcaagtttgtgggagggccccggaaggagacttcgtttcccacggacgaaaagttgtacgtggtggcggggtacccaggctagccacaaaggactgtgaccctcctgggccccggaactgcttcctgtcttgggtgggccctggaggtcctgcccgcccatcccagaggccaaggcttggagggcagctggggcttgccccttagattgagtatcctggggcgctagcgagcttggtcctgtcgggacggcctctgagtgctgccttggtcagcgggtgagcttgggcccctgctctgcagccagaggccgccccacattcactcctgggtctctcggccttgctccaggtggccacttcttgactgctttgagtccctcatccgagcgaagggcggacggagtccgttggtgggggtccggttgcctctcccgggagctgtgtagacttctcatacaccagggttctggaggcagatggaggagccctttcgaaaacagagtatttttttttaagttgtgacttaataatagtagcaagaatatgtgcttatggtaaaggcaggcggcaggtacggaggctgtgggaagtcggggtccctccgcccccacaggcagccctgtgctggcctggtgtatacgtttctgtgcagacgtacaccaccctgtgtgagcacagatgtatttttacacatggctctggacagctgtctgactctgtcagcagcaggccttggaggggctcaggcccgtgtgggggtggggggacatccagaggtctttgagtccagccctctgcctccaggccacgcccactcagtgtcgtcagagccccctgtgcctgaggcgtgcgcggctcggagccctgccctcggagtcctgcggtgccttcctcgagtctggcctgctttccatcctgctaagtacttggggcatttccctctttgggtaaggtgtggtcttccctgtcctggcattagacacaaggcagtgggccttcctgccattctaagtgtagcttaagacaatcagtgcaaagcaaccctttgtgggtgtccagcccttgcctcgggaggccagaaaggtggcctggggggagagcgtctaagctggctgtggaaagacccatgttgggatccattccacagaggtcgtcaggggtctctgcctggcctggaggtcccagagaggaccctcctcccctcaggaaggcccatctggaagggtagcagaggactgctcacaggaagagcatgcgaagtgctctttctggggatgcctgtagttggtgatgtgggaactgggttttgagggatgcctaggagttcatccatcagaggggaaatgaggaagccatgcaggatcaatggataaagtgtgctcaggtgagggttggctggtgggccgctgcagggcgggggcctgtccagtgctcccccacttacttgctgcctcccgactgctgtaattatgggtctgtaaccaccctggactgggtgctcctcactgacggacttgtctgaacctctctttgtctccagcgcccagcactgggcctggcaaaacctgagacgcccggtacatgttggccaaatgaatgaaccagattcagaccggcaggggcgctgtggtttaggaggggcctggggtttctcccaggaggtt

SEQ ID NO: 13198 - DNA, 2300 bp, Homo sapien
ttgtcggaggaacttctggctaggaaggggtcggggtggcagtcacctgcactctcctgtgagtgtccaggagaaaggggtctgtgtcccacttactcattccatacccgggccatctgcctcccagtggacttcggactgggtgtccgggctgaccaagtccacccagcagggagggctctgggctgtcagctgtcacagcccaccctagacaccgctcctcctctgtctggtgtctgctcccagctcaaggtgggagccaggcaaggtgtgcccctcttctcccactccccagcaaagtcccccttttgtgagtgtagctgccagtacctaggtgaatggttgactcccctcggagccttcctgctccttggaggcccacctccaactgacctcctgtcctggcatcctcccgcacttcccccagaggcacaaggtcttgggattgggccttttaggtcactcttggccgccccctccacgccccccagagtggggcagcctgaaagtcaacctaagccacccccgccccgcgcgcggaggcagaagtccgggattcgtccctgacctgtctcgggccccttctgctagggtcacggcagagcgagcccagaagcgccgggtcactttacagacggggaaactgaggccagagagggcgtggccccgggacgggctggctggtggccgggctccgttagcggcccagcccaggccccaggtcgtcgggagctgcccctcagcccggccgcgcgctccccgagcgcgctccgccctcgccgccggccgcgcggtggggacgccccgggcggcggaggcggatgtgggcgggcggctccgggcgcggggcgggcgcggggcggggagagggcgggccggcggcggcggcaggaccgagcgcggcaggcggctggcccagcgcacgcagcgcggcccgaagacgggagcaggcggccgagcaccgagcgctgggcaccgggcaccgagcggcggcggcacgcgaggcccggccccgagcagcgcccccgcccgccgcggcctccagcccggccccgcccagcgccggcccgcggggatgcggagcggcgggcgccggaggccgcggcccggctaggcccgcgctcgcgcccggacgcggcggcccggtgagtccccgcccgccgtggccgcccgggcctggatttcctccccgcgggccgggccgctttgttcgcggccggtcgggccggggcgcgagccgcggcgccgccagaatggaggagcgggagcaggaagtggccgagcgggcctgggcggggagggcgcggggcgcgcgggcccggccaagggagggcggccccacgccgggcgccgggggtgcaggctgccggccccagcctccctcatgaccttggggaggccgctccgccgggcgaggccgggacccgagagaagggacgccgccgggcctggagctggggctcggggtgcccctgcgggccgtggggctccccgggcgctgggccagcgaggcagccggcggaggtgccccggggttggagaaagactcgccgcggccggccttcaagtttgtgggagggccccggaaggagacttcgtttcccacggacgaaaagttgtacgtggtggcggggtacccaggctagccacaaaggactgtgaccctcctgggccccggaactgcttcctgtcttgggtgggccctggaggtcctgcccgcccatcccagaggccaaggcttggagggcagctggggcttgccccttagattgagtatcctggggcgctagcgagcttggtcctgtcgggacggcctctgagtgctgccttggtcagcgggtgagcttgggcccctgctctgcagccagaggccgccccacattcactcctgggtctctcggccttgctccaggtggccacttcttgactgctttgagtccctcatccgagcgaagggcggacggagtccgttggtgggggtccggttgcctctcccgggagctgtgtagacttctcatacaccagggttctggaggcagatggaggagccctttcgaaaacagagtatttttttttaagttgtgacttaataatagtagcaagaatatgtgcttatggtaaaggcaggcggcaggtacggaggctgtgggaagtcggggtccctccgcccccacaggcagccctgtgctggcctggtgtatacgtttctgtgcagacgtacaccaccctgtgtgagcacagatgtatttttacacatggctctggacagctgtctgactctgtcagcagcaggccttgga

SEQ ID NO: 13199 - DNA, 2300 bp, Homo sapien
ctgctgggacctacacagcccagggccctcgagtcctgcccccggccagcagctgcagaaggtgacagggcaggaggcccctgagctctgggaggaggcagccgtcgggcccttccctggtgcagcagtttttgtcggaaacatctggccacagagcacctcagcagtcccagcagcagccgtggggctgggttctctcctgaccattctgtctggggtgggagggggtgttcttgaagagaggactctgctttccctctgggacgctggaggagagggagatggccctgcccactgggagatccccgtcttgggggagggcagttcatgccaaggtgaagacaggactggagtgtggggcccacagtgggttgcaggcaccagcagatgccagggcaccaggctgggaagactgggaggcctccttggagacagccagtgcaaaataagcaagaggtccaaccacttcaagaacagcccgcaatgtcactgcctcttccatgagagggtgccctgctccctcccacatccccaagcctcggccacttgctggccttgtctcatggccctcttaccctctgcttcctccctgaattccttcctccatccttgcatggcagagcccaggatggtggacagataccaggaactcttcctcggggagcagtgggcaggtgggacagtcccagagggagccccaggtggctcatggtgcaggtttgctgggtgagagacagacaccagacgcccaggctctgggggcaacccttgtgtcaggtatcccacccaagcggcgcagaccactgggcctctgacttggccccctggaggtgggcccttcctggggttacaaagtctgagctgggagggagcagaggtgctcaggcgagaggcaggaatggggagtcccctgtctgaggagcgagtgccctcatgcagggggagagagtccttctcttggtcagccccaagaggcagggatgaagcccgagttttggctgcagactctgtcctgagcactgggccgaacctgctgcctctgtctgcatctcctcccaccccctcccctgctgccagctgaactcactctggctgaaaataaaaatgctcccccaaccccaatacttagcagcctcaggaaggtaactcacaagagtctgtctttcacaaaagggttattatcaactgtgggcctctggaatgggggaggggcagttgtcggaggaacttctggctaggaaggggtcggggtggcagtcacctgcactctcctgtgagtgtccaggagaaaggggtctgtgtcccacttactcattccatacccgggccatctgcctcccagtggacttcggactgggtgtccgggctgaccaagtccacccagcagggagggctctgggctgtcagctgtcacagcccaccctagacaccgctcctcctctgtctggtgtctgctcccagctcaaggtgggagccaggcaaggtgtgcccctcttctcccactccccagcaaagtcccccttttgtgagtgtagctgccagtacctaggtgaatggttgactcccctcggagccttcctgctccttggaggcccacctccaactgacctcctgtcctggcatcctcccgcacttcccccagaggcacaaggtcttgggattgggccttttaggtcactcttggccgccccctccacgccccccagagtggggcagcctgaaagtcaacctaagccacccccgccccgcgcgcggaggcagaagtccgggattcgtccctgacctgtctcgggccccttctgctagggtcacggcagagcgagcccagaagcgccgggtcactttacagacggggaaactgaggccagagagggcgtggccccgggacgggctggctggtggccgggctccgttagcggcccagcccaggccccaggtcgtcgggagctgcccctcagcccggccgcgcgctccccgagcgcgctccgccctcgccgccggccgcgcggtggggacgccccgggcggcggaggcggatgtgggcgggcggctccgggcgcggggcgggcgcggggcggggagagggcgggccggcggcggcggcaggaccgagcgcggcaggcggctggcccagcgcacgcagcgcggcccgaagacgggagcaggcggccgagcaccgagcgctgggcaccgggcaccgagcggcggcggcacgcgaggcccggccccgagcagcgcccccgcccgccgcggcctccagcccggccccgcccagcgccggcccgcggggatgcggagcg

SEQ ID NO: 13200 - DNA, 2300 bp, Homo sapien
ctcaacaaacatttactgaacacccacttgcgtcctgccaacttttaagcaccaagtgaccaaacagccccttccctttcagaaggtgctggaatatcccacaatcacaggacacccggaatgggctggaaaggagggtatgcagcagaagggactgcgagggaacttagcgaaggtgggcaggaatggccaccctgactaaggagtggactttcagcagagacagggatgaagagaaaccagtgaagggttctttggggaagaacattccagagcctgagagcttgctgagtgccaggccctgtcgttaatgttcacgaagaccccgggatgcactctgactcccattttgcagatgaggattactgaggttcaaagaggttaaaggtttggtcgtgctcaaggttgggaggggccggggcagggctgtgatccaggcagggcaggaagggagcagtcacatctgagttcacccttaacttacttgaattcagctattcctgctggtggctggggcaaggcagatgattatttaaatgcgtggagagaggggagttgaccttcctcaggaaggggtccttagggtggatggccggcggcagtgggagccaggcctctgccgtccctaagctagtctcagtggctgtaagtgcagtgtcattccaggggtccaagctgcagttgccaggtttaggaaataaagatgcagtccatccggtgaaacaaggaatgatattttagtataacaacgaggccttccttcccagacttcagatcccactgtgggctccactcctcctgcacacacatacctggccgggtcctgtcctttgtgatccagcccctcttccagcaccacccccaccccactgcttggccttgactggggtgactcctccactacattctccatttcccggactccaaggcagagaagaatgagaccggctgaattcaaatcgtggttcagtgacttactgcctgatacatggctctgggtaccttacctaaactctctcaccaaaaaggtatgaaaataagagcgtctagttaatgggactgttgtgaagatgatccggtggtctagagtaccttcaaacctgctcagtcaagggcagcccaggttgtgcccctgggaaaaggctccatctgcctgggagggaccctaaccccgccaaacacactctctacttctctggcgattccctctcccacaaccaggcgtccccctcacatcttctcaatgcttctttgccctagaacactttcccccactcctccctacccccactcccatgccagcccctgtccggagtctcctcctctttgaacacgttcctgcctaccctgggctctggagggcttccgactgtctctgttatggcgtttgtccccccgtgccaccatgtctgctgggaggtgcccgttttccgtgcctctctgcgctgggtcccccatagacgctgggctggggtctgtggagagggtggaagtccccgttctggactctaggatcgacatcctgcttgaatgtttggaagagggtcccagctgaattaaattcaaaaagaggctttcaaggaagaaggaggtgtcatctttgcaaaattaacgacccccaatccacgcaacccctacgccatcccaaggccggcgccctgcgaggtggcgggaggccagggtcccgggtttaccctcgggtgactgcccaacgcgggctgggatacaagcggaccctcggaagggttccttttgcagactggcgcagtaaggaccccatgccgggaaaggttgggaggtgggggacccaggccaaagcgccaagtatcgcgagagaccccctgcccccgcgcagtgccctaaacccccctcacaccccagcgcccctgctggctgcgcgcggggcccggccgggtggggcggacagggaagggggggcgagggtgacctcagcggttccgccgctccgggaagtcgctcggcccgccccctccggcccccgccccgagtttcgctctctctggggcggggcgagcggcgggcggcgctgggccagccaagttggagcgcgccccgcccggcgccctcgccgtccccgcgccctccccgccggggcgcgctgcccgcagctccacgcgcgccagggccgccctggggagggcgcgcgcgcgagcggcgaccggagaggagctcggggcggcggaggtgagcgctgggggtgggctcccggctctgcccgccccgcccgcccgccggccctctccccgctccccgcggccgcgctgccataaatggggccg

SEQ ID NO: 13201 - DNA, 2300 bp, Homo sapien
tgttgtgccctcacattgcaaagagagcaagctccagtctcctccttttcccgtaagaacatcagtgcctccaccctcatgacctcacctgaacccaacgacctcccaaaggtcccgtctccaaatatcatcgcattggatagtaagatttcctgtgaattttggggggacgtgaacatgcagtccataactttgaaacatacattactgggggagctatgggacaacagcaccctctactacattactggtaaggtataaatgggcacacacctaattcagatggcaatttgatcactgctgtccacattataattacataagtgttttgacccagcagttctggaaattctatcccataaacttgcacataagcaatacgatctcggtataagggtatttgttggagtattgttcagtacagcaaagcactggaaaaggctcaatgtccatgggcagggggccagctaataaatcatggtccatccattgagcagaatactatagtcacaaaaacgaaggcactcttttgcagcctttgggaggtcattaggtttagacggggtcctgagtataaaagagtgtgaagaatagggagtaggattgtaccctgtcctcccgtggtgtaaagagaagggaaactggatgcacatgagcacagtatgcgttttcacatgtacgaaatacttctggacagatcaaaagaggtttggttgcctgtggggagggaactcggtggctggaaaacgagagagggtaacttttaaacttttgaaccatgttaccaatcactaattatcaattcaatggattagcttaaaataaaattcaaaattgcttccttgatcccttacctccttccacttttctgccctttccggtcagcgttctcacatgactggccacttcagtgtactttctctttccttttttcctaagtattgttttaatctttatcctttgtcattaaaaaaatagacattgagactccctgtggcctgtgttccctgcctaccctgtacctccatccccactccatttccctgccttcaaggaaccactattagtttcttgtgtattctccagtgtttcttttcgcaactataagcaaatattttcccccattaccacccaaaaagcagcataccatgtatgttgttctgcaccttgcttttttcacttaaaaatagattgtaggccaggtgcgatggctcacacctgtaatcccagcactttgggaggccaaggcaggcagatcacctgaggtcaggagttcgagaccagactggccaacatggcaaaatcccgtctctactaaaaaatagaaaaattagccgggcatggtggcagcgcctgtagtcccagctactcgggaggcggaggcaggataatcgcttgcagctgggaggtggaggttgcagtgagccgagatcacgccgttggactccagcctgggcaacagagtgagactccgtcaaaaaaaaaaaaaaaaaaaggagattgtagacatctttccatatcatataggaacttttttttttttttcttgaggtggagtcactctgtcgcccaggctggagtgcagtggcaccgtatcggctcactgcaacctcgtttcatgggttcaggcaattctcttgcctcagcctcctgagtagctgggattacaggcgcccaacaccacaccggctaatttttatatttttagtagagacggggtttcaccatgttggccaggctggtctcgaactcctgacctcaggtgatccacccgcctcggcctcccaaagtgctggaattacaggcgtgagccaccgcgccctgccaagcaacgtcacttattacccctgctgacttgggagcaaatgtcacatataaattcccccacgtgcggaggtgtttccctttccttgctgtgtctgcattcgacagcagccacgctaagcggctggaccaaatggagcatcataacgtgttattttattttatgattttattttatgttttttgagacagagtctcgctcctcccgtccacctgccggcgctcctggggcttcgggccacggctgtctcctccgggagcggcggcgctgtaggaagcctggtcctctccctcagcggtcacagccatcgctcgcgtacgcccccggactgacgcctcccgccgggagccctcttcgaatcccgcctgcgcaactcccacgccacagccctgggccatccctgctcccgcgcagccccggccgcctgcctcctacctcgcctccccaaggccccagcgcgccggggcttccctgt

SEQ ID NO: 13202 - DNA, 2300 bp, Homo sapien
atctacctccaggattcctgttatgggagaaaaataaatccctattggttcaaatcaccacacttggagtttctgctgtgaagccaaaagtgcttctgatacattatccatctacgtatccatccatcctatagttaacaaagtttttatttatttattttttagagatgggggctcacaatgttgcccaccctggctggtctccaactcctgagctcaagcaatcctcctgcctcagcctcccaaagtgctgggattatacatgtgagccaccacacctggcctagattttaagcaaatgagtgacatggttaaacttgctttttagaaaggattggaggaggctggtgtggtagctcatgcctgtaatcccctttgggaggccagggtgggcggatcacttgaggccaggagttccagaccagtttgaccaacatggcagaattccatctctactaaaaatacaagtggcacttgtagttacttgggaagtactacttgtacttgggaagctgagacatgagaatcactggaacccaggaggcggagattgcagtgagccgagatcacgccactgcactccagcctgggcaacagagtgaaactccatctcaaaaggaaaaaaaaagcctctgatcccagcactttgggaggctgaggtgggtgaatcacttgaggttagtagttcaagaccagcctggccaacatggtgaaaccctgtctctactaaaattacaaaaattagccgggtgtggtggcaggcgcctgtaatcccagctactcgagaggctgatgcagaattgcttgaacccgagaggtggaggttgcagtgagccgggatcatgccactgcactccagcctgggcaagagtgagactccatctaaaaaaaaaaaaattaaggattggaggaaagaatagaggaaacagagggaacgcaggtgaaggagcttattcctgaggtgtcagcctgtaggaagttgttaactgttagcaggattaaagaaattaaagtgttgagggattctcagatttgcaccaaaccaagctctcttagccctctagagtagggatatttttcccccagacctgacgtatcttcaccttttgagacggggtcgggattctccctcatcccactgctgcttctaaaccattcttcggccaccctggagagaaatccgtgttccacccgggcatcatgccgctggtcgcctcacctgggctgagggccagggtcagtccagccagcagacaaaaccaagaaggtcttccccaaagctgggcccggtcaggcaggtggagggctcctctccacagaggcttggcagagcacagtgggaagtgcaaactcccttgggcaatgccgagggtcgggcaggagtatcccctggcccgtaaccaagaagcgagcaaggggaacgcgtcgatggtcacccgcagggatggagaagcagcgccacagggcagcagcggggctcaaaagggggcgtgaggcctcaagaagctcgcagacctccgggagggatgcggcccgcgcctccctgcagttcccctctgcccggccctgcggccgcgtggggtggcctcggcgtccgggagaacagcccctctgggccgactccgtgttcacgcctcagcgtcagtgacggcgccaggcactagcaaggacacagggaggttcgcgtggggctcgggatcaccgccgaatgcgcgtatcgcaccaagtaacgcgcagcggacagccccgcgacacaaaggcgaggaaatcgctggcagcgcccgtcctcgcggccgcgcttttgggaggggagagcgacaacacggaagtcggcacgcgatgactcccgcgcagcgccggcgctagagcccggcccaggcggaaccccgctccgccactgcttgcgtttccttggggggcgcttccggcagcggcgccactcgcggccccacgtgactggcgagcgccgggagggggtgcgcaggcgcgcccatccgctcccgcccgccgggtctcctcagtctggcggtcagggggcccgtctgtctactctgcggacaggtcacgttcggcagcaggcctttgtcgcgtccgtccggccttggcatcagctcggagaaggcgggtgggaggagcaggccgcgatgggaaggaggggaggcccaggagccggcgccggcccttaagagccggacaaggagcccgcccgccgccacgagcaggcgcccgggacagggaagccccggcgcgctggggccttggggaggcgaggtaggaggcaggcggccggggctgcgcgg

SEQ ID NO: 13203 - DNA, 2300 bp, Homo sapien
cgggtgtggtggcacatgcctgtgatcccagctactcaggaggctgaggcaggagaatcacttgaaccagaggcagaggttacagtgagccaagattgcacccctgtattccagcccaggtgactgagcgagagtcctataagctacacagctctggcagcctcatgtcataccctctcctgtcctacctacaagaggggagggaattcagagcacatatcctgataggcaaaatgcagtgattcccacccctgtcacccctgaagcagcgagggtgtgcatttgaaatgcttgcaggtgaggactctggcatctcaccccccagctgggagccagccaagctacattccctgcagacagtcctgctgtctccctgggagcagagcgatccttggggctgggcttattgtccccgaaggtgggctgtccagatgaacgtggagacgatgcccaccaccttgggtatttccgaatgtgggagcccatgagagcagcaggcaccaaactagtaaggaggcaggcagggtggcaggcctggggcgagaacgccctgggtggggcctgcagaaactggagctctctccttcgaactcatttagaggtgcaggcaggggtcagggagtagaccaggggccgaggtgcccggaggccagccatgtagggccgtgaggctggtgaggtttgagagtcagggaccctgaccttcacgccctttctcagggccctgggagggaccccagaaatgtacttgcagagtcatgtgacataatttacataccttaaataaatacacatatctctacatttctctccataccatctgtccatctatctacagtctgccagggctgccaaaacaaaatactacagcctgggcagcttaaacaatggatttttttctttttttgaggcaaggtcttactctgttgcccaggctggaatgcaggggtgcgatctcggctcactgcaacctctgtctcctgggttcaagtgattctcccacctcaccctccccagtagctgggactacaggtgcccaccaccatgctcggctagtttttgtatttttggtagagacccaaaatacaaaaatacaaatttttttcactatgttggccaggctggtcttgaactcctgacctcaagtgatccacctgcctcggcctcccaaagtgctgggattacaggcgtgagccaccatggccggccgacaatggaactttatttctcacagttctggcggccggaagtctgaaaaggggtgtcagcaggcttgggttctccagaggccccctccttggcttgtagacgctgccttctccctgtgtcttcacgttgtcttccctgtgtgtgtcctgatctcttatgagggtatccgtcagatgggattagggacctcacactctagtgaccttatttaaagactccatctcgaaatacagtcacattttgagggataggggttaggacttcaacatatgagttggtgggggcagggacacaatttagccaaaagtaaacaaagaaaacatatttctatattaaaatatacattgtgtgtgtgtgtgtgtgtgtgtgtgtgtgtgtgtatccttgtaccttaaagaggagcttaaagaatgtgcctgttgggccctgcaaaccttcatgtgcctctgcctggatcccagcagagcgagcaccccgtgggcgctgcggggcacgtttggctgcagaggcagcgcctgagcagggaggggtggcgagcaaggccctagccgcctcctgcctttcagtctcctgccagcagctcccactggcggcttcctgcaggaactggcgggaagggggtgatgtcccaggcagagcacagcactgggcggccgatggaggttcatggcacagcccacgtttgcactctgcgtcctgtcctcggtgactgtccttccctaagagaaagaatttctaaccccaaacggaagaaaccacagcggcacttcccacagaaatcggagctgtgttgtgagccactagtaatccctccttagaggtggcagggaagaggatcaaaggaaatggtaaattaacctgcaatacgctgcgtccgggaatagaagctcctgctgcggctggcccactcctcatccctgcaccatggaggctctcccagaggcatgtcaaaaccccagcctgacgaccaagctctgtccactgcccaccaccaacagccaccacttgagcctagatgtgtgcacgcagcggcggcgtccacccaggaggcagaccccaggaagaggcctgccgtctgggaagcaggctca

SEQ ID NO: 13204 - DNA, 2300 bp, Homo sapien
tggacatggacagtggagatagagggtagtgatagacggtggacatggatagtggagatagagggtggtgatggacggtggacatggacagtggagatagagggtggtgatggacggtggacatggacagtggagatagagggtggtgatggatggtggacatggacagtggagacagagggtggtgatggacggtggagatagagggtagtgatggacggtggacatggacagtggagacggagggtagtgatggatggtggacatggacagtggagacagagggtagtgacggacggtggacatggacagtggagacagagggtagtgatggatggtggacatgggcagtggaggtggagggtagtgatggacggtggacgtggacagtggagatggagggtagtgatgtacagtggacatggacagtggagatagagagtggtgatggacagtggagatagaaggtggtgatggacagtggagatagaaggtggtgatggacagtggacatggacgctggagatagagggtggtgatggacagtggagatagagggtggtgatggatggtggacatggacagtggagatagagggtggtgatggatggtggacatggatagtggagttgaagggtggagatggagggtggtgatggatggcggtgatggagggtggagatggagggtggtgatggagggtggagggtagtgatggacagtggagatggagggtggagatggtgggtggtgaaggaggttggtgatggagggtggtgatggggggtggagatggagggtggtgatggatggtggagatggagggtaaaaatagttggtggtgatggaggatggagatggagggtggatggagggtggagatagatggtggtgatagagggtggtgatggagggtggagatggtgggtgatgatggagggtggtgatggatggtggagataaatggtggtgatgaagggtggagatggagggtggagatgcagggtggaaatggagggtggtgatggacagtagagatgaatggttgtgatggatggtggagatggagggtggaaatggtgggtggtgatggaggatggagatggagggtggatggagggtggagatggtgagtggtgatagagggtggagataaatggtggtaatggacagtggagatggacagcggaaatggagggtggagatgcagggtggaaatggagggtggtgatggacagcggagatgaatggtagtgatggatggtggagatggagcatggaaatggtgggtggtgatggaggatggagatggagggtggtgatggagagtggtgatggatggtggagatgaatggtggtgatggacgatggagatggaggatggagatggagggtggatgaagggtggagatggaagatagtgatggagggtggtgatggatggtggtgatggaggatggagatggagggtggatggagggtggagatggtgagtggtgatggagggtggagataaatggtggtaatggacagtggagatggacagtcgaaatggagagtggtgatggatggtagtgatggatggtggagatggacagcggagatgaatggtggtgatggatggtggagatggagcgtggaaatggtgggtggtgatggaggatggagatggagggtggagatggagggtggtgatggagggtggagatgaatggtggtgatggatggtggagatggaggatggagatggagggtggatgaagggtggagatggaaggtggtgatggagggtggtgatggatggtggagatgaatggtggcgatggacggtggagatggaggatggagatggaaggtggtgatggagggtggagatgcagggtggaaatggagggtggtgatggatagcagagatgaatggttgtgatggatggtggagatggagggtggaaatggtgggtggtgatggaggatggagatggagggtggatgaagggtggagatgaatggtggtgatggacggtggagatggagggtggacgaagggtggagatggaaggtggtgatggagggtggagatggagggtggtgatggagggtggagatgcagggtggtgatggagggtggcgatggaggttggtgatggagggtggcgatggagggtggtgatggagggtggagatggagggtggtgatggagggtggagatgcagggtggaaatggagggtggagatgcagggtggaaatggagggtggtgatggacagcagagatgaatggttgtgatggatggtggaga

SEQ ID NO: 13205 - DNA, 2300 bp, Homo sapien
ctgtggctccaagcattgcccacacttgccccccggctcggtcctgggctcccaaatgccacgggacgactggcccaagtgtgctcaggtctctccacctctcaactgccgacctccacagctgcagctgctctcctggcctagcttcccagccaagtgacagccacgcgcactgaccagtgcaggcagagcactgggcaccaggcttgcctccccctccctgtcgagaaagtcaagcgtcctggcaaaagaaagaaaagcacaaatagagaaaatgacttttgtgaagggtcatttaccaaggtgtgaacaaggagcaggccaagccaagaaggtagagaagccctgggtagggcaggaaaggatgggcagggctggggcctctgagggacacgtctggctccagctgggaggaagcctgggaaattcctaagctcacctggaagcaggtgtggtggggccggaggggcagacccagaacaaccagtccctccctgccacctacccacccacacaattgggcagccagttcgtgcccactcttcctcccaaatttccttctctctccttcctctgcttccacccccccccccccccgccctccagcccagggcctgtggttggatgcctggttgctccctccaggcatgttttgccatccactgactttgacacccggagctctctctttcaaaccctcatcggagcagatctcagccagcatcaactcacattatccttgggaagaaatacaggcacccggatcacctggctgcaggtccctcccctggcctccctcctccccaaccttgcaatccaagctcctgccggagggtctttcctgggagccagcccggagtgctcactgccctgctctctccctaggcaagtgagttcccaccaggtgcttggggtggggctcccgccatactcaagggcgcctcttgactccctctgaactcgcaatcccgccccagggtccggcacaagggctctgctggggctgagatccgtgaaggcagatgcggagaggcgccgctggattgcgagcaggcccaggtgcggggccaggtgggcgttgtcgcagccgggaacgcccagccgctccagctgcccacaggacaaagcccagggttccccggccgggcgcacgccttccacattctccctcacctccacgccttcgctcactgcgttccccaacacctggaatgcagcaatgcccttcgggcacgctgccccgcccccacgttgatcccgtcccctagcttggctccagggacaccggatacgcctattgtagcacccggcaaggagcgagcagtccgcgggaacttacccaggaaccccgagcgcctccgtagttcccaaccccacccccacccctcggccaggtcaggtccactgtgggcgtccaggtaagacggcgtcgatgcccaccaccatcgcccccagctcagcccagagcgcccggggtcagaggtggagatgtcggacatacgcccagtctggccaggctcgggagggaaaatctgggagcggcctctggaactcaccctgactccttcaccgtccgctcctctttttggcttccggggccaaaggttggggactcgaggcgcggctggagcctacagctcctggagcgtagttaagcgttaacccgctggccctgggccagggcgcggggctgctgtgcgcacccggttccgcccgtcgagctggggccggaccgggaggcgaagcggggggcgctgccgagacgggagggcatggggtctgcgccgggtgcgagatgagccggggaggccagcggggcctgggcggtgggggaaggtgggcctggggcaggggcgggatggcggctcgccaagcctctgccgaccggaccacgcgcggggctaccggggcgggctcacctggcggccgcggacccgccctaacctggtttccggcggggcggcgcggggtgcggcgcggccgggcgggggcggggcgggcgggggcgtgcccggggcggggcgttccgggggcggggctgagcctcccgcagacgtcagggacccgcgcgcgaggccgccggcggccgctctgccgtgggctcggcccgggctgccacgagcgtgcgggcctcgccgggcatgtcctaggcggcggccccgcccagcgctcggccgggcgggcgggcgggcgcgagggcagggaccgagccgggccgagctggggaacaagccggggaccaagccggggaccaagccggggactaaggcgagccggagaccgagcccgaacagcaggta

SEQ ID NO: 13206 - DNA, 2300 bp, Homo sapien
tgttggctgctctggacgcccctcctgttccctggcaccccctgcttctcgccgttgggcttgcgtgtggaaacactcccaccctcctctccacagggcctcccggtgccgggctcccctgggggtcagaagtgggtgtcccgctgggccagcctggctgacagctactcagacccgggcctcacaggtaagtggctccagtgctgcgggggagtcgggccaggccggggcgggcctcaggccactgaccacggacacaggctgcctcttcctgagcgtggagggcctgcagaccagcggccctctaaccggctgcctttgtgctccacagaggatggcctgggacgtagaggcggggagccggaggggtccctgcctgtgcgcatgcggcgacggctccctcagctgcccagtgagagggctgacagccctgcgggcccagagagcagcaggaggagtgggcctgggccaccggagctggacagtgagcagcccagccgcctcttcggccaggaggagttggatcctgacagcctcagcgatgccagtgggtcggacgggggccgaggccccgagccaggggtggagccacaggacagcagacgcaggagcccccaggaggggcccacgtggagcaggggtcggcgctcaccaagggcccccggggagccaactcccgcctctttcttcattggggaccagaatggggacgctgtgttatctaggaaaccgcttgcggctccaggggatggggagggcctagggcagacagcccagcccagccccccagcacgggatggcgtctatgtcagtgccaatgggagaatggtcatccagctacggcctggacggtccccagaacccgacggccctgccccagcctttctccggcaagagagcttcactaaggagccagccagtggtcccccagcgcccggcaagcccccccacatctccagccacccgcttctacaggacctggccgctacccgggccgcacgcatggacttccactcccaggacacccacctgatcttgaaggagacggagacggccctggcggccctggaggcccgactcctctctaattctgtggatgccgagtgtgaggggggcagcaccccgaggccgccggaggacgccctgtctggggactcggacgtggacacagccagcaccgtcagcctgcgtagtggcaagagcgggcccagccccacaaccccccagcctctgcgggcacagaaggagatgtcgccatccccgccagctgcacaggacccgggaggcaccgccctggtcagtgcccgtgagcagtcctcagagaggcagcatcacccacttggcccgacggacatgggccgtggagagccggtacggcgctcagccataaggcgtggccacaggccccgagggtccctggattggcccagtgaggagcgtggccctgtcctcgcccacctacccagctcagatgtgatggcctccaaccacgaaacccctgaggccaccggggcaggacggctaggttctcgccggaaaccagcggccccaccgccatccccagctgcccgggaggagcagagccgtagctcagccagctcccagaaggggccgcaggccttgacccgctccaacagcctgtccacccctcgccccacacgggcctcccggctgaggcgggcccggctgggggacgcttcagacactgaggctgcggatggtgagcgggggtccctgggcaaccctgagcccgtgggccggccagctgctgagcaggccaagaagctgtcacgcctggacatcctggccatgccccggaagcgggccggctccttcacagggactagtgaccccgaggcagcccctgcccgcaccagcttctctggccgcagtgtggagttgtgctgtgccagccgcaagcccaccatggccgaagcacgggctgtctccaggaaggctgccaacacagccaccaccacgggtccccgccagcccttcagcagggcccgctcaggcagtgcccgatacacctccagtgagtgccagggcgggtgggaggccagggccaagacagggctgccagtgggtctgcagcatcttggatgccagctgagtgctggccgtgggcccctggtcctggcacgagaggagcctctgttcccaaagctggggtagatgtgttgctggactcacgtgcacacacacacgtgcatgggccgagggcagggcccgcagtcccctggtgtgggtagaacaccctgaccatctctggcgtggagagggccttccatcccccaggg

SEQ ID NO: 13207 - DNA, 2300 bp, Homo sapien
tgagcagcatgaagttggtggggaggacctggggggcttggaaggatggggactggggacagggctcttgggatgcttgaggtattgggggagcatagggaagaaggctgccatcagcggaggaggctagcacagggctagggctctggacagagacactgcacctggctgagaagggggtgggtgcttccaggcctgagagcagaaggggatgtggggggcccatgtgggtttctggagttctctgccttccatggtgggtgagctggagcatgccatatgacgggggcaggaggccagggagtgctgggcgggggcctgagggccaggggcatgtgccagttggtgtcacccagaggtggagggagggcttccatgttttgtcttgatgtggaatggtggacccagctaggacccagtcctgaatggggccagggcagccagtgggatgtgcaaggccatctgggcagagggtgctgggggtgtttctctggtcgtgccagtgtctggcgagggttgtggtgccgctggaggtaggggtagggggagggccctcagggtggtctgttccttgggtgactgccagtgtgggggccgaggaggcttggggtggggcctgtccccatgaggatgggtggttggcagtgacagggagcctaggtccccacggcctgggctgaaggcctaagtggggcaggacctgctggtggcccaggtgcttaaggggccagcaggacagctgacgaggctgtgcgctccagcagagggctgggagctgctcacgggcccggcaggcccctgtcctcgctgggaagtgtctgttacctcggcagggtggaggcctgtgccccctgggcacatcctagggggactgagctggccaggcttgagcagggggctaggctgagctgccattggcctcactggcctgcaaggggtcccctccctctctggatctgcccagccccaccctctgcccagccccaccctctgcccagcccccaccctcagtgtgaggagtgccaggctgtagtttctgtggcctcagcccactcccttccttgcctcagtttctctgcctgcagagctgggcacccgtggcacccacacgttctatgactgagtcccatccatcccatttgggccccgcagctgtgatgctggccctggggggccggagagagaggaggtgtggcctgccccagagccagcaagggtttctgtgcacccttcttttcaggctccgtcccagccccccaccatccctccttgtggctgtggggagtttggcctccctttggggccgtggccagtgcctgtgtaaccagtggctaggccggtgtttggggccaggctggggagcacctcccccaggccccacctctggccagcagctgcctgggagctgggaggggctttgaggcctgtctggcccctgctgccccgacttcctctgtgcagaacctgccgtctttcctgccggctgcaggctgagccagacgctggtgaaggacgtggccatcctagcccaggagatccacgatgtggctggggacggtgacacactgggctcctcggagcctgcccacagcgcctccctcagcaacatgcccagcacccccgcctcgaccatctctgcccgggaggaggtgagccccaggctttctgaggcccctgtgccagagccaccctcgaggagggtcaggccaggtccccacagccctttgcatgcctcggctgaggccctgctgcacatccccacttggcgagctggaacatgtccccctgggtcagcgccccaaacggccaccggagagctcgaggtctggggcgctcgtggcacctgagtcaagcctgactgtgccgtcatccccagcccagctgcctccatggcggggcaggggcacaggagggaccttgcacagacggaaggtgggtgtgctctgtccacctgccgggccggagcagggaggtgcagccacagcctggcaggagcctctgcctggggcccacggtgccggccctccctcttgcagctggtgcagcgcatccccgaggccagcctcaacttccagaaggtgccgcccggctcgctgaactctcgggactttgaccagaacatgaacgacagctgtgaggacgccctggccaacaagacgcggcctcggaaccgagaggaggcacggtgcccactaccgccacggagctgggtgtggggggagcaggggcggggctcctcgagggcggggccatgctgaggccgggctcttgcaggtgatcttcgataacctgatgctgaa

SEQ ID NO: 13208 - DNA, 2300 bp, Homo sapien
accccatgggaccaaagggccctagacctcagggtggggcctgcagcgcagggagcagagccggcaaggagctgccctcaggtcgttcctggccacacagccagcctcggagccactgagaggcctgccctgggtcccgaatctagacgccccttccagcctcaatctttcttccagggtaagcagcctgagaggccaagaggacagtccaccgaaccctgagcccaaggcccaggattccttgcttaaacatccccaagcctggatccatcctcccgaggtagagctgcctgagctgtacccagtcctgctggcctgaggggcagccaggggaggtgacgtggtgcttttctggggctgcaatgagctcagacccacgggctgggtgtagcatgtgggctcattgaggcccctcacaatgtggggaaatcggagaggggactggctggggctggccctcctgcaaggacttctgagagtgctccaaggagccctggggtcctccacttgcccctggccttccaggccctcacacaccattgttgtccagacagaagagactgggcgctgtggttcacgcctgtaatcccagcactttgggaggccgaggcgggtggatcatctgagttcaggagttcgagaccagcctggccaacatggtgaaaccccgtctctaataaaaaatacaaaaattagccgggcgtggtggcacgtgccttaatcccagctacttgggagacagaggcaggagaatcgtatgaactcgggaggcagaagttgcagtgagccgagataaagccgttgcactcaaacctggggtacaagagcgagacttctctcaaaggaaaaagaaaaaaaaaaagacagaagagaacctgttctgtctaactgccttttgcttgagtgcagggaaggcagcctcccttcatactcatgccccagccctgcaaatgtcacagcaggacccacctggctgcccctccccatacccagagtaaccctcacccagagtccctggaggacccaaccctcgggggcatgcctggggcccagctgcattcaggcatccagcaacccagccagagggctggggctccccaaccatggccgggaggtaagggctgaacccaaggccaaatcagagcatcaggaaggtgaagagagatctgggaggggctagggagaggatggatctcttccccattcacttcctggcccacccagactggccccaggggtgcagctgacaggccccacccttgggaactgcaccctcctgactggtgtcctgcaggcaccctgaggccatcaccctggacccctgccctacataggccttacaaggaggagccagggtggacacccagacctcattgaaagtaggagtgttctcaaggtcccagaccttactcagggaccccagtcggggggtggggcagtgggaggcagagccccttgctaggagcttctagccaggcccaccttttcagatatgccagtgagcagccccagcttcgttctccaagataaagaccctagttacctccattgctcagcctcccttgcagctaagtgtagccatgtgactaagttctagatcaagttccagatcacagataagtggaagtgccctgtgggacttccaggaagtctcctctgggatgtcccttattctctgctaagaacacagaggcaatggctgagttccagcagccactgtgaggccatgaaggcagggatcctagggactgggatctgagagcctggctcccaatggcagtggagcaatgccatcatctctagcaaggccgtctctagcctgccagcccctggacctgcttagtgttcgagagtaatgaacaaccttgctgaagccactgttccttaggtgtctgtggcctgcagctgaacttgactccgattcgtaggcccgcaactggagggcctctacctcgagggagtggggtgtagatttttcctggaggtgaaggttctcagccctaccctctagcccgcccacccagctccagccgtctgtttctgtctcagatgagagggggcctctcaggacaaagaggaagtagctggaaggggaaggagccagctgcagagaggaggaggtgagctgcagagaagaggaggttggtgtggagcacaggcagcaccgagcctgccccgtgagctgagggcctgcagtctgcggctggaatcaggatagacaccaaggcaggacccccagaggtatgtgccaatgaggccagggcagctgagaaaagccaggcatggggaaagggctgctg

SEQ ID NO: 13209 - DNA, 2300 bp, Homo sapien
caactggtgcttcacgcgtttgtgaagaatgcatgaaggagctgaaaaagagaaactggccacagggaaagcagaatccgttctgcgctgctcctggtgccctgctgggcctggtggcatggacaggctgtgcctaagtcctggcaggttggggtggggacaagagttctggcaggttccagctggcttcctccagagctcagagacagctacctgagcccacctggtgggtaccctactctgctctgtgttgtctgggctgatggaaaggatggtggggtgcccatcctctggagacacaggccccagcagggatgcttatggtgggactggcacatgctcaccatggccctgatgtgcttctgctccaggctgtccaggaggcaacagaggtgacgctgaagacagaggtggaggcaggagccagtggctacagtgtcacaggtggtggggaccaggggatcttcgtcaagcaagtgctgaaggactcctcagccgccaagctttttaacttgagagaaggtgccatggcagttccatccctggggtcaccattctccccaccaggatgggagggacctggaggggggtattgaggggtaagaaccacacctggagcttaggatgacctcctcacgcctctgctcaacagcttgaggctgggatcacccactgcatctagtaaaatgggggaccccatccaccttgcctgtgcctgaggcactcagtgggggactggtggggcagactcagtgggattccccctattcatgtccccgggaccctcctcgccagccaaggcaagacagcagaccccgtctcattcacacacccggccctggggctgctctttcttggtctaggggatcagctgctcagtacaaccgtgttctttgaaaacataaaatatgaagatgctctcaaaatccttcaatattcagagccgtacaaggttcagttcaaaatcagacggcagctccctgccccacaggatgaagagtgggcttccagcgatgcccagcacggcccacagggcaaggagaaggaggtgagaccactatgcccggggggcagggccccagctggcttcactaccctgctggctgagcctgggaggggatagcactcccactccatctgtccctgggccagggccccaggcttcttggactggcaccaacagattccctctccctatgtttcaggacacggatgttgctgatgggtgcagagagacccccacgaaaactctggaaggagatggggaccaagagagactcatctccaaaccaagggtggggagaggcaggcagagccagagggagaggctctcttggccaaaatttcaatccataaagagcaagcgggggccgggaccccagaggtcacacagctcgtcagaggcctacgaacctagggacgcacatgacgtgtcccctacaagcacagacacagaggcccagctcacggtggagcgccaagagcagaaggcagggccgggcagccagaggaggcggaagttcctcaacctcagattcaggacaggctcgggacagggcccttcatcgacaggacagccaggcagggggttccagagtggggtgggccgtgctggggtcctggaagagttggggccctggggtgatagcctcgaggagactggggctgccacaggcagcaggagagaggagagggcagaacaggatcgagaagtgatgcctgctcagagcatgccattgcccacagagctcggtgaccctagactttgcgagggaacccctcaggaagggggactcagggcagccaggctccatggaaagaccctggaggggcaggcacaggagacagcagtggcccagaggaagcccagggcccagccaactcctggaatgagccgggagggtgaaggcgagggactgcagagcctggaaatcgggatcgccagactgtccttgagagacacaaccgaaggaggcacacagattggcccaccagaaattagggtgcgagtacacgatttaaagacaccaaaatttgcattttccacagaaaaagagccagaaagagaaaggcgccttagtaccccacagcgagggaagagacaggatgcgtcctcaaaagcgggtactggcctgaagggtgaggaggtggaaggagccgggtggatgccgggcagggaaccaaccacacatgcagaagcacagggggatgaaggagatggagaggaaggactacagaggacaaggatcactgaggaacaggacaagggcagggaagacacagaaggacagataagaatg

SEQ ID NO: 13210 - DNA, 2300 bp, Homo sapien
gtggccagctgtgcagggcacctccctctggctgctgtgaggtgggcgtagctggggtgggggccccagcaaaggctcttgcgggggtcagtgctgtgtctggcatgacggccccgctctgtgccagcgtctccttcctgtcccactccagcaggctgggcctctgggtacggcgctgactcagccagccctgccctgcctggctgagtgtgggtgtcaggtggtaaacagtaaacagcgttcccaggtgagagctgtctgggagtgtccctggagcagacgtggccagctttcctgcctccgtgtaaatagagtcgttttctatctttgtgaccgttaggtttttgtgtcagcctttttagggtattgcaatggggggaggcccagaaggggcctggaatcaggtccccacctttcaggcctgaggagcccctgaggcctctcccaccccatttgccggcaagtgcccctgccctggggctgggacagagccttccctgcccttgaagtcctctggcctacttgaggaccccttctctgtgtgcccacctcaggccaccctggcatcccgtggcgggggcagccctctcagctgcaccttcccacctcttcccatgccgttggggcctggtgcaggtgcaagccgttccatcgctgacctcccaggctgggtctgacccctcgctgcccctaaggcctgggctgggcctcggctgtgtgggcctgctccagactgcctgttggaggcacgtccacacccaggctatgggcacagggctggcacactgggatcccaggggggctacacgtagcacagctggttgagtcctgctggagcctcctggctgcccagagcaaagaggagtgggggctaagggcccagggtgcagcagggtgaggtgaccaggaggtgggccaggcagctggagctctggatagtgggggacttggggtcatgggactcaggtgtttctcagccaccacttgtattgaaatgacggggaaggatgggaggcttgttaaaaaaaaaagctaggccagtgcggaggctcacacctgtaatcccagcagtttgggaggctgaggcagaaggatcacttgagcctaggagtttgagactagccagggcaacacagggagaccttgtctctacaaaaaatttaaaaattagccaggcgtgctggtgtgtgcctgcagccccagccacttgggaggccaaggcgggaggatcacctgagcccatgcgtatgagatcagcctggacaatatggtaggatcctatctctacaaaaaatttttaaaattagccaggtgtggtggcgtcacctggagccccagccacttgagaggctgacacgggaggatggtttgagtccaggagtttgaggctgcagtgagccatgatcgcaccactgcactccaacctgggtgagagagagaccctgtttcaaaaaatgctgcttcctgagccccaccgcaccctgcttaccagataccctggtgcttcgaggtgtggtggccgctgtgagtttgggctgagcgggctgaagggaggccagggtcggctgccctgggggctcaggcaggtggcagatgaccaggccccaaggtcactggcccagtgaccatgggggcaggcccttaggctatgcctctcctcccttctgggccagcctctgtcctggcccccatagggaaactgagacacagggtttgtgcagagcctgcctaggagggacctgcctcaggcctgtgtctgtccacacagcaggacctggcgcacactaaggcactcaccagactgggctggctgtgtgactcagagcggtctgttcctctgcagtcagctgctcaggctgggggtgggcactcagggtggggtccccagctccaagaagctgagtgagtgttgggggctggccaggctcctggcccatcaggggacccgcccactccctctggtgggatgtgggggtcctggcagggtccagagccagccctaggagcaggcagaggcgggacaatggggggaggagctgtggagggaagaaccgggcgtggcagggggaggtggccagttgggatcttcgcttctgggccagttgggagagcgtctgtagcttccttggtaagtggctcctgtgtccatgtccggacacctgcttgcctcactcttccgcgggtctgtgggggccagcaggccaccagcaaggggggctggaggaacagagctgggctaggcatcccccgacctgcagctgacagacgggcaggggtgttagttcaccgtggctccagcc

SEQ ID NO: 13211 - DNA, 2300 bp, Homo sapien
ttctcacgcaggcctttggggtggggcctcagtttccccacctgtacacaaggacaacactcctcctgcccccctcccagctccctgggcctcaaggacggcaaggacgtgcagtggatgaggggcagcagtgggaacggacactgcccttaagctggcaagacaggcccaggcctggtctacaaacccagccagctcctgatcaccatccttagggtcactgcggtgctggggtggccaagccaagatccagtcctgggcagtctgaccgaagagcttccatactgcatggcccggctgctctgcccctcaggaaggagcggggacaggaggctgggtctaaggtgcagagaatgatctcatcttgtcatttgtaaaattaaattgttctgtagcttggctgagaaggaccagggagggaaggggtgattcaagcaaggacagagtccaggcagggccccaggccccagggtgggagaaatgcgagcctgaggtagatagggggtggacagtaggtggcatggttcagggcttcaccagggccaggccctccccttacccagaggaggcagtgatgggggccagtctgggaaggccagggaggagatggagtcaaggttgactccttgagtctgggggtgagggcagatggcagaaggcctggaagcccggaggggagctgccagaggccagcctagctccttggtcgtccagtggctggagaggggctgtccgtcagccctgctctgcccgggtctggctggtgacaaaggaggggagcactccatgcggcctgcgagggaggggtggagcctccccgcagctccttcccccaggaatggggacgagttaggggcgggcgaggttttgggattcaggagtcagcaagacggacttggctctcgccagggacaggtggggtcctgaggggccgtcgctcagctgcacccacagaggggtcggcggcgcggcaagttaggctgcggggcgccgggagaaggggctgcgggtgacgggtgcgctgggacggacctggggagctcgtcgtgaggaagaaagaaccactctagggccaggcccagtggctcaagcctgtaatcccagcactttgggaggccgaggcgggcggatcacgaggtcaggaaatcgagaccatcctggctaacacggtgaaacccagtctctattaaaatacaaaaaaatcagccgggcgtggtggcgggcgcctgtagtcccagctactcgggaggctgaggcaggagaatggcgtgaacccgggaggcggagcttgcagtgagtcgagatcgcgccactgctctccagcctgggcgacagagcgagactccgtctcaaaaaaaaaagaaaaaaaaaaaaaagaaagaaccactcgggcggcgaactgagcacggacagaaagctcgagcggcccggcgcccagggctcggccagtgtggaagcccgatcccacccgcagcggaggcggcccggggcagggagggcgggtccggggcgggtcctgaacggcgggggccggcgctggcctcgccccggatgcgtgctgacgccacggcgacggacgccggaagcggagctggcgcacgccgttgccaggcaacggggcggcgcaggcaggagggaacggctggttgcaggtttctctcgccctggtcccgcgcggccccgccgaggcggcgaccaaggtgggtgcggggactctcgggagccgtgggccaggcgcttagccggccacctcgggccctgtccaggcccaggcgttccagggctgctctgcgggccgcgtgcgagagggactctcgggaggccccggggcgccgcacccactccttcccacttgggactcccgcgggcgcccggctctcgctcctctggccagcgtgggcctcccaggccccctcgcggctctctccagagcaggagccccaccttgggccgcccctctcacacctgccgtgggtctggtacgcgcctctgtgtcggactccgcgcccgcctgcgtgggaggaagccaggactcccgggcgaccgggccattcctgtggtttgtgtcagttccacagcagcacgtgggcactttccaccgtcagccactgggcagcccggggcactcctgcagcgtcccctggccctctccagggcaggggaaggttgggcagtcctgggcggccagcaccccggcgtgcatgtctcctgagcagctgcccatcgggcctctgctggcctgggggctccaagatgcaaggccggcgggagctggggggagagcctttgagtgacctcca

SEQ ID NO: 13212 - DNA, 2300 bp, Homo sapien
ccaccttctgaggtatttctgctgtgctgtggtcaccatgttgagtgggacgtgtacacaccaagaggcctacagccctcgaatgctgtggcgtgctggccagggagggggctgacagccccagagcgtctgcttctctcctggccttcgtccctggccatgtggttggcagtcccatcctgaggccagggaagcaatgagttggcagaggaggctgcagaaatgggtcacacgaaggccaggtgggggccacctgagctgggtcgctctttctgaccattcctcccccagcctgtccattccccattggtgggggctgcactggccccagctcagggcatttgaggaggagctttttgtctgaattctgaatctgctgagttcaaaagtctcagagattctaaaatcacatgatcacatttcaacttgcttgtaatgaattgggtgacgcgggatccaacctgtccgggagcttgtaatgaattgggtgatgcccattccgacctgtccgggagccagggtcccagccttcaggcccctgccccctgctctctttcagagcagactgtgggtgtttaccgtttggtgacacttccgctccttctcttttcctgtcttcttccttccattgttcctctttctctgccacttcttcccaaatggttcatcccaagcaccatcatgagagatcagaaataaaaccagtgaggaaggaaataaagatattgtagttctcagggctggcctgttttctcttccttttctttttttttttttttttttttttttttttttgagacagcctcactctgtcgctgaggctggagtgcagtggcactgtgtcggctcactgcaacctctgtctcctgggttcaagcagttctcctgccttagcctcctgagtagctgggattacaggcatccaccaccacgcccggctaactttttatatatatatatatatatgtatgtttagtagagactgggttttaccatgtttgccaggctggtcttgaactcctgacctcaggtgatccgcccgcctcggcctctcaaagtgctgggattacaggcgtgagccaccatgcccggccggactgttttctgaagcagtttccctggaatcctgatgagatccactcttaatagagtaaggtctgctgtaatgcttgttttgaatacaggatttgttttccagcgtgattgatgtattagggaacaattagagcatagttgaaatttcacaagaaagagtagataaatgcagaaaactgcccccagctgagctggggcccgttggaatacatgagactcgcacacgtacaccctcacacagcgcttagtgccccaatgtagcacacctgtcaacacctggtgttaggacttcacccggttcagaccaccctcctcctaccccttcacactaactcagcctgcgagcctttgtcttttccaaggtaaagtgctgtgcttactgtagtatgtataatttctttttttttttttttgagacggagtctctctctgtcacccaggctggagtgcagtggcacaatctcggctcactgcaacttctgccccccacccgccggattcaagcgattctcctgcctcagcctcctaagtagctgggattataggcgtgtaccaccacacccagctaatttttgtatttttagtagagatgggggtttcaccatgttggccaggctggtctcgaactcctgacctcgtgatctgcccacctggggctcccaaagtgctgggattacaggcgtgagccaccgcgcccggccgcatgtataatttcttaaccaaactggaaaacagcactgacattattgggtggtcatcttttttcatgtgtcactgatgaagtttgaatgttttgccctaaccccacctttcccatgagtcctctggttttgtgtgattttgctaacttggtgatttttaggaatgaatatgtcaagtgatagtaacactaatggtatgatcaattacaaatttcatttctatcacaattatttctttggaataaggtaacgttatgtatgtctttctcctaactttggtatgcttttcttcttttcttttcagcccattctcagctatgagaacattttaaagtgtgcttttcaagaaataacagtccagcaggcagctgaagacgtttccaccatagaccatttcctagaaataagcagtgaagaaaaacctggcgttgaacgtgtacataaattgtggtaatgaactgaagaaatatttcttacagcaactgcttttgtacttttgtttga

SEQ ID NO: 13213 - DNA, 2300 bp, Homo sapien
cgctctcttgcctgccgccgtgtaagacgtcccttcgcttttcctttgtctcctgccatgattgcgagtccattaaacctctttttctttataaattacccagtctcgggtatgtctttattagcagcatgagaatagactaatatgctctggaagatattatcttactccagacattattttagatctttgccaatttgacccgtggcaaacagcactccagcatagctttaatttccactgctcttgttctgattggggctgagcatctattcgcctgtataggagcatttgtattttctttgctctgaactgtgtttatattctacgcccacttttcttttctttttttaagagatggggtctcactctgctgcccaggctggagtgcagtggtgcaatcatagttcactgcagcctccaactcctgggctcaagggattctctcaccccagcctcctgagtagctgggattacaggtgggtgccactatttccaaaccacttttctttggtgatctagatttcatttgcatttgcagaatatctgtatattaaggaatttaacctttatgtgggatacagccaggaaaaacttttttccccatttgtcttttcactttgacatgcataaactttaaattctcaggtagtcacctttatcaagtcccattttcttttacctgggcagtaacctaatgggattttctacttccagccttcctgccacctcctccaaatctattaccaacagtgattcttggtggttgtggtgcctcatgcctgtaatcccagaactttgggaggccaaggtaggaggatcacttaaggccaggagttggagaccagcctgtgtaacaagacaataccctgtctctacaaaattaccaaaaaaaaaaaaaaagttagcttggtgtagtggcacacttctgtagtcccagctacttgggaggctgaggcgtgagaatcactcgagcacaagagttcgaggatacagtgagccataatcacgccactgttgtccagcctgggcgaaagagacccccttttttttttttttaaataagaacagtgattcttttcaagcacaattcagattccagttccttctctgctgaccatgccagtagtctccatcccactcccagaatagcccaaaagtccctccacccctcacacttaaaactttcccacgagatcacagggttctttctcactgcactgagacgtgctcctgcctcctgcccctgcctcgggctttgccccagccattcctctcctgaattctcgtccactcttccttttggtgctttaagacgctccttatcctagagacctatgtgagcagcgcccccacgtcactcccaggtttcccgacagcatttcagcatttaccaccgaccttggcgcatccgcacctgcggattgatctgaggattcccccccaacttccagcacttggctctcagctgcagccacgcctgccgggcctgctgcaggcgctcagggtattacttaagtcaatgattgcaggttctcgcatcctatttaaaaccttttccactaagagatttaaaacacgtgtcccctgctttgaactttcacgttacatttcttacgtgtaaacctaggaagcctttggagataaccccggtctctggagaggcttggatagacctcggagcccagaccgcccgggaattgccgtgcccggctcctcccgaccccggcacggatgcctcggcggagaagttgagccaggcagaagcgagagagtccaaacctctgtttgccccgccacgcccgcccgagggccccacgtgggccccaggcgcaggcgcgttcagttcagggccagacgcgcggagacctgggagctggcggggcggggccggactgggcgcggggagacctgggagccggcggggcgtgggcgtggcggggccgggcgcaggggcgggggcggggcaaccgagggcgcgcgcgagccccaacggccgtcgccgcagcgcgggaagacgcgccacagatgccccgcccgcgtgggtttgaacaagaggccccgcccccggcccgcgagtggccaatcagcgggcgtagcgcgcggagagcgcagcgtcgaccctttgtggacgccgagtggcggtcgctcgccccgccccgcgccgtcgggcgctccttcctcagcggcgggaagctggcggcagcggcggtggcggtggctgagcagaggacccggcgggcggcctcgcgggtcaggtgagcgggcccggcggaccgctagggcgtctacggcggcgt

SEQ ID NO: 13214 - DNA, 2300 bp, Homo sapien
ccatgagttaccacacctggcctttaggagctatttttatgttttctgtgaaagctcatcaactttcttttctctcccagctttataaaggtataattgacaaacaagaagagtacctaggccaggtgcggtggcttacgcctgtaatcccagcactttgggaggccgaggtgggtggatcatttgaggtcaggagtttgagaccagcctgcccaacatggtgagaccccgtctctactaaaaatacaaaatctagctggggatggtggcgcgtgtgtgtagtcccagctacttgggaggctaagacaggagaatcgcttgaacccaggaggcggaggttgcagtgagccgagatcatgccattgcactccagcctgggcaacagagtgcgactctgtctcaaaaaaaaaaaaaaaaaaattagctgggggtggtggcaggcgactgtactcccagctactcaagaggctgctgcaggagaatagtttgaacccgggaggcagaggttgcagtgagccgagattgtgctactgcactccagcctgggcgacagagcaagactccatctcaagaaaaaaaaaaaaaaaaaaaaaaaagaatcgtatgtagtcgcagtggctaatgtgacgttttgatgcctgttggcttggagccttgcttgtgtttctcatgtgggatgcaacggcagattctcaacatttaaaaaacacctacgaatcaacgggccacttagtaaattagtaaatactcactagccgtttgtcaatgggttaacttgtgactcaatctgatttccctaaaacaatttcaacctactctttttccaggtcattttaaactctcagagtgaacgtcttgataggaccgacaagacgcatgacatgtacttagaaagcttatcttagagccacactgagattggaacccgcaaaatatgccaggtgagagagccttctccgactttgaacatgtaagaggaagcccatgagaatttttccatgaagcatgttgtctcataattcaaaaattaacgcataaaaatagattatcgagataaaaactagctcagcaataataaatctagaggtgctacatggagaaatgaaggactgatttcataattctttcgtgaagttctgggaagccaggaacgggaatgagggcatagttggtggctcctgggagggcgacacagtactgagtcagggggctgtcccacaggtcccaggggagccctgcacggtctgggccatgaggagctgaccaccagccccccgcatccatgcgtctcctggtgccgttgcccctacttctgacccaccaggaaggctctcttcccaggaggtcacttgtggcaggaggcgggggagcgggggacagcctcctcaccagatgggcacagagccacagacaccacggacctggtgtccagaggtgaaggtcccaaggctgcgtgaggcctggagcagggggtgcgggactgaggggcaccgaggccctgactgagaccgcacgggcgacgatgtgtggggtgggggagccgtaggaagtcggggagggaacagaccagagcggctctgtgcaggctgaggtgggagggacccctctggccaccccgggtcttgcctgcatctccccttgtgttttggattctggctctgcctcccagggcctgtgattgtcatgaaagagacggggccgtgtagggggcccgaaacttcctctgagctcaggactcgcacagcggggctggggcactcgtttgatgggaaaagagccatctgggtgaagaacagtgagtgcaaacacaggcgttgggcctcccacccgagaactgccttcactgccccccgccgcccgccacaggcctgtgtcttgggcgaagtggtgacaactgagtgtgaggcagcccagtcacacccactctctccctctgcccagggaggaaggtgagcaagggacacgacactcacccggagaaacccagcaagcgcagcgaggctgtggggagaccggagccctgcacaccgccgggggaaggtgggccagcgccaccaccgtggagaacagcgcggaggcaccccacgagatgagacggaactgccgtgagatccagcaatgccaactgtgggtctgacccaggagaacggaaagcagggacgtgaacagccctcctcatgttcttgacaccgtcattctcagcagctcagctaaggcacagaggcagccgagcgtctgtcagcggagtcgtggctgagcagaacacgccacacgccacacgccacacgccacacgtgcag

SEQ ID NO: 13215 - DNA, 2300 bp, Homo sapien
gggccgcagggagctgttctggcacgtgactcagccgtgggatgttcgggtgacttcctgtctgaaacctgctctcctgttggtgagggattctctgggtatgaatcgctttgctggggtcagagcagggagagccatctccctgacgggcttctcagagacaacaccccaggtgccgcacagcccggggcagcctccactggtcccgaaggcccggtgggaataggcagggccagtccacacccccaggctgtcagtgtttggactcccaggctcctgcctgccctccaccccagcctggcttctccacctggcaggggcaggggagccggtacacggctgccaaccccccagttcatacccacagctcctgccacccaagggacccaactttcctttcccagaccccagtgaaggacccaaagagaggattcaactgacctcacttgaatcggctattcccggactgcctggcaaaggccagaaggcatggagggtgacaatggcctgagccgggtccgcatgtcactcctggacccctcaccgggggcgcagaggaggcctggtgaacgtgacagaccacccagtggggcgcaggacggggcaggtcctaggaggctgctggggccagcgacaggaacccacagctgtccctggccatcacccccactggcctgatgtgggcttcgtctattgctgctccgagggtggggctgccctggcccaaagacccgggaggccagtgaccccatgagcagtggcctgtggaggcgtgtgtttgcaccagatcccctagaggatcactgtcccctgggcaagtgtttctggaaagccaaggtaggccctgccctgagacctgcgcctccccgccagggcaatgggaaagcccagctttccagggactccactgccacccacacaaaaccctctgaaatcgctgttcggaggcagcctccagccatgcggccctgcagcagggggcagctgtgatccacgtgtctgggggaaagtgtagactgggggctcggcctccaccggcctctcctggccgtgggtgtacccacccaggatggcggcttcttcgctcagtgaccgtccctgctgcggtgctgggcagtgtcgcttggagacatttgtggtccccagctccttccctcagcccggccctgtccccactgctgaaagagcctggcttggatggagcttggcaggctcgggagtgggcaccagggtgggtctgtgccctgaaactcagaagcagcctggaggtgagtggagttgtaggtgctgtccacagccagctggctttgtccaaggaaactgggcccatcatggccggaagccccacagtgagggggactgtcccaggcaaccctgcctgcccaccctccagttcccacagggcccctcacagagaagcccacccgcagggctcctgggccaggccaggcttggttctggatgcaggaggggttgaggtagggctgggggaggaatgtggagtgtgcagtaggctgttcttcccacacggccctgccccatgtaggaagagggaggcggggaggggagggtgcttgtgtgcagtggctgtgccgagccttccaggacatgcaggtgccatcctggtcccggggctgcagtgggcgcactcagcctctctactcctggcaccccggacagggactcctgggaggacacagcctctgggaagtcaccctgctccgtgcttgcctggcccgagagtgggcaacaccaggcctgagctgcagaggagctggattttgtctttccaggacccctccctgcagcctttccaggacccctgtcctgccttgcctgtctggggacacacggacagccgctgtgccgcgccaggccccagcacctgcctgggagctcctgagtgagtggagcctggctctgagtgctgctattgctaaaagaggtaagactggggtttcctgccactccctccctcaggaaggtgacgaggccatgctgtcatcaccagtaagataccccagcccggttggctaacccctagctcagccctgtttgtggttaggggagttctagacagaacataattagacccctgctacttcctgaaacctcagctaggactgcagggaggggtgcgaggctagccacgcaggcggggccctgggtaagtcgctgggctctgcgtgctggggagtgggcctggggggccaggctctgggatggggctgggggctgggagctggaggcgggcagagggggatctgaaggcaaaggtgatttgttggtaaagatggagg

SEQ ID NO: 13216 - DNA, 2300 bp, Homo sapien
gacacacccaccagtgtgccatgtcagtttaccactaccatggcaacatctagaagttatggcatctttccatggcaatgacctggcaacccagaagttaccaccctcaccctagaaatgtctgcataaactaccccttaatttgcatgtaattaaaagtgggtataaatctgagtgcagagctgcctctgagcgctgctctgggcatactgcctgtgggtggccctgctccacaagggacagttcctgtgttgctgccatgcatggctgctctgctatgcacagcagcttgcctctgaattcttccctgggtgaagccaggaaccctcctgggctaagccccgatttgggggtgtgcctgccctgcaccactgttatggacaatgctacaatgaataaccttgcacatacctcacttcacacacgagaacatatccataggataagttcctcgcagtgaagattgttgtcttatgatgttcaaccactggatctgagaacacgatatgcctttcattctctcaggtctcctttcatgtccctcagtggatttaaagtgttcttctttttgattgtacatgtttctttttaggtttattcctaggttttatttttttttttttggtgctgtggtaaatgagatattttttctcatcaatattcctgctcacaagtcattttttatgtagatgaaggctaattatcatgttactttcgtcccagccacaaaactttttttttttttttttagatggagtctcgctctgtcacccaggccggagtgcagtggtgtgatcttggctcactgcaagctctgcctccagagttcacaccattctcctgcctcagcctcctgagtagctgggactacaggcacctgccaccaggcccggctaattgtttttgtattttcagtagagatggggtttcactgtgttagccaagatggtcttgatctcctgacctcgtgatccgcccacctcggcctcccaaagtgctggaattacaggtgtgagccaccgtgcccggcctccagccacaaaacttaaatattgtttgtcatagaaattaaattgattctcttggattttccaaggacttaatcatgtcatctgcaaaaagtgatattgtatttcctcctttgcattttttaaacttaatttctttctctcttccaattgcaaaaaaattaaataacagtgatgatagaagacaccttcctgagctttcaccttgacagagatgcttctagtatcttccccatttgacacaggagtagctttgaggctgacataaatgaatggcagcacattgagaaagtattactgagaatgcaagttgattctgggcacgacgagtaatgagatttatacttagcctcctgccataaacaacgataaagttgggccaaatgtataaggcagttatgtacaggaattggacaactggtaggactgtgatagctgagagaagggaaatacctgaagtgagtccaagtttgccctgtctttttaccttgggttttcctaccaaggtatgagagataaagccgcagcagagatcatcagccagcgatcactggctgggaaagcagagatcagtgctgaggtggctacgattggtagagcagggcactggaggggagggtgctacgtagaatgagggtgcagaggctgcatgggggtccctcaggtccctggatgaggccaggctgtacatgtgcaaggtgatccttcacaaggcctagcgggaagctgctgctgtggggctgggagctgacagacaagcccagcagtgtgcagtgctaggcgacattgcagttcttgcccagctagggtggagaaacctcaccaagcccctcaggcaatcagttgagaaatcagaaaggccatggcttaagaataagaatcgcactccagaataatggccaaagcacagaactaagaacacaaccaaaacagactcacccttacaaagcataaaatcaagcctgcagtgatatcagcaaaatgatggaattggaagctctggactctccttttcaaaaccatgaacacatcaactcaacaacaattcctgaaaattccctttgcaagaaatccagaaactagctgagcatctcacgcattccaggtaagcatgaatctactcacattgaaactggcagggaaattcaagacaccctcttggcataatccctacccccagcacagtgccatatgactgagaggaaatcccctagctcccagcttaccatggagtgagaaagagatgagctgtgtattcaacacctcaacttt

SEQ ID NO: 13217 - DNA, 2300 bp, Homo sapien
actagaagagaccaggtagcctggtctggtgagggttggggctggagccctggccgccactgatctcagcccctcaccccagcaaggtgcagcagggggcaaatgtgttttgtgaaatatgtatgaggggcgagggttcccactgctgccttctggaaactcaaaccagggtccagctgcctggcatttctggctcaagggctgctgaaattcctgcagggaagggaccccctctccgatgcctcctatgtccccctccttcctaagggcaggtgcggccaccttcctgacctgggtgctctcatggacatcgtgaggtctggctgacccatgcccgtccacgctctggcggccccctatgccagcttctgtatgacttgtctaagtcctctgtccacccccgggctgggggctcctgagggtgtgcaggggcggagtctcccttgttcaccacttggccaagtgcccagcagaggcacccagcaccccctcccccaccatagtggggcagtgggcgcaggtggggatggagccctgggcctctggagccgggcagggggcttctctgtcctggggcttccctctctcgagtacccgagtacctgcccccaggccaaagcacaggagaggtggcatctccacagggagcccctccccccgtaggcggtaatcaccgcccacacaccggaaggcggcaactggaaggctctgaacacagcttggattctcttgtttggtgggggtctctgtgcgggcctcatcctggcttgtgtcttaatccccacgaagcctacccaccaccaagtttggggtgggcactctgagcagagccagctgaggtgggcatggggggctcccacccacccctttagggaccttcagctgagcctgcggcctggatcctggaggagctgctaaacagggatggagcaggcagaccctgcgcatggggtgttcacaggccctgtgcctccaaagctctcttccttcagccctcagccccagcagcatggtggcagtgacttgctccaggctggggggctgcacagccacccagctccgggcacagggcaaatttgcgagaggagctagggggagagaagacagctcagttatcatggggatgggttgaggacccctctggaccatatggggatctttaaccaccaaggtgacccctagctctggaaaggaccgtgctcactggaggagaggaaggtgccattggttttgaccctgtggaggagctgcgaggtcacccagggagagggcaaggaggtgaccgcagaggatggggtgtggaagcctggtgaccagggcagcagtgggaggcctctctcggggtagccttcagggacaggcactgccgacttttgttccccatttcccgcctctcgccccccaagcccagacctgagtttggggggcgagaggcgggaaacggggaatgtggcctgagcatttcctgagggcatggcctggctacctcgacgccagcgccgagctgagcagtctgcaccctggagcatttgttgactggctgcttgaccagcgcgcctcgcagaggggaaggcaggggcgtcggaggggcgcagcgccccctgcagccggcgtggaggcggtaggagcggcgcggagaaggggagattctcggaggaggtggggggcgcgcagtaggggctgggcccggctctggccccagggccgcgccaccccgcgtgggggccgagccctgatcagagtaggaggcggcatctcctctgggactgcgaggagcgcggcggtggcgcactgatgggaggggaccacacggcaacctcggggcgccccacccccggtttctgacacccggcaggagcccaggcggaggaggggaggcagctttgcggcgccggcgcacgcctcgccgactcacgcggaggtgtgagcggggcccccgcggcccgcgctgaccccgaggccccgtgcccccgccgcccgggcgccctggggggcgcgcgccgggccggggcgctggcaggcgacgccctccaccgcctttaaagcctggggcgcccccggacccccccccggccccaccccgcggcgcggccccgccccctcatgcatatgcaggtgcgcgggtgacgaatgggcgagcgagctgtcagtctcgttccgaacttgttggctgcggtgccgggagcgcgggcgcgcagagccgaggccgggacccgctgccttcaccgccgccgccgtcgccgccgggtgggagccgggccgggcagccggagcgcggccgccagcgagccggagctgcc

SEQ ID NO: 13218 - DNA, 2300 bp, Homo sapien
cgcagaggacacggcctttgtgtctggcttcttttgctgagcatagtgtcgctgtcgcttgtgtgggaatttctctcctcatggctgagttgtgctaccttacacgtctacactgcattttctggatccattcacctggcaacggatgcttgggttgttcttccctttggctgctgtgaggaagcatctgtctgagtgtctgttttcaactcctttgggtggatacccaggaagacagttgctggaccacagggtaattctatgcttaactttttgaggagccgccaggctgcgtcccacagtgggctccttgctgatattttcaggcactcagctctgcagtctgcactgccagacacctggacccgagtgagtctgaggagcacggtgctttgaggagctgctggctctcccaggggctccttgatggggctcctgttgcctctgcctgtcccggggctgctgctgctggaagctgagactcatcctcattttccatgcaaccacgggcaggaaggagcctgcacgcgacatgccagggtgcgcgcttaccctgggcccctcgtgcaccggaggaagaggcctgcctggctgtggggtagggtggggccagcttctgggctgggcgctctggcttccgggacaccaggcggaatggctaaagcagggagacacaggcccctgtagagctactggggcggtgacagctggacttggatgctggcttcatgaccgtgctccccagcgttcccacctggtgatgtccctcccctggaatctgccggaggcccaggactttctgacccacaggatgccccaggaatgacaccatatgacatctgaggccaggtcacacaaagcctggcagcttggcctggcctggtgaacgtgctctggagggagccagctgccacgggagaatccaactaccccgagaccaccatgctgcagggaagcccacgccagccacatgggaggccagccggccctagctgttccagccacccaactgagggcgggggcgaagaggccatcctggacggtccaccccgtttggccttcagacgactccagccccagctgccacctgattacaactgcagagagaccccaagacagggctgcctggctgagctgggcaacccacaggccaggcgataacggggtgctttaaggcactaagctttggaggagtgttttgttacacggcaatagttaacagggaactgggagtcgatttcaagctcacatggccagtccaccctgagcatgtcccctgggccatagttcagaaagcaggtgcaggtcagggttcagggccagtgtgggcctcaatattgtttcctgcccccgtggaggccgtggtggcatttggagggggtccttggaatccatgcccaaggaagcactgaagctgcctgggaccctcccacacccaggaagggccgtcatcaaggtaggacttgcagggggagggaagggcagctggcttttgagtggaggagggacagctccagagacagcgtggcagctcccagccaccctcgccaccaggaacctcgaggggaggccccctcggcccaagctctggcccctccagctccctactctcctctcccctagcttccttccagggccctctctctttggtctcctgtgattttcttcctgggcccacagtccctccctccctggggggctgccccgcccccggccccgcccgcggacccctggagtaacttaatctcggggttgtggtccatccccagagtggggaggcatccgctcggcccatcgcaccccaaagctgcaggcccttagctccaaccaccgccaggccctccctcccccagccaagaggtcccgagtcccacccaagcactgtaccccggcccggctggccccgcccggcggccggggtcgacccggccagtccttcccccgggcgacgcccacgtgcctgcgcggcttccctggcaccgcggcgaccagcgccccgaggcgcgcggcacccgacaggtggcacctgcgagccccgcccacctcggccgccccgcccacctcggccgccccgccccgcgcgcccacggagcatgctcagagccgcggtcacgcgcccgcccgaaggctcctgtcgggacagggcgccgccccgtgtcggcccccgcagagctcgcggcccccgcctgtccgggcgccgccatggagcgcatcgagggggcgtccgtgggccgctgcgccgcctcaccctacctgcggccgctcacgctgcattaccgccaggtgagcccgcgcccccg

SEQ ID NO: 13219 - DNA, 2300 bp, Homo sapien
ccgagtggggcggcagacctccggccctggggtccctgctggaccccctccccactgcagccagcctgggcatctcagactccatccgcgaatgcatctcctctcagagcagcgaccccagtgagttctgatggggccctgggggacgctgaggtcatcgggagatctttcaggcgtgtgcctctcatggggagagccggatgctgccatcctctgtcgggaggtgtggtggtctcgggcggtgggcttgggtggtggcaccaccagtccccccaatggggctgtgtgggcgtcagtggtcctggcgtgaagaattgggtgtgtgccgacgccagaatgcagtgagtctcgtcaccctcactgggaccgccttcaggtcacaggggccacggagaatggagcccacaagttgtgtccaggagtcccatggggcagctccacccctcatccgcttgtccaacatggtcgggggaacgtcacttgctgagcttgggcgtggcaatgacgaggcacccctgccccatagtgcccaggccaggccaccgtgcccatcttgccccccctcaccttgcccatttggctgggagctctaggagaaaggtgggtcccatcccccatccctgccaggacaggcttccctggctgagagcctagaccttcctgcaacgcttcaccctcaagccctgcctcccgtcgggcaccagggcctggcctctgtgtgaggagccaggcgaatgtttatcaagtgatatctgggccggggtagagacaatcctgatggttggggctgctgtgtgggtggaacccaggcgagtcacacagagcaacaggcagaggggacatgcacaggccctggggcagccagcggcacagtgaccctgagcagaaagggccattctggctggagctgaggaagggctgcctgtgagtgctgagaggagccgtctctggcctcggccctggagcagcatggcaggagagcacctcagacagtctggccctgtgctggagttgacttggcagcacggggcaggcagctatggcgtggggctgtggcaaggagaggctgtcccaattccaggctgtgcagatgctgcctggactgcgtggggctgggcaggggtgacaggcaggttttggggtgtcctgagcatgatcatggagggctccctcaggcctggactccggaatcatttctattccctcatttctatccccagacctatgggctcagtgatggggagctggctcccctgagcacagacccccatctcactccgtggcctgacctttccttcctgcccagcttccgtgccctccctcggtctttggggcctgacagcctctgtctcctgttcttaaaaagttgcttttttacaaaaagcacagaagtgctggggttttcctttgcagcttcagttcagtgttctgctggcttcgcttagtgtcctgagctaggcatttaaagaggtgcggtcatgtgggcagacagggcgcgacccaccagtgcagaggaggggacggggttctagaaagcccttagcccagacccagggtcctgagccagcccaggtggtggccacgctcctataatcagtgctggccctgagtgacgcggatgctgtgcttccctccagaagatgcttcaggagacggtgagctggacctcagtggcattgatgacctggagattgacagggtacgtggcagcaccccttcccaagaggggctgggcttgggagggcgctgcagcccaaggagccctgagtggtcgggcggggttggccacctcccctgcccagagcccaccccgctgggtgaagtgggctcctggccttctggccactgttcccgggacccccccccacactctcttctccagtgtcggctcgggggcggcctgtcgagaggcccctggctttgcgcctggtccttgcggccctcggcacatagcctgcagcaggcacacatcgcacaaatagcaccaggggcagcccctcgaggggtctctagacacaagagggcacccactgactccacatgcgctgtgcgcccccaaaccccagggcttccagccattgggaccagctctttgcagtttatctcaatatacttgccctctgtcaggcaggaagtcgtcttccctgatttcatggccacgtggtgcctcagacccctccagcctggcccatctgtacctgagtgggaggctctcaccctcacttggcccctttgtgggaacctgtggcctgcactctggctggccagggtcctggtgccggcagggcttgcaagctgcc

SEQ ID NO: 13220 - DNA, 2300 bp, Homo sapien
ggcaaaagtaatctacataatttatttgggtcaagcttgaggattgcagccagggtggacatatcccattgccttgaatatacactctggtgagcagcagttacacatggactttttctttttttggagacaggctcactctgtcacccaggctggagtgcagttgcataatctcagctcaccacaacctctaccctgtagtttgaagcaattctcctgcctcaccctcctgagtagttgggactacaggcatgcgccaccacgcccagctaatttttgtattttttgtagaaacggggtttcgccacgttggccaggctgatctcgaactcctgacctcaagtgatctgtccaccttggcccgccaaagtgcgggattacaggagtgagccagcctcagctacagatggatttttaaaggcaaaaagggacagtgattggatagatacaaagttgtctgttgggaattctcattggcttacaatagtaacgttcattcgtgattggctgtacatcgttaaactattgggtgcggcattattgggttagtttagagctacttgtggcaacagcaagtggtttcaagaaatgaacacgtagctcaaggaggaggagtcacattcctcccgtgaaagttcttttctcagtcttttaaatttaccattgggtgatttttaacagccttattgaggtgtgattgccgtatgaaaactgctcatatttaaaatgtgccctttgatttctgaactttgatgtctgcacacacctgtgaagccatagtgacaaccaagaagacccacagatctgtggctcccacggggtccacaggcccttggtcaccaccccccctcctgccccaggccaccagtgagctacttttttcacgataaattagttgtattctgtagaattccgtaggagtaggatcacatagtatatgtttttcccttcggcttttttcacagtgtaattatgttgagtcacgcatcaatggtttgctcatttgtgttgtggcgtggcagtcggtagtccttcagcacgctgagggtgtgtgttgagtcacgcatcaatggtttgttcgtttgtattgtgtggcagtcggtagtccttcagcacgctgagggtgtgtagccattcatctgttagaggacattgcacgtttgaggctgtttcagatgcgctcgtgaacactcgtgtacaagtccttgtgtggacgttgatttccttttgggtcaattgctgaggagtgaaattgctgggttatgtgaaaggcaagtgtgtatgtctttttttgttgtttttgagacggtcttactctgtcacccagagtggagtgcaatagttccatcatagctcactgcagtgtcaacctcctgggctcaagcaaccctcccatctcagcctcccaagtagctgggactgcaggcgggcaccaccacacccagataatttttacatttcttcatagagacaggatcttgctgtgttgcccaggctggtctggaactcctgagcccaagtgggcggccacgaactgcctgtctttaagaaatgatcaggttgtcagccaggcgcagagcctcacgcctgtaatcccagcactttgggaggctgaggtgggcagatcacaaggtcaggagatcaagaccatcctggctaacacagtgaaaccccgtctcttctaaaaatacaaaaaattagccgggtgtggtggcgggcgcctgtagtcccagctactcaggaggctgaggcaggagaatggcgtgaacccgggaggcggagcttgcagtgagccgagatcgcgtcactgcactccagcctgggcgacagagcgagactccgtctcaaaaaaaaaaaaagaactgatcaggttgtctccaaagggttagcaccatgcgtggaagtgcaagggagcgtgttccccctgtctgggaagtgcggcctggttttcttttcagggctagacattctgatggttgtgaaggaggagcttggggtggtttcatttgcatttccttcaggactggaggtctttgtatatgttcatttacaccaatatgtcgtcttcgccggagtgttcagatctttttccattttttaattgggttgtgttttcttgtgaagttttgggaattcttcatctgttctagatttaagtcctttatcagttacgagatttgcagataagcctgtgggctgtcttcattgtcttaacgatgtctttcaaagggcagttcttaattttttggaaatccgttttatcagtgttttatggattctgcttttagaaccattagaaa

SEQ ID NO: 13221 - DNA, 2300 bp, Homo sapien
actaattttttatttttatttttttttttttaagagacagagtcttgctgctctgtcgcccaggctggagtgcagtggcatgatcttggctcactataacctccacctcccagcttcaagcaatgctgtagtctcagcctttcaagtatctgggactataggtgcccgccaccacacccggctaatttttttttttttttgtattttagtaaagactgggtttcactatggtgtccagggtggtctcgaactcctaagctcaggcaatccacctgccttggcctcccaaaattctgggattacagatgtgagccaccacacccagcctcacacccactaatttttttgtttgtttgtttgtttgttttttgagacagagtctcactctgtcatccaggctggagtgcagtggcatgatcttggctcactgcaatctccgcctcctaggttcaagcgattctcctgcctcagcctcccaagtaggtgggattacaggcgtgcaccaccacgcccagctcattttttgtattttagttgagacggggtttcaccatgttgcccagggtggtctcgatctcctgagctcaggtcatccacccgccctaatctcccaaagtgttgggattacaggcgtaagccgcagcacctggccccggccaaatttttttcaaaaacttttgtatagacttcgtctctgtattgcccagtctataagcgtatctttttttttttttttttttttttttttttgagtcagaacttcgctcttgttgcccaggctggagtgcaatgctgcgatctcagctcaccaaaacctccacctccctggttcaagcaattctccagcctcagcctcttgagtagctgggactagaggcatgcaccaccacgccctgcaaattttgtatttttagtaaagatggggtttctccatgttggtcaggccggtctcgaactgcggacctcaggtgatccgcccgcctcggcccccaaagtgctgggattagaggtgtgagccaccgcgcccagcctatgagcatattttttatcgttctctttatttctagctgcgatgattgtatcttattgaaaatcattaaaaatcttagcaattgttttaaattatctaatttttttctccaaataatatctattttagcagccaaatcaccacaaatcattggtttttatctttagttgtgggtgcacagcgggtgcgtgtattttggggcatgtgaggtgtcttgatgcgttcatgcagtgtgtaacagtcacatcagggtaaatgggacatctttcacctcaagcatttatccttcgtgttatggacaccctcagctggaaaggggggctgcgtcgtgagtatgaatggatgcaagtcatagccacctgagcctggtggggcacagcagggccctgtggagtcacatcccggcctcatgctcggcataggggagcgctgcttaggtccatgcagtcgctcagggcccaggctgtgcagcgcccagcctgtcctgctccaggcactcccccgtggcactgtgccgtgctggcagaggtgcacagcgccaggcctcagtgtgcacacacagcccccgtggcaccgccatgctggtagagatgccagaagtgggccctcctctcacccatgagtgtcagctgatgccggccggctggcgacttgtgtacccagcccacgcctgtcttgctctaagagtccccggaccgttgttgcgtgtggtgctgtctgcatggtctggagggaaggctgctgggtgtgcgcccctctgtgtcctgagcagggcggccatgcagtaggagcacgctgcctggccctagcgtgtctgcagcaggctggctggcagcaggtggccagtggctctcctgggttcggtgcgatggctgccctagctgagggtcagagaggctttgtccaggggaggggaactggtggggggcctgggggcctggaaagacaagtgcaggttgccccacccctgggctgcgtgggccgcctgtgcacgtgccatggcacatggaggtgggcactgaggtgctgtgtctgccgcagacccgtgcctgtatattccacgctttgcgcacctgctggaattcggggagaagaaccacgaggtgtccatgactgccctgaggctcctacagaggatgaagcgggactggatgcacacaggccggcgcccctcgggcctctgcggagcaggtacagcgggccctgcctgcctgggggatgctggtctgggtcctggcctcacactttcctgactcctgagtgctggtgg

SEQ ID NO: 13222 - DNA, 2300 bp, Homo sapien
gccattctccttccttggcctcccgaatagctgggattacaggtgcccgttaatttttgtatttttagtagagatggggtttcaccatgttggccaggctggtctcaaactcctgacctcaagtgatccgcccaccttggcctcccaaagtgctgggattacaggcgtgagccaccgcgcccaacctacactgtaacatatttaaaaatcaaagtgcaaagggtggtttctttctaaggatgaaaattattattcacatgctccacaccaccatgcagatcaagacgctgactacctctggcggctcagcaattctatcctggcacccccggagacagctgtcgcccaggtcttgtgtgctgctgtaagttattccttctcactgcattccccaaatggacccaccacaacctgctgatcctttctgttgctgatggacatgtaggctgtctccactctggccatttgtatttctcctggaaactgcttatgcccgttacctttttctatggaaacagacggctgggacagaaaccacggccacagcagccagcgtgtctttgccagtggggtcccacactatgaaatcgcagctgtggcctcggtgggtgtgtccttggcgggtgcatccacacactttctctcggaactttccggactctcatgcatatgctacagctttccaaacggcttggccgtgcggagttacgcacccacctgcagcaggtgatctccagctgctctgcattccaccaacactacgtgacaagtctcaagttcagccgcctgggggctcgggcaccccattcctgggagaaatgatgatttgtgcactctgggccattgcatggtgtctgttcacgtcctttgcccgttttttaaaaaactgggttgtcagccttttccttcctgacttgtagttgctcctccatcctggagagtcctttgttgaaaataccgcaaatatcttctgaagaggactctcccagggaacattcactacaactgtaacgaccacagagacacagagctcctgttcactgtttagcccaggactgcggtgacaggtgcacccatgacccgagatgctggctgcgtcctgtggggtttcctgcatatggaagttttaaaagtctaaagcctggcggtccaggaggttgcgtgtgtgtcctcggggaggaaccctcctgacagccaggcctctggagcttcgtctgcacgcgagcttggcatgcaccagctgtgcggcccaggccaggtgacacggcctctgaagtctggtctcctcatcagcaaagccagtgccccatgccacgcacctcccaggattagccccaggccgggaggctagaggccccacaaggagcgagcctgcgactgcgatccacaggcagagccacagaggcagggcgcgccctggggcccaagctccagggctgcaggcccagggccagatcctgacttgcccacccgccggctgtgtgaccttcagcgcgcgactaacctctctgtgcctatttcctcgaggaaaatgccgggaaatagcagcgcctgcccctgtaaagccctcagagcagagtggaccgcgctctctgcaagcgctggctgctggcgtccgtagcaagctaaatcgcgaagcatctgaacgaacgaggaagcccaacgaccatcccacaggccgcggccagaggcagactccggaatgcaaatggccaaacaagcaggtccacctgcgttcctaaccaaaagatcgctaactgaagaacgggcgcaagcacctgcgcatggcactgcgggtctgggggcggccgcctgccagcgccgggagccgccttccacggctacctctgcacagcgcgcggctcgcgccggttgctgggcagaagctcgagcagcttcgaggatgtcgggcctgggggcggggccgcgaggcagcgacgtcgcgcggggcgcggccctgacgcagcgtgacgcaccggcgccgcggcgggtacgggctcgggcgggcgggcgggcgggacggcgccccccgcggccgggcctggccgggctgcgctaggctgggctcgggcagggtcgcaggggcgggggtggcaggggagcgggtggcagccccgcgggtcacagcgccgccgccgcccatgctgctgcccctagcctgcctgcacggccgcgtcgctcagtgcctgacctccttgcttttgcttgcagagccgctcccgaggccccggcgcggcgcgagggcgcggggcgcggcgtccacaggcgccgaggctgcccccgccgccccgcccgcgaag

SEQ ID NO: 13223 - DNA, 2300 bp, Homo sapien
ctcggcccagttcaggacggcctcgaagaccaccgcctctttggtgttgagggcctcccgagtgacaatgatctccagcgtctgccggtctatctcacagaagccttcggaccgtagggccatctcggcctgtgcgtcaatgacctcccagcagcgctgcgtcagctcgggctcctcaaacagccggctctgggacagcaggacgcaggcgttcttggcttccaaacttgtctccagaaagttgacacaggcttttgccaatgctgggacgatgtacttcttagcagcgtacagagtggccagcaccgtgtcggcttccagatcgatctcatcactgtacatgtacctaggcgaggcagggcccgcgtcaggggctggctcccaagcacccatcgcggggctgggcctgggagaggagtccatcagctcctgtgtgcttcccttcagaagcctccggaggccgcctaaaacggacccacccgtccctccccagtagagtggacttactttaagaggatcagaaaggctgcgggctccacgtctggaatgtgaatttcagatttgacttccgccaggtctccgtagaacatggcatagaagacggagctgccgacagccaagacgtactgggaggagaaagcgccgccgtgagcctggctctcccgcaggctgcgtgtcagccacacggcggacggggcggacggggcacgcgttccgagaggggccgccgctacccaccttgtgggcgggcaccgtcctggtcgcccccgggggccccacgacgaagtgcacgtcggccatgagctcgttgttgaacatgagcgcgttcctgcaaaggtagaggcacgggctgggggcgtgggcgcgcgcgggcgcgggggccgcggggcacgggctcacctctcgcgcagcgtggggcggcagcaccgccagccggggctctcctggtggttgttgccgagtgtgggcggcgcgggcgcgggcggcggcggcgctggcgcgggggcgctgggcgggctgcgcggcccggccttcctgcccacggcggcgccggcgttgctgttggctaggtccgcggccgcggcgctggcgggagcgtagagttccgccgccatcttcgcgggcggggcggcgggggcagcctcggcgcctgtggacgccgcgccccgcgccctcgcgccgcgccggggcctcgggagcggctctgcaagcaaaagcaaggaggtcaggcactgagcgacgcggccgtgcaggcaggctaggggcagcagcatgggcggcggcggcgctgtgacccgcggggctgccacccgctcccctgccacccccgcccctgcgaccctgcccgagcccagcctagcgcagcccggccaggcccggccgcggggggcgccgtcccgcccgcccgcccgcccgagcccgtacccgccgcggcgccggtgcgtcacgctgcgtcagggccgcgccccgcgcgacgtcgctgcctcgcggccccgcccccaggcccgacatcctcgaagctgctcgagcttctgcccagcaaccggcgcgagccgcgcgctgtgcagaggtagccgtggaaggcggctcccggcgctggcaggcggccgcccccagacccgcagtgccatgcgcaggtgcttgcgcccgttcttcagttagcgatcttttggttaggaacgcaggtggacctgcttgtttggccatttgcattccggagtctgcctctggccgcggcctgtgggatggtcgttgggcttcctcgttcgttcagatgcttcgcgatttagcttgctacggacgccagcagccagcgcttgcagagagcgcggtccactctgctctgagggctttacaggggcaggcgctgctatttcccggcattttcctcgaggaaataggcacagagaggttagtcgcgcgctgaaggtcacacagccggcgggtgggcaagtcaggatctggccctgggcctgcagccctggagcttgggccccagggcgcgccctgcctctgtggctctgcctgtggatcgcagtcgcaggctcgctccttgtggggcctctagcctcccggcctggggctaatcctgggaggtgcgtggcatggggcactggctttgctgatgaggagaccagacttcagaggccgtgtcacctggcctgggccgcacagctggtgcatgccaagctcgcgtgcagacgaagctccagaggcctggctgtcaggagggttcctccccgaggacacacacgcaacctcctggaccgccaggctttagacttttaaaacttccatat

SEQ ID NO: 13224 - DNA, 2300 bp, Homo sapien
gctgagttcgctgccgtccaggacggcactggccgtgtagaaggtgtcttgttcaacctggaccgggtgttcaaaccagaccgggaaggtgttactggatccgtctgacatgaacttggtcaagttctgagccagaaccaccccgagccgcttgagctcaatcttcacgctgtactcagccttcccagagctggagccatacaggcccagccctgcaataaatacccttctgtccactgcaaactggatgctgtcgcagcgcccgcggtaccgccactggttgctgcggtaggcagaagactggaatcggtggcacctctgcggggcgaggcccttcctcttggtcaggggaaagtccaggcggggcttgttggtggccgtgtaccacaggaagatgctgtgggtctcctccagagtcaggatgtctgactgggcagcgccgttggcaaactcctctagggtcatggttggaattcggaccagatagagggctcgccccagaacatgcctcttgtttcgtggggtgattggcagcccctgcctcttgcactccgcctcggcccagttcaggacggcctcgaagaccaccgcctctttggtgttgagggcctcccgagtgacaatgatctccagcgtctgccggtctatctcacagaagccttcggaccgtagggccatctcggcctgtgcgtcaatgacctcccagcagcgctgcgtcagctcgggctcctcaaacagccggctctgggacagcaggacgcaggcgttcttggcttccaaacttgtctccagaaagttgacacaggcttttgccaatgctgggacgatgtacttcttagcagcgtacagagtggccagcaccgtgtcggcttccagatcgatctcatcactgtacatgtacctaggcgaggcagggcccgcgtcaggggctggctcccaagcacccatcgcggggctgggcctgggagaggagtccatcagctcctgtgtgcttcccttcagaagcctccggaggccgcctaaaacggacccacccgtccctccccagtagagtggacttactttaagaggatcagaaaggctgcgggctccacgtctggaatgtgaatttcagatttgacttccgccaggtctccgtagaacatggcatagaagacggagctgccgacagccaagacgtactgggaggagaaagcgccgccgtgagcctggctctcccgcaggctgcgtgtcagccacacggcggacggggcggacggggcacgcgttccgagaggggccgccgctacccaccttgtgggcgggcaccgtcctggtcgcccccgggggccccacgacgaagtgcacgtcggccatgagctcgttgttgaacatgagcgcgttcctgcaaaggtagaggcacgggctgggggcgtgggcgcgcgcgggcgcgggggccgcggggcacgggctcacctctcgcgcagcgtggggcggcagcaccgccagccggggctctcctggtggttgttgccgagtgtgggcggcgcgggcgcgggcggcggcggcgctggcgcgggggcgctgggcgggctgcgcggcccggccttcctgcccacggcggcgccggcgttgctgttggctaggtccgcggccgcggcgctggcgggagcgtagagttccgccgccatcttcgcgggcggggcggcgggggcagcctcggcgcctgtggacgccgcgccccgcgccctcgcgccgcgccggggcctcgggagcggctctgcaagcaaaagcaaggaggtcaggcactgagcgacgcggccgtgcaggcaggctaggggcagcagcatgggcggcggcggcgctgtgacccgcggggctgccacccgctcccctgccacccccgcccctgcgaccctgcccgagcccagcctagcgcagcccggccaggcccggccgcggggggcgccgtcccgcccgcccgcccgcccgagcccgtacccgccgcggcgccggtgcgtcacgctgcgtcagggccgcgccccgcgcgacgtcgctgcctcgcggccccgcccccaggcccgacatcctcgaagctgctcgagcttctgcccagcaaccggcgcgagccgcgcgctgtgcagaggtagccgtggaaggcggctcccggcgctggcaggcggccgcccccagacccgcagtgccatgcgcaggtgcttgcgcccgttcttcagttagcgatcttttggttaggaacgcaggtggacctgcttgtttggccatttgcattccggagtctgcctctggccgcggcctgtggg

SEQ ID NO: 13225 - DNA, 2300 bp, Homo sapien
cagagtgggaggagagagacaaggggtgggagagcctgtttcaccctatagtccactcctgcaacaggctgtcccgcagcagtgtcacagctagtgacagtccccagggtccagaacgctgggcccagcagaatgctcccccgacagtctgttcatagggtaggactctgaggtgctagtgatgcattaggacatagagacaaccaggcacctggtgtttcctagggtggcccagaagccagccagcaacccaggggacagatgggcttcactggggcgcagtttgctcctaaccacatagcatgttcagcatgacaggttttctcctcgggatgggagggagctgttctgttgcatgagaaagagaataccccactgtacaactgctgtagtcatttactgacacgtgggtgttattttaggcaacctttattacagaagtccactattttaagtgactttttgccaattttagatttgaagggaaggtctcaagttaagcttggaaccacttagaatccaagagggtagcaggaagatccaacccctcaaagcaggtggcatgggtgccactgggaggggatctggggcctgtcttgagccgtaaatcttcctccacctgagacgtgcaccccactgtaccagagatgcctaagactccaatccctgggttctggctgtgtggaaaatgtctctacacagtcaagcttcagctgactacatgtcaaagagagacaaagttaagagcagcctttcatggtgtcaagaagcagttagcatcttgacttcccctccactcactcgctgacctgctgcagcctccccgggcacctcaggcatagaaaatgagctcagggatctgcccaccctggaccccagtcccgttggtgctgtccgaggagcactggaactggaaggccacctttccacactgcacttccgtcatcccctcctgcccaaagtagctgagttcgctgccgtccaggacggcactggccgtgtagaaggtgtcttgttcaacctggaccgggtgttcaaaccagaccgggaaggtgttactggatccgtctgacatgaacttggtcaagttctgagccagaaccaccccgagccgcttgagctcaatcttcacgctgtactcagccttcccagagctggagccatacaggcccagccctgcaataaatacccttctgtccactgcaaactggatgctgtcgcagcgcccgcggtaccgccactggttgctgcggtaggcagaagactggaatcggtggcacctctgcggggcgaggcccttcctcttggtcaggggaaagtccaggcggggcttgttggtggccgtgtaccacaggaagatgctgtgggtctcctccagagtcaggatgtctgactgggcagcgccgttggcaaactcctctagggtcatggttggaattcggaccagatagagggctcgccccagaacatgcctcttgtttcgtggggtgattggcagcccctgcctcttgcactccgcctcggcccagttcaggacggcctcgaagaccaccgcctctttggtgttgagggcctcccgagtgacaatgatctccagcgtctgccggtctatctcacagaagccttcggaccgtagggccatctcggcctgtgcgtcaatgacctcccagcagcgctgcgtcagctcgggctcctcaaacagccggctctgggacagcaggacgcaggcgttcttggcttccaaacttgtctccagaaagttgacacaggcttttgccaatgctgggacgatgtacttcttagcagcgtacagagtggccagcaccgtgtcggcttccagatcgatctcatcactgtacatgtacctaggcgaggcagggcccgcgtcaggggctggctcccaagcacccatcgcggggctgggcctgggagaggagtccatcagctcctgtgtgcttcccttcagaagcctccggaggccgcctaaaacggacccacccgtccctccccagtagagtggacttactttaagaggatcagaaaggctgcgggctccacgtctggaatgtgaatttcagatttgacttccgccaggtctccgtagaacatggcatagaagacggagctgccgacagccaagacgtactgggaggagaaagcgccgccgtgagcctggctctcccgcaggctgcgtgtcagccacacggcggacggggcggacggggcacgcgttccgagaggggccgccgctacccaccttgtgggcgggcaccgtcctggtcgcccccgggggccccacg

SEQ ID NO: 13226 - DNA, 2300 bp, Homo sapien
gctgggcgtggtggcacatgcctgtaattccagctacttgggaggctgaagtgacagaatcacttgaacctgggaggtggaagttgcagtgagctgagatggcaccactgaactccagcctgggtgttctctatctcaaaaaaaaaaaagaactagagaaagggcggggagcagtggctcatgcctgtaatcccagcactttgggaggacagggcggggagcagtggctcatgcctgtaatcccagcactttgggaagacaaggcgggtggctcacttgagcccaggagttccagaccagcctgggcaaatgaggcaaaaacccatctctacaaaaaatattatctgggtgtggtggcacatgcctgtagttccagctactcgggaggctgaggtgggaggatcacctgagcccaggaggtagagtctgcagtgaggcttgattatgctactgcactccaccttgggtgacagaatgagacactatctcaatttttaaaaaatgaagaaactagaaaaagggaacacattgaaccaaattaagtggaaagaaggatctaacaaaaatgagagcagaaattaatgaaatagggccatgcacggtggctcatgcctgtaatcccagcactttgggaggctgaagtgggcggatcacctgaggtcgggagttcaagactggcctgaccaacatggagaaaccccgtctctactaaaaatacaaaattagccaggtgtggtggtgcatacctgtaatcccagctactcgggaggctgagagaggagaatcgcttaaacccaggaggcagaggttgcagtgagccgatatctcaccactgcactccagcctgggcaacagagcagagactccgtctcaaaaaaaaaaaaaaaagaaagaaaaaaaagagggtggggtcttccgcatttccttttttctcttttttttttttgagacagagtttcactcttgtcacccgtcacccaggctggagtgcaatggcgggatctcagctcactgcaacctccacctctcaggttcaagtggttctcctgtctcagactcgcgagtagctgggattacaggcgcccaccaccaagcctggctaatttttttgtatttttagtggagacggggtttcgccatgttggccaggctggtctcgaactcctcaccttacgtgatccgcctgccttggcctcccaaagtgctgggattacaagcgtgagccactacgcctggttacgcatttctttttaggctcattcctgggtatgtcaccggccctatggcgattgtgaacagcacctgcagatatttgagggcgtgcgcagccagggttcccgctctgggcagggggcacagcgaggtgactcacgggtaaccacaggtggccacgaatgactgctagaaagtgggaattttaggggaacagaaaacggagaatagcggggcgcacggggaggctctggaacctgggcgagcggagcggcggacgccgcaaatgcggagggcggggcagggtggcccctggcgggtgtctccacctctgcggccaggccccccagcgcagctgccctggccccgcccaccactcccagagcccggggttgggtcccaggtcgccctcaggagccaaggccccgcccaccacgctcggccccctcgcctcaagccccgcccacagttcgggtccagacccaggctccgcccccttcccccgcccacagctccagttcccttcgcaggccgtctctccacgggaggccccgccccccaccctcagccccgcatccggctgagtcctcaccccaggcctcgctcgccgctggagaccgcgctcactatccgaggaggaccctcctctgccccgcgtccagctttagtccccgactgcgttcatcgccaagggcccgcccactgccttaggtcgcgtcgccagccttgggtcccgtcgccagccttgggtcccgtccccggctgcactcaccgcgaggccccacccttagctctagtccccggtgtcgcccaccgacgaggccccgccccaaactccagtcccgggctgcgctcaccgccgtggccccgcccccaagcgccagtcctcggctgcgctcaccggtaggccccgctcgggttccgccgaagcccagcccccgcaggtcgcccctccgacgccggcgcgccgcaagggaggccagctcgctcgcagtggggaggtcgcggctccagtcctcgcgtccccgccgtggtcccggtgcctgtcccatcccgcgggcgcggccgttgcgggcggcgcggcccgg

SEQ ID NO: 13227 - DNA, 2300 bp, Homo sapien
ttgaagctttaacttcttaaataataataactcccacaacctccggggaccccgggcagcacgtggtaggaccagctttcaggttgtcctcctgagaccccagggctctgaaggatcctcttcttggacctcctccccaaccgtgcccagccaccccagtcatccgagaggtttgtctcaaaccaagttcctgctttaaagaaaacgctaccagagaaagcacctgtgctccaaacacgggggtgagggctcacaccatgccagggtcatagcatggggagggatgcctcccagccttcaggggatctcctcctgtgacccacagccctcaagagaaggaccagcacagcatcattttccgacagaggagggcagtgcaaataacaagttctggctaaaaagttactctgatcacccaagggacatctgtgcacttggaaaatacagaagaccacagtcccatcaccaccatcccaccttaaaaacaaacataaacgtggtcgcaggcgtgacacatggtgtgtttcgtgtccctgctttcctgcctggcagaagcattgatgtagacccaccatacgggttcttcgggccactctggtacagactgtgtgggtcatatcccgacccctggcagctgcataacctcacaggccgccatctcctcttttgtcacttgggatgggacagaactgtcacgtcccttaagggctcacaacggtgcctggcacagaggaggggcaccgctcaatggtggcagctggtgccaagccctgctgtgcacggcttagtcaccccgcatctcctcacttgacccccagttgtagtccctgcctgggttagacgctggcatacacaggcaccatgtgtcaggcggcccatccgtctgactgcaactgcacgctcgccaggtccagcagcgccgtacgctcagttctggggtcaatgggtgcctgtctcctgccctcccatcacagacagcctgtcctcctggggtatggctaccccctctctggacatagtcacttctccccctaccctgtctcaaaggtatgagatccaccggccctctgcccgccgagcagctggccaaggtcagacagaccctcatggctctcagtgtaccaccttagaggagccaggggcgcgtgggaaacacagagtcccttgttctctccgaagtgggaccctgactttaagcagtcgcagctgtttgcagttctagatacaggagttacagctggaggctgagctctctcaacggaggaagcagcggcatgagggcctttgcagaaggagctgacggggcactggggtggcaagccccgtgggccaggaaagaaaccagctccaggtcaatttgctcgggctggatttgtttcagtaaaactacttgtagacaagacacagggcgaagagaaaagcaactgtaaactaactgtgaaacaaggaaacagaagagaggccagaaaaccgtttcctaaatctcggcttggcatctggtgctggaccacagccgctgccaaacagatgggggaagcaccctccctgagccccagagcctacacgtcgggccccagcggctctagccattgcctcctctttgcttgggtccccaagttcactgttaaccccagggccaggagccagccttggccccagacatttgttctccattgtcctgagcacaacgctgaaaagcggcgctgaataaggatgctgggacgcaaagagggcgcccggggtcatctggagccctggaggctaagctcggcagcctggcgccccgagtggcttcgagtccccgcgaccgccgccaggcccggccacctccttgccacctccctgcgtcccggggaacccacgcaggggggcgcgagggaggggctcggggacgggcggggcccgcacagccgggccaacccagcgggggtcggcaggagacaaggggcggcgagggcaggggggcggggagactcggggcatggcggggtggaggcgggaaagtgtcgaggccggggaatccgcgcgtggggaggtgggcatcgccagggcgacgatgagctttccttagggggcggcgcctgaagctggccgggacccggtggacccccacgactctcccggcccttgcccgcggctcccggggggcggggcggggcgccccgggcggggtctgtgcgcaggcgcgtgagtgcgcgctctcgcgcaccggcgggcggggacgccccgtgaggcgccgccggaggaagcgcgcgcgcacctcacttccggcgcgcgctgcgccggcggcgattggaccc

SEQ ID NO: 13228 - DNA, 2300 bp, Homo sapien
cccctggggagacgggcacccccatcactgtcccctggggtgacaggccccccccatcactgtcccctggggtgacgggcaccccctcatcactgtcccctggggagacgggcacccccatcactgtcccctggggtgacgggcccccccaatcactgtcccctggggtgatgggcaccccctcatcactgtcccctggggagacgggcacccccatcgctgtcccctggggtgacgggcccccccatcactgtcccctggggtgatgggccccctcgtcactgtcccctggggagacgggcgccctcatcactgtcccctggggtgatggccccccctcatcactgtcccctggggtgacggccccccctcatcactgtcccctggggtgatgggccccctcatcactgtcccctggggtgagagcatttgtctcatcattgccatcagtgtcctgcgttactgcagatcttctgttgattatggtttattcttaaatgattagaagatttgtatttgtttattaggttgagtttttctttgttttttctttgttttttgtttgtttgtttgtttttgagatggagtctctccttgtcacccaggctggtgcagtcttggctcactgcaacctccacctcccgagttcaagcgattctcctgcttcagcctcccgagcagctgggattacaggcatgtgccaccacgcccggctatttttcgtatctttagttgagacggggtttcaccatgtcggccaggctggtctcgaactcctgactgcatgatctgcctgcctcggcctctcaaagtgctgggattacaggcgtgggacaccatgcccagcctagtttttcattccttatctatgataaagagaatataaggccgggtgtggtggctcatgcctgtaatcccagcacttcgggaggccgaggtaggtggcaggagaatcgcttgaacccgggaggtggaggttggttgcagtgagctgagatcatgccatagcactccagcctgggggacagagtgagactccatctcaaaaaaaagagagaatataataacgagggcaaaaaaacacttactgagtcaaggctattttgctcttctatttaaaaagataggggaaactcagagttcacaagcaatcccagctcttcgggaggctgaggcaggaggattgcttgaacccaggaggtggaggtgacagtgagcccggctaatttttgtatttttgtagagatggggttttgccatgttggctagggtggtctcgaactccctacctcaggtgatccgcccagcttggcctcccaaagtgccgggattacaggtgtgagccaccgcgcctggcccaatgctccatggttcagtgggttttgataggcatgctcaggcatgtcagcaccaccgcagttagggtggtgaacagccccattttcccctaagtatttaaactgatttttatttgtgaactctgagtgtctaagagatacctgtgaacatcagcttgctggagccctgctggacagggagcctgtggtgagacgtgcaggcgagttgggtgaacagggggcctcggagggagagccctccccgccctgtgtgcccctcgcggaaaagcgtcctgggtcccaccttgctgattgcctcaggcacatgagccgccacactgtttccgagtgtccacaggcgcgctcggccatcccggacactgcagcacatagtccttgtccacctgccatggctgttagcgtggcgcggagccctcagggcctgagctctggcgactggctcactcttgattgtgttgggtaaaggatgggctctggggaccggcatgccactgggatgaacttgggggcccgtctgtgggtgcccttccgatctcatgggcagcaggttggcctggtcgcaggctgcagggtggctgggccgtcagaggccgtgatgctgcctggggccccggtgcaccctcagctgccactcgcacttgtgcccacagtatcctcacttcttgaagagggaaggcaacaagcttcagatcatgctgcagcgcagaaagcgctacaagaacagaaccatcctgggctacaagacgctggccgcgggctccatcagcatggctgaggtgagtgctccgtctggcgtggcctgcgtcgggctggccacctgggtgccagagcattcgcccgtgggagatggagatgtctctcccgggtccagatgtccagggatcaggtgaaaatgatgagaggagcctgggcggccgggctccgccataagggccaggtgcg

SEQ ID NO: 13229 - DNA, 2300 bp, Homo sapien
acttttaaacatttttttaccttgattaattgaagaattagcagcccaaatcaggaccccacaatcaaaataaatctggtcggctgggcgtggtggctcacgcctgtaatcccagcactttgggaggccgaggcaggcagatcatttgaggtcaggagtttgagaccatcctggccaacatggtgaaactgtttctactaaaaatacaaaacttagctgggcgtgctggcagatgcctgtaatcccaggtacttgggaagctgaggcaggagaatcacttgaacccaggaggcggaggttgcagtgagccaagatcgcaccattgcacaccagcctgggccacagaatgagactccgtctcaaaaaagtaataaataaataaatctggtctataaaatcctaacatctggatgtgaaccgatagccccaaaaggcggcttctagagcacagctggccccaaggctgtgagtgtctgagagttgtcgtcatggcgtgtggttctgaggctggcgtggggcacggcggggctgtgcctgggtacaggtcgtggctgcaggaggggccggggcttgttctgcagctccgtggtttgagtgcctcacaacagaggagctggacctggcctgtgagccaggcctggtgggtgtctcctgctgctggagattccggcctggctgagagtgctgggctcctccttggtcccccacagacactggtccctgggcattggctcctgtgggttgggcagccggcttcacacactgctttgctgctgctgagctcttgggtgggtggagggtggaggcagggttggagcagggggccaggatcttcctgggtggcactgcatggacagcagtcgtgcctgagatcaggagggccgcggacacccctgtctgtccatctcagtccctcgtgactgtgcctggcactggcctctccagcacagcccagtgccctctgcttatggcccgttcgtgaaagctcccacgtgttcctctcgtctgtccgcctggctcctgtgtcctcctctcgtatctgtcccctctccccagtggccacgtttcctgtccactggatgctccctgccctgtggctgccctgctgagggtcccccttgctgtcactgagagagaaagcccttcagaaaccccagcccacacatcagggcaccggggctccttcccgtcgtgctgctttctagaaccgtgcccctggcctgcaggtgatgcaacacccgtctgaaggtggccaggtgctgagcctctgcagcagcatcaaggaggcccccgtcaaggcggccgagatctggatcgcctccctgtccagccagcccattgaccacgaagacagcaccatgcaggccggccccaaggccaagtccacgggtgagtgtggtgccagcccgctcctgcccctgctgtggggaggccctgccttccagccatggcacatcgggtggcagaaactgtccagcctggcttaaggagttgggggtccggagcacgtgtcagttgctctcctgtctggaagccacagcagaggtgcgcgctgttgtagggtccgggctgccacaggtccctgttctgcccccgtggctgcagctccttggtcaagaggcctgagtcctgagtgtcctcaaaaaggaggtgtggggtcgcactgtgatgcccttgctggtctgggtgcagggcccgccatgggcaggtgccacagctgccgccaccccagtggggtcaccagggcctcccctactcctcaggcgggggagacccagtcggtgcaaatccaggctgaaatgccagctggcaggaggggccgtggaggccggagcagttcatgtggccccctttgccctccctgcccctccccacttcctgccaaccccgacctggaccgttgccagtggacttgggggactcgggggctcggggccacggcacctgtgtctggagcccctctgtcctgcatggatccacctcctcgctgcccccactctgtgtccagggaagcctgggggtggtcactgcctggtttcccgggtggaatctcacggcaccctcccttctgtctgttcattccgcagataactactccgaggaggagtatgagagcttctcctccgagcaggaggccagtgacgacgccgtgcaggggcaggtgacctggggccggggctccgcgccctctcctggctcacaccgggtgtcctggggtctgtggggtcctcaccagctgtcaccagggcctcgtgagggtgggtgagccacgggcctggcccctggttggccgcccatct

SEQ ID NO: 13230 - DNA, 2300 bp, Homo sapien
cagcaaggctgctttggagcccagcctaggagctgcgggtgtctcgctgtgacacgcacattccacgattcaaggtgcaagcacattcgatgaagccctcagtgaggctgacaaccttccaaatgctgagaaagaattttttttcaaccctttttgctttttaaaaataatgacttgtttcgtttttcttgtttgttttttgttttggtttttttttttttgagacagagttttgctcttgttacccaggctggagtgcaatggtgtgatctcagctcactgcaacttccatctctcaggttcaagcgattctcctgcctgagcctcccaagtagctgggattacaggcgcgtgccaccacgcccggctaattttttgtatttttagtagagatggggttttaccgtgttggccaggctggtctcaaactcctgacctcaggtgatctgcctgcctcggcctcccaaagtgctgggattatgggcgcgagccaccgcacctggcctaaaaataatggcttgtagtttaaaagtgttggctgagcgcagaggctgaggcaggagaatggcgtgaacccgggtggcggagcttgcagtgagccgagattgcgccactgcactccagcctgggtgacagagcaagactccgcctcaaaaaaaaaaaaaaaaaaaggggttttggagaagatactctgcaagtaactgtttcagaaacggagctctgggaggctttcctctttttgagcacgggtcagatgacctccaggtcgacgtggccctgtctccccacaggggtctctgttttaagggggctcccactgtcttcttcccacacctgtgcaggtggaagtggatgtggacgagcagcgcctggcggaaggtggtggggtctgctccttccacctgcaggcagccctgggggaaatgctgccctccccaccccccagggctctgagtgtggagggcaggggcaggaatggcgtccctcaggagccagcatggccctggagcccccgagtccctgaggaaagtgttgatgccctccagcatggggctccttctcatcctgtacgcccggctgccacccagcctggtgggccaggcaggcaggtggatagggtgggcaggccgggcaggggggcaggcggtcaggcagccctctcccacagtcctcatcgacggcgtggagtgcagcgacgtcaagttcttccagctggccgcgcagtggtcctcgcacgtgaagcacttccccatctgcatcttcggacactccaaggccaccttctagccccacccaccagggggcccacctcctgccccatgctgtgaggggcccagctgcatttctgttaacatttcagtttactacagagacagacgcttaaaacacaaagagaaacagtcttaagtatgaatgtgctcacaacgtggaaactaacgggggagctcctgccaggagccgaataactgctctgcttattaacccgaacgttcggcccggggctgggaagccagaaggacgatgctgagccatggatcgcggaaggcgtcctctggcctcaggagccacccagagcctcacaggctgagttcttgcctctgtgtcctgtccttcctggaagtcaggactctgcttcctcagggagcccggggaaggcggagctcagtggccacaggccgagggccatggggccgctcagtcccgttggggttgtcctgagttgagcctgggggggccgtcctgcccgcctaagagatgcccccagcaccgcacactcgtggttcccaataaactcctgcctgcggcggaggttttatagcagcagatatttttaatgcttttcaatacatgttctaatgtagctgccaaacatgttgctcttctgaagtccccctggggctgggcagagccagcagagcctgcccccacttccccagcccctgccccaccccgcctcacaccttccccactctcaggctgttcttgaaacaccatgaggcttctgcgtgtagtccctgccccaaacttagcaagcacaggggcctccacagcccaggtggccccagaaaatgttccagagcccagcttggtacatagtgagatgctgctggggttggcctgaggtgggggccacttcctccaccccagtgggtatgtctgaggtcagccatggggatatctgggttgagattcaggttttggtgaatatggggcaggcgtccagatgtgtttgtgtcacctgctgcaacgctgtagccaatgaagattccagcgggatggcctgaccagcggggccggca

SEQ ID NO: 13231 - DNA, 2300 bp, Homo sapien
tctttcgttctttttctctctttctccttccttccttctttttctttctctctctcttttttttttttccagagtcttactctgtcacccaggctggagtgcagtggcaaaatcacagttcactgcagcctcagcctcctgggctcaagcaatctctgcctcagcctccccagtagcaaggactacaggcatgtgccactgaacttggctaattttttaatttttcttttgtagagatggggtctcacaggctggtttagaattcctggcctcaagcgatcctcctgccttgggctcccaaactgctgggattgcagatgtgaaccatggcgcctagcctccttaccttttttgtttgtttgtttgagacggagttttgctcttgttgcccaggctgaagtacaatggtgtgatctcggctcagtgcaacctccacctcccggattcaagcgattctcctgcctcagcctcttgagtagctgggattacaggcatgtgccaccacgcctggctaattttgtatttttagtagagatggggtttttccacgttggtcaggctagtctcgaactcctgacctcaggtgatctactcgcctcggcctcccaaaatgctgggattacaggcatgagccaccacacccggccagcctttttactttttaaggcttaataatattccattttctggatctgccacattttctttatccattgatccattgtggaaacctggattccttccacattttcgctattgtgaataatgaccactgctgtgttggagtgcgcacatctgtttgccttcctgccttcaactcttttgggtacataccccaaagcggaattgctggatcccatgcaattctgattttaatgttttgaggaatgagaattcacttcgggtttgcatgaatcccactcttagcatggcactgccttctctcccctctccccttccccctggtgagggaggtggaggatggtgaacctcaggctgagcagagtctggaggaaccgtctcctgcagcccacgtgggaagttccttcttgggggatagaggtcgtgctggggacctcacctgcttctggcctttccctgtggccctcccacagcttctccagctggtggtccctgccctccagtctcctgtaccctgccaggggccctcctccactggcgctggtcttttgtctatggattcatgatctttattttctcccgaactctctttatgatcatttcagaggggtctggggagaagggcagtctggagctggccttagtcctgcctttcctgaggcacgcatcagtgctcgagctccgggggttctcctgccggtcaagccgggggccggccgtgaggactaagcggtccacaggcagccctgctgtacatgaagcggggcaggtactgggttgggcggtgtcctggcacagatgactgtgcaaagccacagagggccacactgcctgaggccccgcgccgggagctggcgctggagcagcgggaggctgagcagacggcgctttagaaagcgcccgggggcgagctctgagggtcggcgggtgctgggtgggagcggcgaaggggagctggcgccgaggccctcgccgacccgctgccctgtcccccaggtgtgcgagccgccggaacgcaggcgcccgggccgccgctggagcgtcagcatcgacgagcgccggcggctggccacgctgggcggccgggagaggccgggcgccgccgggacccagctgcactgcagggtgcgcggggggcgggtcctccccgccccgtccccgccccgccccgcccctccgcctcgcctccctcgactcagtcccactgggccctttaccccggcgctcccgggccccgccgttgtccccttcccgcccctcgaggctccctgaccaccctcgcccgcaggacgtcgtgcagatggtagcccagctggtgtcggaggacgtggacaaggacgtgctccttccccacccgctgaggtccaccgagtccaccaacgccttccaggccttcctggcgcgcagtgcgcctttctggcataatgcgactttcgaggcctcgaggtcacccccttcctaagagccccattcagcccattgtctgtcttccagtgcctttccttgggggcccacggtgggggcagcctctgcgccttctttgtgccccaccagggggtcaccacccacccatgttaggaaaacaggccaggcaggacctggctccggacagcctgcagctgctgaggccttggagaccgggctaggggctatgggag

SEQ ID NO: 13232 - DNA, 2300 bp, Homo sapien
cctggcttgaatttcagattgcctccctgggacaccagaccctgtgctgtgctccctcagaaggacagccttgactgtctccactccagcagtcagttctctccactcccactgggagaaggagcaaaggctggtgtcttcaggaggctcctctccaggctggggccagggaagagtgtgcatgtcactgtcaggatgtgtcccagtggtgtggctgggttctcagggtgaagctcgtccatttctgggatggcagcggaagcaggcactacacacgcagcttcagggggctctccccatgcttcctagctgcctggcactttctggtgtttctggctaactttctggccatgccaggagttggtggaaggagatctcaggctgcagctttgctttcctgctgaggagacagaggtaggctggggctgtaggacaggggaggccagcagccccaccttccttctggagagacgctgcctgtctgtcattgcccctctcctgcacctggccgctggctggctgctcttccctcccaatcaccagcaagccagctcctgttccctgcagcccagcccgcaggatgtgtcctgggacccatagccctctctccccagagacagcaccgccctgcagctcgggttcctggccctgtgctaaccctggtggggctttccttactggtctgctctgcagccatgacattgtggccaccgctctccttgggacccccacctggctttcctcccagcacatgctgtttcctacccacctggatggtgtcctgtgtgctggattccccatgctgtgtccccagcatcctgaccatgtctgtcccgcctgcctagatcttgcaccgtggccacggggctccctcctgatagccctgaacgctccgctccatgtcctacagagagggatgtcccaagtagatgtcagctccctccagcatctgagcaggcaggacagagacccacggtgctgctcacatcagcagcctggaaccccgagacagctccttttgctcacctcccccaacactgatgttgcacctgtctccaagccactctgggaccatctgtttctctccatctgggaagcccccttcgcacctcatgctcttcctggctggggcgtctgggtcactcactggactctcctctccttagacctgtgcacaagcacacacgggaaggcatcctgacaggtggtgggaagagaaggcagctgcctcactgcggaaagagcacggccgctcctggactccagccctgttggggctggcggggtcagcaggcgctgggttccagcctcaggtggggtctttggaggtggcctctgggcacaggcacctcctctgcggccttctcaccaggtcacggttcagggaggctttgccggctacggagcctgcccacaccaaggcgcgcacgaccacctgtccagagatgccacgcgggctgggcggcgaaggccaaggacacgccctgcctggtgtcgggggcaaaggttaggcctggaagggaggtgtggggtggggaccccgaggccagggctgggccgctgagcttcagggcccttggggggctcagggaggaatgccggaggaccccagcatcaggaggaacccctggagagctacggcaggactcacctgtggggcacagggagggatcaccagggaaatggcccttgtggaggatctcccctctacccccagggcaccaggggaggatctaccagggggttctggtggaagggcccacccgggaagcggcgcgcggggaggactcgggggcgccgagaggaactgtccgggaaggggcgcgcgggccgcgggcggcgcggggtcggtaacggcccgtgcggtgggcggcggcgcccgaggcccctccccgccgcccgcggccgctcctcctcttcctctcccgcccgcgccgcggccctcccgtccctgcgcggcctcggcggcctcggcggcggcggcggcggcggcggcggcagcagcgcggcccctttaaacgcctgcggcgccccccgcccccgccatcgcgcctccattttcccggccgcccgcgccgagcgccgcgcccgccccgggcccctccgccgccgccggcccggacatggccgccaacatgtacagggtcggaggtaaggccgcaccgcctttatgcccggccccgacccgcccgcagcccccacccgccgccgctgccgcctcccccgcccctctgccccgcaggccccgcgccccccgcccgccctcgcggcccccggctccttcccgaaccgccccccgc

SEQ ID NO: 13233 - DNA, 2300 bp, Homo sapien
gcggcgcagccccacgaagggctcctcccaagcctgtgtggggcccaggggagctgcacctccgggatgggacaaggcagggtcctggctttcatcagccacagcacagctgccacagggcacaaaaggacggctgagagacgaggtcctcacccacaccatggggaaaccgaggcatgggaaggttggagggggggcagccaggctggcgccaagatcacaggcaggcaggcctgaaggccgagcaatgcagccactaggaaggcatgagttggggtcggggtgtccccagccctagagcccaaagctgccaccactccccacccccaacatgggtgggggcagggagagctcttcttgggaccaatcccaaaaccatgcgcagtgggcccggctggagcccaggcagcaggcatcctctctgccagggtgagaaactgggccctcatgtcaggctggaaggggggtctccaggtggggagaaagaacaggaaggaacaggcccctccctcgagggaccccgcacccaggctgctccctgagcgtggggtgggctcagcgcacctgggtccacacagggacctggcaaagctgtatgaggctgtgggaggggctgccgctggatggggtacaggcccaccgcccctctgagaggacaggggaggcccagagctgctgatgcggactgaccgcccatctcacagacgggatgtagggggctcccaccgtccccaaggtcacaggactggccggccagaccacacggcgtccaaggcagcagaagccacgctcgagagacacagagtgttctgggcactcggggtcaggggcatggggatcaagccagagcgggagtgaccccagctccctccagcagcgcaggctgcaggtgggaaaggtaatgagcacctgcccgagagggtcacaggcagggaggggtctcagagtcctggggagggaggcgctgatggaatgatggaatgcacacgaccccccaccttcctgtgaaagaccccacggagtcccaggcacacgaaggagggcaaggctcaaagctgcaggcccggggggcccgagcaacaggaggctgggcccacggaggaagcccctgcccaggaggccctccggcctctccccaacccttgcaaagcgcctcccgaatgggctgaggtgagcgagaggcagggaaaagtttggggggacttagaggcgtgctcgggatgctcgctccctgctgaagaccccctgagggatccctgctgggggaagccccggggccaggctgcaggagggctctagggaggaacgtggcccctcaccggggctccccatccccagaggggatgcaccggagtcccagcacagggccgcgggccgggggagaccccacagccccaaaactcctgctcccagaccggcagccggcgcctcccaaggccacgtgctcccgctgggggctcccggccccggacccccggatgtcccgcaggccccgcgcccccccgccacccccgcggccgccccctcggccccaacaggtgggccgccccccacccccgggccgccgagccccgcccgcccccgatggggccgacccgcggggccattttgggttggggtgagcacggcggggggcggttcgggaaggagccgggggccgcgagggcgggcggggggcgcggggcctgcggggcagaggggcgggggaggcggcagcggcggcgggtgggggctgcgggcgggtcggggccgggcataaaggcggtgcggccttacctccgaccctgtacatgttggcggccatgtccgggccggcggcggcggaggggcccggggcgggcgcggcgctcggcgcgggcggccgggaaaatggaggcgcgatggcgggggcggggggcgccgcaggcgtttaaaggggccgcgctgctgccgccgccgccgccgccgccgccgccgaggccgccgaggccgcgcagggacgggagggccgcggcgcgggcgggagaggaagaggaggagcggccgcgggcggcggggaggggcctcgggcgccgccgcccaccgcacgggccgttaccgaccccgcgccgcccgcggcccgcgcgccccttcccggacagttcctctcggcgcccccgagtcctccccgcgcgccgcttcccgggtgggcccttccaccagaaccccctggtagatcctcccctggtgccctgggggtagaggggagatcctccacaagggccatttccctggtgatccctccctgtgccccacaggtgagtcctgccgtagctctccag

SEQ ID NO: 13234 - DNA, 2300 bp, Homo sapien
gtctcagctgcgctcggccgccatagtccttcctgtcacactggttcagcagacaggcatgggggcgctggtggggcctgggcatagagagccatgctcctgccaccattgcgtgatgaggataagggttggcccaggtgacggaggccagggtatcctcacggagactttcccttccttgctgccccctccagccccaggcttggttttgctttgtttttgactaagctgaacctcttgactcctcatgtccttgttttctgtctcacgtgagtttagcccagcagcaggcctagagagtcttcatggcgtggggtctcccttccctgtacctccacctcaggacccccaccctccaaccgtcagccctcctaaaatacttctaaattaatctgttagaagagcatccctatgtgggggtggtggggcccccaaccatcagccctggggaggtggagactgtggcagggcagggaggagccccaaaggggccgggacacagcggggtggctagtatctgatgaaagcaccatccgggcagcagcgcacaggccagcgcagcagaggctggagacgcatctggaattcggaagaaacaaacatggggttgggtagggtgcctagacctgaagaggaggagggacagcagccagctgtgaggctcctgaggacgcatctgctgggggcaggagtgcagctttgtgtgggggcctctggccaaggggagagcttggccgggcgggaggagtccctgactgtccctggggccagcggcctctccaaggcggatacggatctctccaggcttaaaaacaaaccaagatgagcagaacatgttcagacaagaggacgagggctagaaacaaaattcaccaactaggctcagaccagggcggaatttgagggagaccctgctgcacatggttccagcggaggagaccccagtgctgagcccacgtgatgcctagcgaggcagcgctcaggggactgcggctgcggggccatgcccaggcacggtctcggggggctgcggctgcggggccctgtccaggtgcggggatgggaggctgcagcttcggggctgtgtcgagggagcaggccccgctctccttcctgccagatgcagtggaccagactgaggaactatctgaacccttatttaataagacaggtttcttaaatccatgccacagcccgggcgcagtggctcatgcctgtaatcctagcactttgggaggccgaggcaggaggatcatgaggtcaggagatcaagaccatcctggccaacatggtgaaacgccatgtctactaaaaatacaaaaattagtcgggcatggtggcaggctcctgtagtcccagctactcgggagacagaggcaggagaatcacttgaacccccgggggtggaagttgctgtgagccgagatcgcaccactgcactccagcctgggcgacagtgcgagactctgtctcaaaaacaaaaatggctgagatggccgggcatggtggcttatgcctataatcccatttgggaggccgaagtgggtggaccacttgaggtcaggagttcgagaccggcctggccaacatggtgaaaccacgtctgtactaaaaatacaaaaattagccgggtgtgttgagaggtgcctgtagtcccagctactcaggagacagaggcaggagaattgcttgaacccgggaggcagaggttgcagcgagccgagattgtactactgcactccagcctgggtgacagagcgagactccgtctcaaaaacaaacaaaaaaaaggctgagatggaggctgggttgtcagtgccacctcggcaagatctcgaccttgaccttgtgccagctcctcttcccctggcgtcactgtgttttggcatctggcggggggacctgcttcatcagctgccctctgcacctgcctgccagcaggggcctggcctccgtgcaccaagcacacctcgccctctggcctcccgccccctctgtggccttctggccgcagccctgcccctgcctgcatggtgtgcctgcctcctgccccttcctgcttgtgtgacacgcctcctcccacccagctcccgtggaagtcgctgaccagcatcattgagtactactacatgtggaagaccaccgacagatacgtgcagcaggtgagcccgcccgccactcagtgcccggggtgtgccgcctccccgtcctgcgccccatcctctcccagcaggtgggcgtgcactgctgcagcaggaggggaaggaagactcctgagtccctggcccggctgtcctctc

SEQ ID NO: 13235 - DNA, 2300 bp, Homo sapien
ctgagatggccgggcatggtggcttatgcctataatcccatttgggaggccgaagtgggtggaccacttgaggtcaggagttcgagaccggcctggccaacatggtgaaaccacgtctgtactaaaaatacaaaaattagccgggtgtgttgagaggtgcctgtagtcccagctactcaggagacagaggcaggagaattgcttgaacccgggaggcagaggttgcagcgagccgagattgtactactgcactccagcctgggtgacagagcgagactccgtctcaaaaacaaacaaaaaaaaggctgagatggaggctgggttgtcagtgccacctcggcaagatctcgaccttgaccttgtgccagctcctcttcccctggcgtcactgtgttttggcatctggcggggggacctgcttcatcagctgccctctgcacctgcctgccagcaggggcctggcctccgtgcaccaagcacacctcgccctctggcctcccgccccctctgtggccttctggccgcagccctgcccctgcctgcatggtgtgcctgcctcctgccccttcctgcttgtgtgacacgcctcctcccacccagctcccgtggaagtcgctgaccagcatcattgagtactactacatgtggaagaccaccgacagatacgtgcagcaggtgagcccgcccgccactcagtgcccggggtgtgccgcctccccgtcctgcgccccatcctctcccagcaggtgggcgtgcactgctgcagcaggaggggaaggaagactcctgagtccctggcccggctgtcctctccgtggtgctctcctctccgtagcctccagcctgtctgcactgcagccccaacctgggcctagcctgctgacctctgaccttctcttttgttttaagaaacgcttgaaagcagctgaagctgagagcaagttaaagcaagtttatattcccaactagtaagtgtgccctcacagccgtcgtcctcgtggccccgggggccagggagggtgggcacagggtgctggggccaggcgggtcccaaggaaactcaagctcagaggctgggaaagttggggcagcccccgggagggcggcccagggctggggggttctggctgcagacgcagtggccatgtctctgtcgtcctggcctcctggtcagtaagggggcattgggattccagcccacaccgccagggttcagtccctgagctgggctccatgctagggggagcacgggggcctggagaacggctcagacctcagcagtggctcccaggaactgaaaggggagaaaggaagatccctgccgaggccgaggggtgcgaggacgtggttctggacaaggggtggtcagccgcggtgcctgctgggcacatgggccctcgaggtttgtgctcctgcaactcctctcgtctctcctttccctctttaagtaacaagccaaatccgaaccaaatcagcgtcaacaacgtcaaggccggtgtggtgaacggcacgggggcgccgggccagagccctggggctggccgggcctgcgagagctgttacagtaagtgccctggatggccgggggcacaccgcacgcccgcctgtgggccgtggtgcctgcgttggccctgagggctccagcatggcccagcctgcaaggggcccactgacgatgggggctgcgtcccaggggtgtggttgggagagcctcggggaacgtgtgggggtgcctggcgggtgggggcggccggcgtgggggtggcggggaatactctgacatcgctggttctgcttaagaatccgtctatttccaactttgttgtccgtagccacacagtcttaccagtggtattcttggggtccccctaacatgcagtgtcgtctctgcgcatcttgttggacatattggaagaaatatggtggcttgaaaatgccaacccggttagatggagagaggccaggaccaaaccgcagtaacatggtaaggggggggacacccgccctgcctgccatgagcctgtcggccacgcgggtcctcggcccccggtcatggcgctgtgttggggcggttgcgcccccttccgcagagtccccacggcctcccagcccggagcagcgggagccccaagtttgccatgaagaccaggcaggctttctatctgcacacgacgaagctgacgcggatcgcccggcgcctgtgccgtgagatcctgcgcccgtggcacgctgcgcggcacccctacctgcccatcaacagcgcggccatcaaggccgagtgtgagtcaccccaacgcccc

SEQ ID NO: 13236 - DNA, 2300 bp, Homo sapien
ttgcaggccgggggacaggtacaggccgggccaccagaaggaggggtccggtggatagcctggctccagaccacccccctggccgtgctacctcagccggccaggaggggtccgcccaggcctcgctcagggagagtagctcctctgtctctccccagagctgtgcctttgctcccccagcccacccaggcgccctgtcatgtggaaatctcagccacggaattaaaatagaaaccacttctgctgtctcccaggagacaaagataagggggcgtcctggcctccgtgggagcctgtgctggggcccagcagtgacaggactaggtgtcagggactcggctgcagtgcacgtcccacccaccctccctgggctgtggcgcccccccacccaaccccagcccccaccagccaactctaatctgcagccagcatccgagtgaccccacagcctgaggacttgcctgtagtgcgtcatcagacggctgggaaatcaggcccctgacctcatgaaggacacagctccctctgaggccttttccaaccctgggggtctggagctcagtgaagaccccagctcccttgtctcccttccccaggcctcgggcttgcctcccagtgctggctgcagggttctggcctcagcagctcttccaccccccagggcctgtccttttctggagtcaacatgtgggctgtgaggtgtcctaggtcctgggctctatcccaagggcagggaggccctgaggagatgtggggccctttcccaccccagacaccctccccggccagacacccaggctgcagtgccctcacagggccaagctctggccaccggtgctgggtggggcctgggctgcttgtgggtctaaacctgggcttagaagtgagtgggtaccggctggggggagcattggccttggtgcccaggccatgaaggggtctcccagctttgctatgtcctcgttaggcccttccctgctgatgagacagcagcctgctttctgcaccagcaaccccacaggggccgcggctccccagggccaggggcatctcagggtggcaaggccatcatgctgtcatgcctggagacctgtcctgccagctccgctccaccctgctagggtcctctgtccaccactcagcccagcctggcttccctgcagtggagctgagtagcaggggcctgctatctgccagtgtcacaggatggcggaagggaccagaccactgcagcccaggggtgtgacccagccccatgcccagccatcagccctgccagctcccttcacacccgccgtgtcctgtgcccccctctccactcgggcccgtcccactgtgtcactgcccctgcctgtgacccaccgcagcctcagaggtggagaccaaggccactgctctgcacccattgatcctgacccctgcctgccaggcccagaatagccccgtcgcattagggagcttctggccgctgcccagggactgcggctggggtgagggcagtgcagcagctggcacactccttgtcccaccccaccctccgtgtgtctccagggcacctggccagtgccgaatgccattcctttgctgccaccctgggaggggcctgcctctacccccatccactcttctggcagggctggggaccttggggcaggtggtctccctccagaagagccctgtgttcagccagccctgtcctccagagcaagccccacaggtagcaagccccacaggtagcaaagtcagggagggtaatggcttagccccaggctcccaagctgggcagaacagggcagggagctggagagggtttggcagtgggcccatgaatccagcctgggcaaggccctgctgtgagggacccctagggacccctgggcctgccagggaggaagggctgcccagaaaaggtactgactgatgcctcctcaccatcttctgccttggctggcacaggtcccaagtgcagagggggagctggtcaggctggtcagtcgggcgggggggcggggggcatgtttctggcctgctgtcaccatggaaatggcagtggctgcagggtgtgtgtgcaagggaggagggtgctgccacagagagcccagccaggaccaccatgaaagccaggagcaccgagggcctctggttggctcacaaacatgcctggtgcaccaggcagagggaacaggtaggtctccgtgtccagcccacagcctccaagacacagggggaagggtgtccagagtcagctgcccccatagggcctgatcactgggcttctgggatctgcctgtctcccaggc

SEQ ID NO: 13237 - DNA, 2300 bp, Homo sapien
gcctcagaggtggagaccaaggccactgctctgcacccattgatcctgacccctgcctgccaggcccagaatagccccgtcgcattagggagcttctggccgctgcccagggactgcggctggggtgagggcagtgcagcagctggcacactccttgtcccaccccaccctccgtgtgtctccagggcacctggccagtgccgaatgccattcctttgctgccaccctgggaggggcctgcctctacccccatccactcttctggcagggctggggaccttggggcaggtggtctccctccagaagagccctgtgttcagccagccctgtcctccagagcaagccccacaggtagcaagccccacaggtagcaaagtcagggagggtaatggcttagccccaggctcccaagctgggcagaacagggcagggagctggagagggtttggcagtgggcccatgaatccagcctgggcaaggccctgctgtgagggacccctagggacccctgggcctgccagggaggaagggctgcccagaaaaggtactgactgatgcctcctcaccatcttctgccttggctggcacaggtcccaagtgcagagggggagctggtcaggctggtcagtcgggcgggggggcggggggcatgtttctggcctgctgtcaccatggaaatggcagtggctgcagggtgtgtgtgcaagggaggagggtgctgccacagagagcccagccaggaccaccatgaaagccaggagcaccgagggcctctggttggctcacaaacatgcctggtgcaccaggcagagggaacaggtaggtctccgtgtccagcccacagcctccaagacacagggggaagggtgtccagagtcagctgcccccatagggcctgatcactgggcttctgggatctgcctgtctcccaggccgacgctcagctggggccagaaggctcagagaagggcccatggggacagagcaccaggaagcccgtgggtgcggaggttccccacctggggccaggctctacggggctctagggcggaggcactgtggtgaggcgtggtcaggcacgccctggttgggaggaggccagagtgggggtgtgggggtgcggtgactggcatgacccctcaatctcccgcctgacccctcgaggtcaggccctgggcccccaggcacgcagctggtcctgggcggtgcgggagaagggactggagtgtcagccccagcccggggcacagagggcacgcccactccttcccctccttcccttcctaactcctcaccgcctccccggccgccccctgggtggaagtgcttggggtggacgccttaagcgcggatccctcggcgctggtgcccgccgccccttccctgcctgggaggcagacgcagacctccccacaccccctaccagcagcttctcgagctgtttctggaggtggcggcgccttccttcctgagccctgccctccacccaaggagccttcagcaccacagacagtgttggggcggggcgcgggcgggggcggagcgggacatggagacccggacagggctgggggccgtgcccgccgggaatctgactccgctcccgcggcgcggctgttgctatggaaaccgagcaacaaagggaagcgggacaggcgccgcgcgcggcggggtgggggtggggttctcccggagcctgcgaccccttcccgcggcggagcgcagcctgggcgcccagggccgggagtgttggacccctaggcccaagtcactagggctccccgagagccgagggccaggctccccgcaccctgcccgccgccccggggacggcccggccaggcggccccgacgtcgccatggaaacagccggggcgcgggcggcgccgcggtcgcccgggcgggcccctgtagacgccacctccggcgcgaggggcccgggggcgccaggcctggcccggctgccccgcacccgccacccccggcaggtgcgccccgcccccgcggcgcccccaggcggcccccagcccgggggacgggttatcgaggccccgccccggccgcggagccaatgggcgcgcggacagccgggcaggcggggctgggcgcgggcggcggcggcccggaggagaacgggcggagggcgcgggccgaccgggcgcaccgaccatggcctccaaatgccccaagtgcgacaagaccgtgtacttcggtgagtgcgtgcccgctcccggcccgctcggtgcatcccgccgcccttcgcggccagtcccgcgccgcagagccgcggcgtaactcgg

SEQ ID NO: 13238 - DNA, 2300 bp, Homo sapien
ggcgtggtcaggcacgccctggttgggaggaggccagagtgggggtgtgggggtgcggtgactggcatgacccctcaatctcccgcctgacccctcgaggtcaggccctgggcccccaggcacgcagctggtcctgggcggtgcgggagaagggactggagtgtcagccccagcccggggcacagagggcacgcccactccttcccctccttcccttcctaactcctcaccgcctccccggccgccccctgggtggaagtgcttggggtggacgccttaagcgcggatccctcggcgctggtgcccgccgccccttccctgcctgggaggcagacgcagacctccccacaccccctaccagcagcttctcgagctgtttctggaggtggcggcgccttccttcctgagccctgccctccacccaaggagccttcagcaccacagacagtgttggggcggggcgcgggcgggggcggagcgggacatggagacccggacagggctgggggccgtgcccgccgggaatctgactccgctcccgcggcgcggctgttgctatggaaaccgagcaacaaagggaagcgggacaggcgccgcgcgcggcggggtgggggtggggttctcccggagcctgcgaccccttcccgcggcggagcgcagcctgggcgcccagggccgggagtgttggacccctaggcccaagtcactagggctccccgagagccgagggccaggctccccgcaccctgcccgccgccccggggacggcccggccaggcggccccgacgtcgccatggaaacagccggggcgcgggcggcgccgcggtcgcccgggcgggcccctgtagacgccacctccggcgcgaggggcccgggggcgccaggcctggcccggctgccccgcacccgccacccccggcaggtgcgccccgcccccgcggcgcccccaggcggcccccagcccgggggacgggttatcgaggccccgccccggccgcggagccaatgggcgcgcggacagccgggcaggcggggctgggcgcgggcggcggcggcccggaggagaacgggcggagggcgcgggccgaccgggcgcaccgaccatggcctccaaatgccccaagtgcgacaagaccgtgtacttcggtgagtgcgtgcccgctcccggcccgctcggtgcatcccgccgcccttcgcggccagtcccgcgccgcagagccgcggcgtaactcggggtgcgcccggccccggccccggaccgaggatgcgcgtcccggaggctggctggccgcgctgcccaagcggctaaagccaaagggtggggctgcgcgaaagcgggggcggtcacgcccgaaccccgaagcggcttgtgggggcggggcagggaccacccgggcggggcttgtggtgccccgggatgaggccagtgtttgggggagcgctcggggatccgcggacgcatcccggttcctcggacggcgccgggcggggcggggcagggcgtggctgtacgccccgggtgcgtcccgcgcgctcccgtgggcctgggccctttctcctggaccccctacacccgcttcccccgggaacaagtggccgggaacagtgacccccagctcccactccgggctccgctgagctgggctgggccaggtttggactctgtcgggattcagtccaagcgggggcgaccttggcctctgcctcctgcttgtcccgacgcattcccttggcgccagttcccccaggagtttcacacgggggtagggtgggggcgggtgtgacacgcgagttcccgcgaacgtgagagggaccttgtgctcaagcagcccaggtgtccaggatccctgcctcctcaaggtcagaacagccctggacaggatgcaggtggtggcgggaagagggatgtctcgcaaggcggccctcggtctagcccctccggcaggcgcgctccccccgtctgggcttactcactctctgggcctgggtgcgcccttcctacccccttcctcctggctgattcgctgcccagctttctccagggtggtaaggtccctgcccacctacccaccagctgctgcacgaaggggggcagacttagtgaagcagagaggagggccgggaccaacagggcgcctgccctggtcgccccatacccagaatgcggccaggctgcagggaaggccgccactgggcttccccggctcacaggctggagggggttgaggggaggttgtattttgcccgtcccagaggggagggaccggatttggcctggagtgcttctggcgtggctggg

SEQ ID NO: 13239 - DNA, 2300 bp, Homo sapien
acccgggcggggcttgtggtgccccgggatgaggccagtgtttgggggagcgctcggggatccgcggacgcatcccggttcctcggacggcgccgggcggggcggggcagggcgtggctgtacgccccgggtgcgtcccgcgcgctcccgtgggcctgggccctttctcctggaccccctacacccgcttcccccgggaacaagtggccgggaacagtgacccccagctcccactccgggctccgctgagctgggctgggccaggtttggactctgtcgggattcagtccaagcgggggcgaccttggcctctgcctcctgcttgtcccgacgcattcccttggcgccagttcccccaggagtttcacacgggggtagggtgggggcgggtgtgacacgcgagttcccgcgaacgtgagagggaccttgtgctcaagcagcccaggtgtccaggatccctgcctcctcaaggtcagaacagccctggacaggatgcaggtggtggcgggaagagggatgtctcgcaaggcggccctcggtctagcccctccggcaggcgcgctccccccgtctgggcttactcactctctgggcctgggtgcgcccttcctacccccttcctcctggctgattcgctgcccagctttctccagggtggtaaggtccctgcccacctacccaccagctgctgcacgaaggggggcagacttagtgaagcagagaggagggccgggaccaacagggcgcctgccctggtcgccccatacccagaatgcggccaggctgcagggaaggccgccactgggcttccccggctcacaggctggagggggttgaggggaggttgtattttgcccgtcccagaggggagggaccggatttggcctggagtgcttctggcgtggctgggagccgaggggcttccggctgcctctcctggagcccgctcagccctcagtctctgtcccagcgagggctgtctctgtaaggcttagggtgggagacggtccccagggcccttctgcagtccaactgcccatgactttaccccaggccgggccaggccagcctggggctctccagggtctcggccaacagtcctgtggacagcccggaaaggcctgcctgcctggcccgcccagcctctcagcggaaaacaaaggcgcttcagacccggctggcttctgtcctgcctgggaggcactgtgagggcgagggtccagaatcctgcccaccctcacaccaggctgcccccgcagctcatacctgagtagaacccaggctgggatgtcggagcacattgaggaggccaccccagagcccatgcagccagggtgggcagctggttttcttctgagccattagacccaatcgattctgtgttcccaactcggacccgtaatgtgtggccattgacccacccagtgggtctgagggccagttccctgcccccacttggcccacgtcccagagctggccagagcacagtgctggcagccctgggctgcagctgccacggccgatagccaccgagacttccttgctgctgctgggacacgcctgcccaccgtgcagccagcccctgcctgccctggtgtgtcccagcttccttgagtggagtggttctggtcagagggctctaagctggtgcagccttgtggttgggctggtgtcctggaggctggccctggccatgcccagagggttgtaccagggccacggagagccagtattcacagccctctacctagtaggccacctgggggatcccatctcactgccaggagcagcacccttgggcctctcagagtgggcttcgccctagccagatgcccctccccgatatctgccagacaaagggggctgggccacttgctgagaaagggagctgggagagccactggtcctcggccacctgaggggcttggccagattctgccgggcagggtgggcccagcctgcatgctccctccccccagggcctgcagcttgtccccttcccttcagaattccggctctgctgggcccttcctgcccctccccacctcttcctgcctggctccctagggaggcccctgcttccatccactgggaagcagtccagtagccccagtgtgggggtgggaggcagtggcagagggtcccggaccctcagcagctgccctcagatcttccatgccagtggcagccaggggcattacggcggggggagagctcagggtttaggacgaggaatccacagacagatgagggtcccgcctggaggacccacggggacggggcctggccttcccatgagg

SEQ ID NO: 13240 - DNA, 2300 bp, Homo sapien
tgcagagtgggctgagaggtacaggggctggggtttccagccagcccagtgggcctgagtcaggctggccccatggacgaggtcagtgccctgtcctaggtgcatccccggccaggtgagagctgacaaagcctgaggcctagtgactgggctggggctggtcgggggcagtgtgtcccggaagccggcaggaccctgacctgctcagatggaggtgggcgttgggggtgggatggcctgaacacggagtgtgggtggagaaaggagctggaagctggggtcctgcagctgatgaggggtccccacccccagagcacagggtagatggggagcacaggagaaagggggtctgaggggcatgtcagtctgtggctgaagtttaggaagggttccagggatcgtgtgtatgtgactgtgtgtgtgtctctgtgttatgtctgtgtcagtgagggtgtgcgtgtgtatctgtgcatgtgtctgtgtgtatctgtgagtgtgggtgtctgagttgagtggaaaaactgctgtgagccaacacagaaggcgtggccccacggcgagggcatcctgccccccaccccacccgtgaccatggtgacaggaagcaacagcagggaaggccaggaatggactcatcaccctggttttcaaggaggggctcctccatgggcagggtgggttggagtccagagtgtgggggaagggaccatccctgggggcgggtagaggggaggacaaggactgggtcattgtccctatctgccctggctaatgtccgtacatgagctgcaaggtaccgggccaggagctgggatgggctggggaggaggcttgacagaaatatgggcggacaactgcgagagggaccacacacatgctcgcggggaccccagagacccctgatggacacacccatacgggtatgtccacgggcaccaggcacacacgtgtgcatcaggcacttgccctgcacctctgcacccggagcacgtcatcctggtgggggtgtggacagcggtgctgggcaccctggggcttgggggcagcgcacgccccagggaaagtgcagtgacagagcccccggcctccccaatactgtccgggctcccctggcctctcccccttcttggtgcctctgcctctccctctgcttgtctgcaggtttgtcccacgatgccccacactcagtggagatggcaggtgggcccagacctcagagtgggtttcaaggctcatgggctggagagtgggggttccaagtttgcaggacaggagcgcacccctactctggaaaccttatctctgaggtctcagaatgggggatgaggagggctccaatgggcccctgtggaatgtcctatcagaccccaggacttagccccagtcgggggacagaactgtggccttagaggggcgccaggaggagggcaagcaggatgtggccttgggctgggtgtgctggtgtggggctctctggagtgtggcctctgtgccagacgcctgtgccttggccgtcctacagccctgctgcccctgccctctccccaagctggggactggtggcagacagggcagggcaggcggcttctcttcctctaagtgcaggcctcgaggtgccgacaggggtgcggtaggattcagggaaagtgaggttgggatcacaggtgcagttagggctcagggcccgacagcggtaggccagcggctcctggggcccaggaggatggtctccagcgcccccagcggggacagggccagcacaggcccagtggagatcgaggggagataaggacgctggttaacatggctgacaggagggatggtgggtggggaggaagggcagcaccgcccttgtgctgtgggagctcccagggagctccatgcagcatggaggtgaagggcctgcagagagagggctcccctgctcagtgacaggagagggggctgacagtgacctgggctcccttcctgaggctggccagtcagctagagggctgaccccaaagcccgaggccagcgcagcccccttggccctcctgaatctggggggcgggtgaggcgggacagactccgcctggcaccgggaccatcctccgcctcaactttgcagcgtacttggaccgctctggccgccctgggcgctacccgcagagataagggcccctccctgcgcccggtccgggcatctccgagccggcctgggggtggctgaactctcttttgccggccgaaaccccagcccccgcagcccccgcagccgatcggtcctcaagctacagctcccctctctgggagtcccc

SEQ ID NO: 13241 - DNA, 2300 bp, Homo sapien
gcggggaccccagagacccctgatggacacacccatacgggtatgtccacgggcaccaggcacacacgtgtgcatcaggcacttgccctgcacctctgcacccggagcacgtcatcctggtgggggtgtggacagcggtgctgggcaccctggggcttgggggcagcgcacgccccagggaaagtgcagtgacagagcccccggcctccccaatactgtccgggctcccctggcctctcccccttcttggtgcctctgcctctccctctgcttgtctgcaggtttgtcccacgatgccccacactcagtggagatggcaggtgggcccagacctcagagtgggtttcaaggctcatgggctggagagtgggggttccaagtttgcaggacaggagcgcacccctactctggaaaccttatctctgaggtctcagaatgggggatgaggagggctccaatgggcccctgtggaatgtcctatcagaccccaggacttagccccagtcgggggacagaactgtggccttagaggggcgccaggaggagggcaagcaggatgtggccttgggctgggtgtgctggtgtggggctctctggagtgtggcctctgtgccagacgcctgtgccttggccgtcctacagccctgctgcccctgccctctccccaagctggggactggtggcagacagggcagggcaggcggcttctcttcctctaagtgcaggcctcgaggtgccgacaggggtgcggtaggattcagggaaagtgaggttgggatcacaggtgcagttagggctcagggcccgacagcggtaggccagcggctcctggggcccaggaggatggtctccagcgcccccagcggggacagggccagcacaggcccagtggagatcgaggggagataaggacgctggttaacatggctgacaggagggatggtgggtggggaggaagggcagcaccgcccttgtgctgtgggagctcccagggagctccatgcagcatggaggtgaagggcctgcagagagagggctcccctgctcagtgacaggagagggggctgacagtgacctgggctcccttcctgaggctggccagtcagctagagggctgaccccaaagcccgaggccagcgcagcccccttggccctcctgaatctggggggcgggtgaggcgggacagactccgcctggcaccgggaccatcctccgcctcaactttgcagcgtacttggaccgctctggccgccctgggcgctacccgcagagataagggcccctccctgcgcccggtccgggcatctccgagccggcctgggggtggctgaactctcttttgccggccgaaaccccagcccccgcagcccccgcagccgatcggtcctcaagctacagctcccctctctgggagtccccgcttttgaattccccggggatgttcccgctgcggtccgatggacctcccagagcagcggaggtcaggggagctagcagaggcggggacgtcccttgggagtgaggggactgacaggggcggcctcgtaaccctgcgtgggatggaaggtcagagtgggttcctcggtggggggcaacagcgggggctctccggcaattgtccccgaccctccgtcctggggagggcaggatcagcgcgcgggctgctttgcatctctttgcattttagtgatgtttggtccagtcctggcccgggcagatctggggttcgggcgggtgccggtggggtagggctgggggtgggagcggcgtttcctgctgcgggtgagccttttgcctcggaactggacccgggagacatcacagcgctgggctaggggcgcggcttgaactcgcctaaagagctgcgccctctcagtaagtccccatggccccctgcccccccgcgctccgtcctcagtcaggcccgggtcctgcctgaaggcgggggtggaccagatgatctttcttgggccctgggcctagattcgaggtccccagggtccaagtcctgggttcagagggcggggcgcgaggggcggggtctccaaggggcggggtcccggggtccctgaaaggcgcggaccaggccggatccacccagtctcgcgcctgcagcccgtgccgccccagccgctgccgcctgcaccggacccggagccgtcatgcccaagtgtcccaagtgcaacaaggaggtgtacttcggtgagcgcgcccacaccggccccgcgaggaggcgccgccgacggggcgacgaggctggggaccgctcaggaggaccgggggcgctgggtccctgggg

SEQ ID NO: 13242 - DNA, 2300 bp, Homo sapien
cccctgtccccgccgagaagggctgtcgcaggctccacccttgccaccgcagaggcccggggctgaaagcaggcagccaggcccaggccctgctgacctaagccgcgacccctgaccctcggcctcgccctctagccccacccagccttcaggagcaagattcccggccgcacccgaaagtgccccggggaccagcgaccccgcgctttgtttagttgtattggctctggggattggagatgttcccctcatggagggtgctgagaccttagggtgggctgccaggctgggcggatgcgggctaagtgcacagggccttgggcagagctggctgcaagaggcgggtacgccagtggtgggtaggcgccgcgtcctgcagcgtctcaccggggcctgtctgtgcctctgcagccgagagggtgacctctctgggcaaggactggcatcggccctgcctgaagtgcgagaaatgtgggaagacgctgacctctgggggccacgctgaggtaggtgggacccaccctggtggcaggggccaggggtgatggcaccccctcacggcccttctctttgcagcacgaaggcaaaccctactgcaaccacccctgctacgcagccatgtttgggcctaaaggtatgctcccgtcatccccaccccaccccaccccacagcctcctccaccccagcctgttgactttttccaccttctctgcaggctttgggcggggcggagccgagagccacactttcaagtaaaccaggtaggtaggaccccaccccctatcctgcctcctggttccaccctcgggatggggatgccccctcccagggaggcctgaccactcgtgggccccaaaggaggccgtggacgctgcactcacgtctgtgcctgtctctctctgcacaggtggtggagaccccatccttggctgcttgcagggccactgtccaggcaaatgccaggccttgtccccagatgcccagggctcccttgttgcccctaatgctctcagtaaacctgaacacttggaaaacctgtgtgtgtacatgcgcgtgtgtgctggggagtgccaagggagctgcagtggggtcctggcagcaggctctgccaccggcgcctgctcttctgctgcccattgccctccccagggggccgttccagggtctcataggcgagggctccctgtgcagggtgagtccaggccaccctagacagcccgcacccagccctggcactctgagtccgcctcgacaactcccagatcctcagaagtgcctctgagccctcctggccttctgggagtggggaaggggggctttgcaggccaccagccaaaggctcagcaggccgagaggcctgggggcgggcgaggctggcctcgggtcagagggtgaatcagctcatgctggctccctttctgagaggctctgggggagttatgggaactcctggccttcctcctttccaccccccaaccctgtcctcattccccacccctccaggccaggcccagcttctgcaagggcctgatgaggctgctctgcccctgacccaggcaccactgccccatgtgcgtcctcatctgccatctaccctgtgcccagggacttacccagtggcccggcgtccagtggggaacttgagtaccggccgtgcacaggggctggggggccttctggaaactcccttgtcaactcagccagccgctgctgactggccaccttcagagaccctcttccccacactggctacttagataccggccttggcagaaggccacccctccggacacccactggtttaaaagagcccaggggtctggccctgccttagggctgtggtgggtgtgctgcaggctcagctcgacaggtgctgtgggggcagtctagggtggcccgcagggtggggtgtgtgggggtgattgggggattcctggaattccaagagctgggagccacagcacttttgatgggatgggggcagggggtgctgaggtgaggctggtttctggctggacggtggtgggtggagctgagggaactgagatctttgagacagcgacacctggtgcagagaaaaatccgcaagctcgggggttgggagagcgctgaacaaggccgcagagctgctccgccatctcccccacgcctcctgccaagttctgtggcgccgcggttccccacctcctgctcccatccccctggctcccgccgccctgtagctcggcaggtgcagtaggcgctccgaggaggaggccccttagcttcaagaaacccgcgtgggcggggtgaggagcgc

SEQ ID NO: 13243 - DNA, 2300 bp, Homo sapien
tggctgcaagaggcgggtacgccagtggtgggtaggcgccgcgtcctgcagcgtctcaccggggcctgtctgtgcctctgcagccgagagggtgacctctctgggcaaggactggcatcggccctgcctgaagtgcgagaaatgtgggaagacgctgacctctgggggccacgctgaggtaggtgggacccaccctggtggcaggggccaggggtgatggcaccccctcacggcccttctctttgcagcacgaaggcaaaccctactgcaaccacccctgctacgcagccatgtttgggcctaaaggtatgctcccgtcatccccaccccaccccaccccacagcctcctccaccccagcctgttgactttttccaccttctctgcaggctttgggcggggcggagccgagagccacactttcaagtaaaccaggtaggtaggaccccaccccctatcctgcctcctggttccaccctcgggatggggatgccccctcccagggaggcctgaccactcgtgggccccaaaggaggccgtggacgctgcactcacgtctgtgcctgtctctctctgcacaggtggtggagaccccatccttggctgcttgcagggccactgtccaggcaaatgccaggccttgtccccagatgcccagggctcccttgttgcccctaatgctctcagtaaacctgaacacttggaaaacctgtgtgtgtacatgcgcgtgtgtgctggggagtgccaagggagctgcagtggggtcctggcagcaggctctgccaccggcgcctgctcttctgctgcccattgccctccccagggggccgttccagggtctcataggcgagggctccctgtgcagggtgagtccaggccaccctagacagcccgcacccagccctggcactctgagtccgcctcgacaactcccagatcctcagaagtgcctctgagccctcctggccttctgggagtggggaaggggggctttgcaggccaccagccaaaggctcagcaggccgagaggcctgggggcgggcgaggctggcctcgggtcagagggtgaatcagctcatgctggctccctttctgagaggctctgggggagttatgggaactcctggccttcctcctttccaccccccaaccctgtcctcattccccacccctccaggccaggcccagcttctgcaagggcctgatgaggctgctctgcccctgacccaggcaccactgccccatgtgcgtcctcatctgccatctaccctgtgcccagggacttacccagtggcccggcgtccagtggggaacttgagtaccggccgtgcacaggggctggggggccttctggaaactcccttgtcaactcagccagccgctgctgactggccaccttcagagaccctcttccccacactggctacttagataccggccttggcagaaggccacccctccggacacccactggtttaaaagagcccaggggtctggccctgccttagggctgtggtgggtgtgctgcaggctcagctcgacaggtgctgtgggggcagtctagggtggcccgcagggtggggtgtgtgggggtgattgggggattcctggaattccaagagctgggagccacagcacttttgatgggatgggggcagggggtgctgaggtgaggctggtttctggctggacggtggtgggtggagctgagggaactgagatctttgagacagcgacacctggtgcagagaaaaatccgcaagctcgggggttgggagagcgctgaacaaggccgcagagctgctccgccatctcccccacgcctcctgccaagttctgtggcgccgcggttccccacctcctgctcccatccccctggctcccgccgccctgtagctcggcaggtgcagtaggcgctccgaggaggaggccccttagcttcaagaaacccgcgtgggcggggtgaggagcgcagtcctcctactggcgccgtgaaggagatcgcgatgcgccggagggaaggaggctgcgggcggggaaggacggagggcgtgcggggagggagaggaggggcttgctggggggggggccccgaggcggggccgggagggccgcctggaagaggaggtcgggggcgaaggaggccgagaagaaaggtggggccgggacccctcgggctgcgcctctcgtgggcgtgtccagccagggctgggggtccagggaggactgagtttccctctcccgccgtcctcgcagccccgggaggtgcaggggcatcgcgggaacagccccggtgacacg

SEQ ID NO: 13244 - DNA, 2300 bp, Homo sapien
gaatcagctcatgctggctccctttctgagaggctctgggggagttatgggaactcctggccttcctcctttccaccccccaaccctgtcctcattccccacccctccaggccaggcccagcttctgcaagggcctgatgaggctgctctgcccctgacccaggcaccactgccccatgtgcgtcctcatctgccatctaccctgtgcccagggacttacccagtggcccggcgtccagtggggaacttgagtaccggccgtgcacaggggctggggggccttctggaaactcccttgtcaactcagccagccgctgctgactggccaccttcagagaccctcttccccacactggctacttagataccggccttggcagaaggccacccctccggacacccactggtttaaaagagcccaggggtctggccctgccttagggctgtggtgggtgtgctgcaggctcagctcgacaggtgctgtgggggcagtctagggtggcccgcagggtggggtgtgtgggggtgattgggggattcctggaattccaagagctgggagccacagcacttttgatgggatgggggcagggggtgctgaggtgaggctggtttctggctggacggtggtgggtggagctgagggaactgagatctttgagacagcgacacctggtgcagagaaaaatccgcaagctcgggggttgggagagcgctgaacaaggccgcagagctgctccgccatctcccccacgcctcctgccaagttctgtggcgccgcggttccccacctcctgctcccatccccctggctcccgccgccctgtagctcggcaggtgcagtaggcgctccgaggaggaggccccttagcttcaagaaacccgcgtgggcggggtgaggagcgcagtcctcctactggcgccgtgaaggagatcgcgatgcgccggagggaaggaggctgcgggcggggaaggacggagggcgtgcggggagggagaggaggggcttgctggggggggggccccgaggcggggccgggagggccgcctggaagaggaggtcgggggcgaaggaggccgagaagaaaggtggggccgggacccctcgggctgcgcctctcgtgggcgtgtccagccagggctgggggtccagggaggactgagtttccctctcccgccgtcctcgcagccccgggaggtgcaggggcatcgcgggaacagccccggtgacacgctgcccggggtcttcacgaatgcccggaggcgccgctggccagaagccagcccgaccttccatccccgcagacagccccacgttcctcccggcccgcgtctttcggggccgcccgtgcaggcgggcccggctcagcggcgcccgggcagcagctgcttccatgcgccggcttcctccggggctgctccgtggcggcggcagagggaagcgctgccgcgggcgggcgaggatcgggagcgcctgaggaggctgccgcgggctccggctgcgcgttcggggcgggggagctgcccgggacttcgcgccaggggccaggggccggccgcgctggggtctgcgctgtgcggcgcggcgggctctgggcgcctcctggcggcccagcctggaaggcggcgcgatggggcgaggctcgtccgctccgactgcgtaagcggccccacagggcgccttccggagtctgcgcgctcccgcccggcggttgctaggttgccaaggggcgtgaggcgctgatgggtggggtctgagcgaggcggggtgtcgggtgtcgtgacgattgagcctgcaagggcggactctgcggtgttctccatatcaacagccctgccaggagcccggaagtgggtccgcacgagacagaatagactacactcaaactccaggggaaccgttcattgggcttggacacgaaggcgggaccctgccgacgcagtgattggatgcatgtccggccagcgcggtgattgggtacaggtctcgggagcgcggtgattgggtacaggtctcggccagcgcggtgattgggcgcaggtcccagccggcgcggtgattgggcgctggacccggcccgtgccatgattgggctcaggttccagccggagcggtaactgggcgcaggtcccagccgccgcactaaacccggcccgtgcggtgattggacgcaggccccgggccgcggcggaggcgggcgatccgaaagaggctggtgctggctgcatggggaggcggcggcagcgggtggaccccgcggctggggcccgggccggggccctgcctgaggccatcgccg

SEQ ID NO: 13245 - DNA, 2300 bp, Homo sapien
tggtgtcacctccaggtgggtggtccccctaaggtggtggtcttctgtcctagaggtccaagcccgcttggtgaagtcagcactatgctcccagggctacccgaggctggcactggcacaactacctgaggatggctcgcagggcagtcgggagctgctgctggctctgtcctggctcttggcccgaggacctgtgcccgagcagatgctggcccaggcccgagtgcctctgggtgacgagatgactgtgtgccaggtgcgtgtgggtgagggtgagctgagccagccctggtctcaactcctggggccagagcaagggcaggcctgggtcagccccctctgtctgctttgctcctcagggcagtcccatgaagggttacccagctgcccagctgaaagcacggaggctccctgtgcagggagcacccgttgtttttggctgtgcctccactaccgtctccatcctggccttttctggggggcagggtggggtgggagcagggcctgacccttgcccctctccagtgtgaggccctggccagccctggcccacctgcaccccacatggaagcagagggtcctgtggatgtccgccatgtgcagtggctgatgggaaagctgcggttccggtggcgccagctggtgtccagtcagcaggagcagtgcgccctcctgagcaaggtagagctggcacagggcttccactcaggggctgtgtcccgtgctgcaggccgccagctgccagtccctgcagcccgtcccgtgaggcctggcacaggcttttggctggatgtgggccttcctgccctggcttacccaaagcctgagcccgtggttcccggtggtccttgtagggggcagggctgggcagggagcccagtggggtgggcaatggtgggcagaaacgggtgtcagagagctcacagaatttgcctttctgttcccaaaagttaccagtggacttccagctctgtgaacagtgggatggggtctgtgccatgaaagccactccctcctgggcactggagggggaggaagacagctcctgttgccaccacatcctggtgggggctgacttgcggggtggacagctcctgtggggtcctgaaggtggcaggggctggctcaggggcacaggtacccagtggtgtgtccactgtgaggccagcgctgacaggtgggtctgtggcagcggcgggctcccaccagcgcgggactccttggagacccccccatcccacccttgcagagggtctgttgctcagctggcctttccagggacctctcaccccgtcgggcctggccttggcaccagctgctccgcttacttatgtgcctacctgtgaccctctgtgccaccttccagcctcccttttttggggagccttccccatttccctagatccaagcagtcgttcatgtccccactgtgagcctggctgaactgctgtgcctgtccagaggctgttcctcccccgatgctgctggggaagccagggcaccccactccaatcttgctgctgcttggaagctgggcggggtggggaggccatcagtgaaattgcctggcgcccccttgcaggagaccccagcggtgctgatggttgttctgcacccagcccagccccgccaacctcaggcaaggagtggctttctctgagccctctttcctcatctgggaggtgggctctgatggccgacctccctggactcatggagactcagcgttgggggaggtgcttgactgccactcagcctggggtctgcactacctgttttagatccacctgtacacacgcggctgccacagcgaccagagccttagccatctgtctgtcactgaagcagagatgctcagggacccagagggaggccagcaggtgagggcgggcaagctgctgcgggggggtgggggtgggctggggggcacagcagggggactgcccagggtgggaggggcctgggggcggggcagctcttgggcctccagcggtgggtgtctctgcatgtctgccactgatcattgccagcctgggtgacagacagcttctctgggcctctcctagcctcatgggccactcacccttcccttccacaaatcaagacgtggcacgggtgggggcccaggacgcaggagcctgggctgggcaggcagctggctaagggcaggctgttggaataaaggaacacagatctcaggtgtgagctggtggtgttggcatctcaagcaggtctcacttggtgtgtcagggggcacctaggggtgtggggggccagcccacactgggtgaagggttggg

SEQ ID NO: 13246 - DNA, 2300 bp, Homo sapien
ttgattgagatgatcacatggttttcttcttgagactaatatggtggatcacatcgatttattttcacatgttgaaccagccttgcctttctgggatagcctccatttggttggggtatttgtgtgtgtgtgtttttaatgctgcttgattctatttgctgataattagttgagggtttttgtgtcatgttggcattggcggctgttgattgtcttttctcttgcaggttggatttcctgattcttcacatgcagagtaattttagattgtctcctgcacatttagacattatgttatgagactggtcttatttaaatcccattgagaatgttggcattttgttttatcatgcaatcaacctagttggtttcaggccacaagttcaaataggctcctgtgggtcctgccttccatgtcggttttgttttcaaagcctttgcagtgggactcagatctgtccttcgtatgcactgcccagtggccagtgtgggacgtgggcagtgggctgtccttttgttcagttctcagcctttgggatgtgaatgagggtttagacttgtacatcatgtatggcttgcacaacttcctggggttgctttttttttttttttttttttgagacagagtctcactctgttgcccaggctggagtgcagtggcaagatctcggctcactgcaacctccatctcccggactcaagcaattctcctgcttcagcctcccgagtagctgggattacaggtgtgtgccaccacgcccggctaatttttatatttttagtagagatgggggtttcaccatgttggccaggctggtctcgaactcccgacctcaggtaatccgcccacatcggcctcccaaagtgctggaattacaggtgtgagccaccacgcccagcccatggattgctttctactgcttctccctgcccaccatctctccagcgacaggggaccacatctcctggggctggaaaggaaggctcttctgcctcagcgttttaggtgcttgtaaaccctatgccttggtcatggctttggtgggatacctaggggctggggcatcagagaatggagaagagtaaaaaaacaaccactaccaaaaaaccccatcctcccaaaccctaacatccccccgggcattctcctgcaccctgggagcattaggcgacctttttctttcctccccttgtgccaggactagagaacttctggagctctctgtcctcttctggctttcaggccgtgttgagtccaggcccggggatacgggaagagaatctggaagttcactaccagttgggtggtgcctcaaattctggtctttccaccaaatctggtgtccctttacctctctgaccctcagtctcctcctatgtcagagggaagtcacagcagttctgggaaggagggcaggcaggcagaaggtgccctcgggttcttctctggctcacacgggatggacaggatgtggggggaggggcttagtgccacctcagtgacaaaatgaagcccaagtccccaaaccctagcttgcctcctggacgggctggagaagaaggtgggggccgctcatcattcctttcctctgccctgagaagaaacctgggaaggctgggtttctccccaaagaggacagagggtggcgcggagggccccggcggccaggccagccccgcgcctacatccctgtcagctcctgggccggtgggcgcctgtccggctgagtggggtcgctctagggggcggcagcggagtttcagggcgcggggggcactgggcgggaccctgggattctgggcggtgggtgaggagggtggagacgggactccgcgcctgggggtgcgcgagggcgccccgctccccagagccaccagtcctgcgcgccgccgcgcggtgctgtcgccgtggcaaccggcgctgcggagggggcggggcaccggcacccccgcgctcccaggtccccaggtccggcggggctcgcgggccgaggggcgcggggcggggcctctgggtcgggggcggtgccgcgcgggcgggggaggggcgcggcgggaggagccggcgcggccccggcagtggcggcagaggctgggcgggcgggcccgggagcggcgcagcatctgcgggcggcggggtaggcgcgggcgcgggcgggactggctgggtgcgcggctgcgtccgcggagggggcggcgggcctgggcgaccctgcacctctgggccgtggggactgtggggtggggcgggggccgatgcggcaggggtgaggcctggggccggcggggtgacggggacc

SEQ ID NO: 13247 - DNA, 2300 bp, Homo sapien
ccacatgtcctcgcccacgcgtgaccccctggacacgtgacagggcccgcgcggcccccgacacgcccctggggcgcagagacaccgggttggcttggggcgcgcggtttgcatgggatggggtgggggcgggctcccctagggacaggtgcctcgagtgcccgtgcctggggtcccgcggccgcttcttcatctcaggaatctctcggaccgcggatcctcagcccccgctccaccagcccgccccagcgcgtgggtctgtttgggaggcctgggccggagcagagcagaggtgatccggcccctgcctgctgggccgcccgggttggaagggagggcagtgtgggcggagatctgctccttcggtgggggcctctggctcagatttggggccaaggaggcctctgtcattttaaagactcgtgtttacagttttgtatccaaggccgcactgctttgcctgttcctgtgtccctgtgtttaccagccaggctgggaggcggggagccaggaggggtgtgtggagggcgggggagatggtggcgtccaagtgccggatgctggtgaggctgggccgctccacttcctccggggctctcaggagctcctgggggccactgccgctctgtcccagggacagctcctccactccagcttcggtgttcccaattatcttcctgggataccttgacccccatcttcccccagcaccgtaggtgtcctggcccctgctcccctcaacctcaggcatgacagtgtctcccacatccctggtttccttctcccccaccgtggaacctaccttccctgtgggctcctccagcccaggacagccacagccagatggaatcagggtgttcccaagttgatgtggcagccccaggtcgcagccccaggagcagcacggagcctggccccaccttaccatcctggccttgccccagcacgggagctggcagcccctggcacaggcagcacccgccctgaagcccatctgcaaggggtctctcacctgccttccacctgggaccctgtacctgtgatgtggccctgggtatccacctggcctgggaaggtccgtagcatctggggaggggccctttatgaggctgctaaaagaattgtttgaggatgcccgctccatgagcgggtgatggtcacacacatctcatgtggcacagttcactgcctgggccttcgcttcccgcatttccacggcccaaaggtggcaaggtttagccagccagggctaaaaccatcgaggggagtggagctggctgctcaagtggggtcctccccaagtgcatttcccaacaactgcagcagttaagggcgtggctggtggcagccccagccgcaccccgaccccacacagtcctcataccccagctccaggccacctggggtctggcctttgaaagtcgcctgccttccaggcagctggcctcgggaccactgtcctcagggtcccgggcagggggactacctcgctgtccaggtcagacgtggccggcgctctgcccacctctaaaaccgtgccttggccccggcctccgatcatatccccagcagcccctccaagcgccgagcgccgtgggtgggcacggggcgctggcctgggtaggaggtcagaggcgccctgctctgggctgtgcccaggccactaatgatcgtgttgggaagtggaaggtctgcaggatcaagggggctggggggccggggaggggcggtgatgagcagccgtggaaaggccccaggcctggcatggagagagaagaggggctgtgggagttgcgtgggccagtgggaggacctgggccttcttgggagggagtggtctggagtggggggtagtgggtgaggggcgagcttcattctgcctgtctgggctggagcctgtttcctcccctggctgaagccagtgccggccccatcctgccttaagggtctcctgggtgaagacgagcccacaatcatcttggctctggcacctgcagcaaatcccatgggaacagacaggcagcgtggccatgggtgaatggagctgaggggctctgggctcctgacatcctgctctgacccttcctgaaagcccatggtctcttccatgctggctgcagtctgggaggcgttgggcccagcttggcctgtgaaagctgaaagcccacaccccctagtcagaggctggtttagctactcccctagtttagctactcttggggcagtgaaggccctggggctcgaagacctccccaggcaaccttaccctgcacacaccccactcctcctggcctgttcag

SEQ ID NO: 13248 - DNA, 2300 bp, Homo sapien
gccccactgggaggacaagctccaggagggccccaccaccctagtgggtgggcctcaggacgtcccactgacgcatgcaggaaggggcacctccccttaaccacactgctctgtacggggcacgtgggcacacatgcacactcacactcacatatacgcctgagccctgcaggagtggaacgttcacagcccagacccagttccagaaaagccaggggagtcccctcccaagcccccaagctcagcctgctcccccaggcccctctggcttccctgtgtttccactgtgcacagctcagggaccaactccacagacccctcccaggcagcccctgctccctgcctggccaagtctcccatcccttcctaagcccaactaggacccaaagcatagacagggaggggccgcgtggggtggcatcagaagcaggccagtgagacagggcctgcccagggccctctgcatgcctctggcttctgcctggggctcccaggagtgaaagaacagtcccacaaccactgtggggacacctggcacccagactcccacaagggggcagtgaggcccctgctcgtgccttagacatcttccgggcctccccaggggcccccgccttctggctgcctccctctgctctcagggccaaggtgaggtggaggccactgtcacccctgagggtccagtcaccagagggtaattgagagcaacaggtcacttggggaagccctgccacagagaagccctccagcccatgggacccaggacctggcctggggaggggcttttaaagagagggggaaagagagagaatcaacagatgaggggctgaaccagcagacagagatcaggcagacacatgggtagatcctaggacatataatgaatggatgggtggatggagggtgggtagatgaaggatggatgggtggtaaaatggatgggtgggtaaatggctggatggaggatggacggatggatatgtgatggatggatggatgaaggatgggtggatggaggatggatgagtggatgaaggatggaagatggatggactgatggatggatgatggatggatggatgatggatgggtgggtaggcggatggaggatggaagggtggatggaggatggaagatagatggaggggtgaatggaggatgggtggatggagggaggattgaggatagatgggtgggtgggtgggtagatctatggaggctaggtgtatggaagataattggatggagaattgctttatgaatggatgaatgaagagatggaaaatagctttatagatggatggatggatggatggatggatagatggaagaaggatgaatggatggaaaatagctttatagatatatgggtggatatttaagtgatagccttacattaatagatgaatggacgatgaatggatgggtgagtgggtaggagtgttactgatggaggggtggatatacggataatagctttatagatggatggatggatagatggacggaaggatagaaagacaggtgaatgactggatgtatcagcatatgacaagcaggtacagctgtacatgggaggtctatgccctgagaccctgaggaaaatgaggatgcccgtgctggtggccctcacctggccctcgcttgtaacccctcagccacattccctgggaaggcaacagaggcctctggtcttgcccattcaacctttggcacactgagtgtcagacccaggtctctgtcttggacccagatctccttgagggtgggtgtgtctggtcctctctggccccgggacccagtcactgaatacgtggctgggactgagacggggtggggtgggaggggcgggagggtacctcgggctcaagcttcccttggagaagcagatggtgtccactttctgccctgccaagtctctccctgaagtgccctaagaatgtcaaagacagaaggtcccagcccctcacctgggaccctgcctcctcatcctccctgggggagtctcaggccttagatggggacccagaccccactgtccccagaccccaaggaagcatagccgctgttcacacgagtctgggagtctgggcctggcaggctcttgctgtgttgcagattggcagatgccgcctccctatgtggtgctggacttgccgcaggagaccctggaggaggagacccccggcgccaacctgtggcccaccaccatcaccttcctcaccctcttcctgctgagcctgttctatagcacagcactgaccgtgaccagcgtccggggcccatctggcaagagggag

SEQ ID NO: 13249 - DNA, 2300 bp, Homo sapien
gggctgggctgggctaggctgggctgggctgagctgggctgggctgggctgggctgagctgggctgagctgagctggactgagccgggctgggctgggctaggctgggctgggctgggctgggctgggctgggctgggctgggctaggctgggctgggctgggctagattgggctgggctggactgggctaggctgagctgggctgagctgagctggactgagctgggctgggctgggctgggctggcctgggctggcctgggctgggctggcctgggctgggctgagctggactgggctagactgggctagactgggctgggctggactgtgctgggctggactgtgctgggctggactgggctgggctgggctgggctgggctgagctgggctgggctagattgggctgggctggactgggctgggctgggctgagctcggctgggccgggctgagctgggctgagctagactgggctgagctggactgggctgggctgggctgagctcggctgggccgggctgagctgggctgagctagactgggctgagctgggctgagctgggctgagctgggctgtgctgagctgggctgagctgagctgggctgagctggactaggctggggtgagctaggctgggctaggctgggctgggctgagctgggctgggctgagctgggctaaactggactgggctaggctgagctgagctgagctgagctgagctggactgggccgggctgggctgagctgagctgggctaggctgggctgggctgggctgacctgatctgagctggactgggctgaactgggtgagcttaggtggactgagctggtctgggctgagctgagctgggctgagctgggctgggctgagctgagctgggctgagctgggctgggctgagctggactgagctatgctgagctgagctgggttgcgttgacctgggctgagctgggctgggctgggttggactgggctgggctgagctgagctgagctgggctgggctgagctgagctgggctgggttggactgggctgggctgggttggactgggctgggctgagctgagctgtactgagctggactgacctgggctaagctgagctgggctgacctgtactgggctgggctagactgggctgagctggactgagctgagctagactgggctgagctgggtgagcttaggtggactgagctgggctgggctgggctgagctgagctgagctgggctgggctgggctgggatgagctgtactgagctgccctggggtgggctgggctgagctgggctgagctgggctgggctggactgagctggactgagctggactggcctgggctgggctgggctggatgagctgaggtggctgctaatgtgggaaggaggccgtgggttgagtgtgactccacctgcagagccctgagcccagctgtgttcttaggggttctgagggccacgcagctctgttgcaccatgattctgtcttctctcttgcccactgcctgaaggaaatttggagtgggctgggcccagagctcccctgggtaacaggccctgtcctggagggcctggcagggacatggcttagcctgttggcctctagtcccgagacctcataggccacaggggtccactgtggcttgtttgggcctggggtggggctcatggagtggtgggtgttggactgagactctgaccagggacagggggatggggtcacagccaagccactccacccctaccccatgcacacagcactcagagcccaggccccctcctcagagcccccaccaaaatcctctctaggggcaggggaaagagcaagacatgtcccccacccagagcaggaactggggtcagggagctcaggggactcagccactccatggcagagccctgtttaatataacttgtgtctgggatggcctgggtcagaggccctatctaaggagcatgttcagaaactgtgtcgctgggatgagacagctgggtccaaccgcaggcccatggtgcaggagctgtgtaaccttggggctgtcaccaggcctctctgtgctgggttcctccagtgtagaggagaggcaggtacagcctgtcctcctggggacatggcatgagggccgcgtcctcacagcgcattctgtgttccagcatccccgaccagccccaaggtcttcccgctgagcctcgacagcaccccccaagatgggaacgtggtcgtcgcatgcctggtccagggcttcttcccccaggagccactcagtgtgacctggagcgaaagc

SEQ ID NO: 13250 - DNA, 2300 bp, Homo sapien
agcactgtcctcgcacccgctgctcccacccaccctggcatggccattccaggcctggggcaggaaggcagacgctccccctgcccccagacacaagcattcctgcacacacccccagcacacacacgcactcccatgcgcacactgacacacacaggtgtgtgcagctgagacacagcccgttcccaggaagcccagcccccatcactgagggaaaggggcagcaccgtagggccacaggagtggcagctggacacagagccaggcgctggcgaaggcccaggccactgaggcaggctgccggcatggctgggcgtgaaggccagaacagggcaggaggggctgggggcactatgcctattgggcctaggtgggcacacgccgggcaggagaggaacagcccggcccctcagacaggaaggggtgggggcaggggccatttctggaggccagggcagggccagcaccccaaggaaaagcagagcagggtgagaacggacatggggctcagagctgagcaggcctgctgggccccaggagggagacacagacgactggggatctcaaggctggcagaggccagagatggagccccagctgggatgccaacctccttcctgggggctcaccctgcccggcccctccagcccagcacagcttggggcattggatagaaccgggagagagccgaccaggcactgaggcccctgccccaaatgcccacagcctggggaaaatgagcaggtacatgggaggggcaagtggagccccaggcacacccacacagtgcacacagcctcaccggggcccgggaagtgggggaacaggaggctcaccacccctgctgtggtttctctcagaatcatgggtccttccagggaactcagcattttcccctcagcctcccacacggcacctttctccagggccacaagcagggcatgggggccttggacagcctgggaacactcacccccagcctgcgttccctgagcctcacatcatagccctccagggccctggcagccagcagcccttctggtgtcttccacacgtggtgagcatctctctgagggcaccaggcccgacagcccctctccctccacaggacaaccagccctgggcacccagggtcccaggggcaggtcccagtgtctccctccccaaagattctatacaacccacccctccccagtggccactccatgcatgctggcctccaggggacaggcaggccaatggtgtgaaggaaattatctcgctcagagcagagcactgggtgcaaccagggacgaatgccatgggcgcctccaggaaggccaccgagcccgagcccagccttctccatgtgcccacgcccacccatggcatagacggggcacagtgtccccagcctccagcagcttcaaggaccttgcagagccaccagccacctccgcacagctccctgccagcccccagccaggccccagccttcatgtgctcgccttgaggagcagcccagcttgggacccccggctgcaggacagtgacctgggagtgagtacaaggtgaggccaccactcagggtgccagctccaagcgggtcacagggacgagggctgcggccatcaggaggccctgcacacacatctgggacacgcggcccccgagggccagttcacctcagtgcgcctcattctcctgcacaaaagcgcccccatcctttcttcacaaggctttcgtggaagcagaggcgtcgatgcccagtaccctctccctttcccaggcaacgggaccccaagtttgctgactgggaccaccaagccacgcatgcgtcaagagtgagagtccgggacctaggcaggggccctggggttgggcctgagagagaagagaacctcccccagcactcggtgtgcatcggtagtgaaggagcctcacctgacccccgctgttgctcaatcgacttcccaagaacagagagaaaagggaacttccagggcggcccgggcctccgggggttcccaccccatttttagctgaaagcactgaggcagagctccccctacccaggctccactgcccggcacagaaataacaaccacggttactgatcatctgggagctgtccaggaacccgacagggagccggacgggccacaccatccacaggcaccaaatggacgacccggcgcttcaggtatcccagcccaccgggagccccaatcgaggggccggcccaggcagcagtgagggagaggctgcctgggcccctgacagcgaggggactcctgggccaccctcacagcatcaaccaa

SEQ ID NO: 13251 - DNA, 2300 bp, Homo sapien
aggaagcaggaggagcaggggacagcccctggagctcagagcaccagggcagagcaccctcaggtaagcaggggcaggtaggaggcaggacgagcaggggacagcccctggagctcaggggacagaggagagcatcagaaggtgagcaggactgaggcttagcctcagggaatcagagcagagcagccacaggtgagcagggccggtgggaggcaggacgagcaggggacaggcactagagctcagggcaaggcaaccacaggtgagcagggccggtgggaggcatcactcagctcctagattttggcaggagctgggtagttgctggcagcagacagctgagggctggtgaaagtgcagtgcagcctcctggtgccaggaagggagtgtgagcccatcccactgagcagttggcaagggtgagctgggatggagaagggaaggcattccagggctcggggctgagctctcaggcaggggcaggtgtggctgcagggggaatgtgtgcttgagaccaggagggtcccagggctggccccagcggaccctaggcaggaaggcctctgaggctggcgccccagaaggagcaagatgggctgccaggagccagggccaccagcacaatgaagctgagtggaggtggtgcagggcagtgtagcagcagagggctgccagaggggcccattcagggcctgggcagagtcagccagagcctgtggtgcaggtgaggggaaggggtggtgagcggggccctggggctgagcagaggggatggcctggctgagggcagggcacttagcctcctcagaggtcaggggcacaccccacctgcagtgggactccagggccactgggccagcggcagagagaaatggggcctccctgtggcctgggggtcctggcaccacgcagggtggggagggccaagggcaggtgcaaggctcctacctgtgctggggggcctgggttgagcccagcagggaccttgccgggggaagctctggagagagggaggaggtgggctggtggccgagaaggccaggccagggctgggagggtgaggttgtggtgactgagcctccagaagtaatgcaggacactgggaggcagggggcatccaggcactcagggccctgacctgggctgctgcacactggggctaaggggaaaggaggggagaggctgaggaggaggctccaggaggctattccaaggcagggggttccggggccctggggctgaagggcgccgaccctatgcagtgtctggcccctctgctgcacagaagaaaagggccttggagggcagagggcaggctatgaccagggccctgggcaagtcaggcccactcactagcggagggccacgctggggcggcagggtcaggagcttcaggggactcgggggacccacgagaagccatctgagaacagtgtccactggtcaagccaggcacccataaaaggctggagtggggccaatgggcatgagccgtccctgaggtggcaccgatggccagagctgaggccaagctagaggccctggactgtgctgactcccggcaggcacagagcgctgacctggctgccgagccccgcctcctaggctgcaggggtgcctgcagaagggcaccacagggccaccggtcctgcaagctttctggggcaggccgggcctgactttggctttggggcagggagggggctaaggtgacgcaggtggcgccagccaggtgcacacccaatgcccgtgagcccagacactggaccctgcctggaccctcgcagatagacaagaaccgaggggcctctgcgccctgggcccagctctgtcccacaccgcggtcacatggcaccacctctcttgcagcctccaccaagggcccatcggtcttccccctggcgccctgctccaggagcacctccgagagcacagcggccctgggctgcctggtcaaggactacttccccgaaccggtgacggtgtcgtggaactcaggcgctctgaccagcggcgtgcacaccttcccggctgtcctacagtcctcaggactctactccctcagcagcgtggtgaccgtgccctccagcaacttcggcacccagacctacacctgcaacgtagatcacaagcccagcaacaccaaggtggacaagacagttggtgagaggccagctcagggagggagggtgtctgctggaagccaggctcagccctcctgcctggacgcaccccggctgtgcagccccagcccagggcagcaaggcaggccccatctgtctcctcacccggaggcctct

SEQ ID NO: 13252 - DNA, 2300 bp, Homo sapien
actcgtcctgccacccaccagcccctgctcacctgaggcacctgaggctgctctgccctggtcccctgagctccagggtcttccccctgctcatcctgcctcccacctgcccttgttcaccttcagttgctctgccctggtctgctgagctccaggaggtgccccctgctccttctgcccccacctgccctgctcacctgtggctgctcggtcctggtaccctgaactccaatgcctgccccctgctcactctgccctccctcaacccgggcagcaatgtcactcaggtcactgttgcccccctgcctgtcctggcaccctctgtccaggtttgggctgtttttctggcctcatttttgtttttgcagcacttggcttgttccctatgctgtggagcagccccagtgtccagtcaggtctccccaacagagccccttgcccttgcccatgtgcccctcctgggtgagctcccagatcctcccgtccctgcactgctcctgctctggaagcctctccagaacctcagctcctcagtggcctctgctctgctgggtcagctccctgaacgcacggagcctcacccctcccctcgccccaggcctgctgcactctgggcctttctgggcctccctggactcttccctcctcccatctgtgcactcagcacagctctcccctccactccgctgctgaccacagccctgctccccgccagcaggtgccccagcgccatcaggtggctctgagcctagcccctgtgcctcccctgtccctgcctctgcctctgggctccttggcttccaccctcctgtcctgctgccacactcaccctccctgctctgctcccggctcacctgctgtccttggtcctggctgagagagggccccacggccagcactgctgaccctgccctgggctccagtgatgctgctggcctggacaagcccctccgttcacctggggcctctcctcctccctcgttctactgcctcctcagctcaggtgggtcctgcccatgctggcatcaccccacggccggctctgccgcatcccgtcaggttcctcgtgctcccagcctggtcgtcatggaggcctcagtcagcctctggtgtgtcctgccctgttggcttggaagcccctgcccacggtccccgtcatcttgcactgggtgggcgttggtgcctgaaggctgcccacctcccccgtgctggctccgcttgggtctccatgtggggctggccttgcccccacgtctccccagcctcttgtagcctgttcagcagctgaggtccaggagcgcccacggctgcacccaggctctgtccttctcctcccgagcctgtgcccttgccctgtgctgaccctactcaccgaggtgggggtctcagcccttcctgttttggcgcggtacatgtgggcagacttgcccacgccgtcagctgctatttgtcttcctaggaaatcacagctcggccctcaggtccccaggggtgtgaactccacgctgcaaagactaagaacaggattgaaaccggcggcaccgcttacttcctgaagttcccttttcttctggtggtttctgtgtcacagggtaagggggagtccagacacagccgaggctgcctcatgggtgtgtggggatgggggtggtggctgcccccatactcgtgggagaaggtggggagcccggaccttgttcactgctcttttctctgtctctgagtccctggggctggactgatactggcagtgattatgaccattctgcccgtggtctcagcctctcaatacctgggcctctcacctgaagcttctgacccccactgggccctggtggctgctttggcctgggcgtctctccagctggctctcactcatggtgcagggaggggagtgtgagttcatcccgctgagcagctggcaaaggcgagctgggatggagaagggaaggcgttccaaggctcaggtctgagctcacaggcaggggcaggtctggctgcagggagaatgtgtgtgcttgagaccaggagggtcccagggctggccgagtggaccctgcacaggaaggcttctgaggctggtgctccagaaggaacaagatgggctgccaggagccagggccaccagctgtgctcctgggggccgaggggacgtgggacaggtggatgaacacactgaagctgagtggaggtggtgcagggcagtgtagcagcagaggggagccagaggggcccattcagagcctgggcagagttggccagagcctgtggtgcaggtgaggggaaggggtagggggcag

SEQ ID NO: 13253 - DNA, 2300 bp, Homo sapien
cagggccccactgggaggacaagctccaggagggccccaccaccctagtgggtgggcctcaggacgtcccactgacgcatgcaggaaggggcacctccccttaaccacactgctctgtacggggcacgtgggcacaggtgcacactcacactcacatatacgcctgagccctgcaggagcggaacgttcacagcccagacccagttccagaaaagccaggggagtcccctcccaagcccccaagctcagcctgctcccctaggcccctctggcttccctgtgtttccactgtgcacagatcaggcaccaactccacagacccctcccaggcagcccctgctccctgcctggccaagtctcccatcccttcctaagcccaactaggacccaaagcatagacagggaggggccacgtggggtggcatcagaagcaggccagtgagacagggcctgcccagggccctctgcatgcctctggcttctgcctggggctcccaggagtgtaagaacagtcccacaaccactgtggggacacctggcacccagactcccacaagggggcagtggggcccctgctcgtgccttagacatcttccgggcctccccagggccccccgccttctggctgcctccctctgctctcagggccaaggtgaggtggaggccactgtcacccctgagggtccagtcaccagagggtaattgagagcaacaggtcactcggggaagccctgccacagagaagccctccagcccatgggacccaggacctggcccaggggaggggcttttaaagagagggggaaagagggagaatcaacagatgaggggctgaaccagcagacagagatcaggcagacacatgggtagatcctaggacatataatgaatggatgggtggatggaggattggtagacggaggatggatgggtgggtaaatggctggatggaggatggacagatggatatatgatggatggatgaaggacgggtggatggaggatggatgagtggatgaatgaaggatggaagatggatggatggatgggtggatggactgatggatgatggatggatggatggatggatgatggatggatgggtaggcggatggaggatggaagggtggatggaggatggaagatagatggaggggtgaatggaggatgggtggactgacggaggattgaggatactggggtgggtgggtgggtagatctatggaggataggtgtatggaagataattggatggagaattgctttatgaatggatgaatgaagagatggaaaatagctttatagatggatgggtgaatggatggatggatagatggaagaaggatgaatggatggaaaatagctttatagatatatgggtggatatttaagtgatagccttacattaatagatgaatggaggatgaatggttgggtgagtgggtaggagtgttactgatggaggggtggatatacggataatagctttatagatggatggatggatagatggatggaaggatagaaagacaggtgaatgactggatgtatcagcatatgacaagcaggtacagctgtacatgggaggtctatgccctgagaccctgaggaaaatgaggatgcccgtgctggtggccctcacctggccctcgcttgtaacccctcagccacattccctgggaaggcaacagaggcctctggtcttgcccattcaacctttggcacactgagtgtcagacccaggtctctgtcttggacccagatctccttgagggtgggtgtgtctggtcctctctggccccgggacccagtcactgaatacgtggctgggactgagacggggtggggtgggaggggcgggagggtacctcgggctcaagcttcccttggagaagcagatggtgtccactttctgccctgccaagtctctccctgaagtgccctaagaatgtcaaagacagaaggtcccagcccctcacctgggactctgcctcctcatcctccctgggggagtctcaggccttagatggggacccagaccccactgtccccagaccccaaggaagcatagccgctgttcacacgagtctgggcctggcaggctcttgctgtgttgcagattggcagatgccgcctccctatgtggtgctggacttgccgcaggagaccctggaggaggagacccccggcgccaacctgtggcccaccaccatcaccttcctcaccctcttcctgctgagcctgttctatagcacagcactgaccgtgaccagcgtccggggcccatctggcaacaggga

SEQ ID NO: 13254 - DNA, 2300 bp, Homo sapien
ggttgggctgaactgggctgggctgagttgggctgagctgggctgagctgagttgggctgagctgggctgagctgagttgggctgggctgagctgggctaagctggacctggctggggtgagctaggctgggctgcgctgagctgggctgggctgggctgggctgagctgggctgggctgagctgagctgggctgacctgggctgggctgacctgggctgggctaagctggactgatctgggctaggctgggctgggctgacctaagctgagccagactgggctgagctgggtgagcttaggtggattgagctggactgggctgagctgagctgggctgagctggactgggctaggctgagctgagcttggttgggttgacctgggctgagctgagctgaattgggttgacctgggctgagctgggttcggctgggctaggctgacctgggctgggctgagctgagctaggcttggatgagctgagctgggctgggttggactgcgctgggctgggttggactggtctgggctgacctgagctgtactgagctggtctgacctgtgctgagctgggctgggctaggctgagctgggctgacctgtgttgggctgggctgggctaagctgggctaggctgggctgagctggacggagctgacctgggtgagcttaagtggactgagctgagctggactgacctgggctaagctaagctgggctgacctgtgctgggctgggctggactaggctgggctgagctggactgagctgagctagactgagctgagctgggtgagcttaggtggactgagctgggctgggctgagctgagctggactgggctgggccgaactgagctagactgggctgagctgggctgagctggggtgggctgagctaggctgagctggggtgggctgagctgggctgagctaggctgagctgagctgggtttggttgacatggactgagctgtgttgagctgggctaggctaagctaggctgggcggagctgagctgggttgggctgagctgaactgggctggactgggctggactgggctgggctgggctgggctgggctgagctgagctgagctgtactgagctggcctgggccaggctgagctgggctgggctgagctgtactaagctggcctgggctgggctgagctgtactgagctggcctgggctgggttgacctgggctgagctggactaagctgggctgacctgggctgggatgggatgggctaggatgacttgggctggactgggcgggactgagctggactggcctgggctgagctgggctgggctggactgagctggactggcctgggctgggctgggcgggatgggctgaggtggctgctaatgtgggaaagaggccgtgggttgagtgtgattccacctgcagagccctgagcccagctgtgttcttaggggttctgagggccacgcagctctgttgcaccatgattctgtcttctctcttgcccactgcctgaaggaaatttggagtgggctgggcccagagctcccctgtatagcaggccctgtcctggagggcctggcagggacatggcttagcctgttggcctctagtcccgagacctcataggccacaggggtccactgtggcttgtttgggcctggggtggggctcatggagtggtgggtgttggactgagactctgaccagggacagggggatggggtcacagccaagccactccacccctaccccatgcacacagcactcagagcccagaccctctcctaagagcccccaccaaaatcctctctaggggcaggggatagagcaagacatgtcccccacccagagcaggggctgcggtcagggagctcaggggactcagccactccatggcagagccctgtttaatacaacttgtgtctgggatggcctgaatcagagaccctatctaaggagcatgttcagaaaccatgttgctgggatcagacagcagggtccaactgcaggcctgtggtgcaggagctgtgtgaccatggggctgtcaccaggcctctctgtgctgggttcctccagtatagaggagaggcagtatagaggagagggccgcgtcctcacagtgcattctgtgttccagcatccccgaccagccccaaggtcttcccgctgagcctctgcagcacccagccagatgggaacgtggtcatcgcctgcctggtccagggcttcttcccccaggagccactcagtgtgacctggagcgaaagcggacagggcgtgaccgccagaaacttcccaccc

SEQ ID NO: 13255 - DNA, 2300 bp, Homo sapien
tgggcacacaggcccctccaggtagaaaaacagccctaagtgaaacccccacacagacacacacgacccgacagccctcgcccaagtctgtgccactggcgttcgcctctctgccctgtcccaccttgccgagtcctggccccagcaccggggccagtggagccgagcccactcacaccccgcagcctccgccaccccgccctgtgggcacaccaggcccaggtcagcagccaggccccctctcctactgccccccaccgccccttggtccatcctgaatcggcctccaggggatcgccagcctcacacacccagtctcgcccactcacgcctcactcaaggcacagctgtgcacacactaggccccatagcaactccacagcaccctgtaccaccaccagggcgccatagacaccccacacgtggtcacacgtggcccacactccgcctcccaccctgcctccagcgaggctactgccaagcccttcctctgagccatacctgggccgctggatcccagagagaaatggagaggccctcacgtggtgtcctccagtccaaccctccctgtcaccctgtcagcagcaccccacagccaaacacaggatggatgcgtgggctccatcccccactcacccacaccggaaccccagagcaggctacgtgcccctcacagacctcaaacccacatgtgcatctgacaccccagatccaaacgctccccccggtcatgcacaccaagggcacagcacccaccaaatccacacggaaacacgggcaccgggcaccccatgagcacaaagcccctccatgtctgaagacagtccctgcacaccgtcacagccatacattcagcttcactctcacgtcccagcccacctgcacccagctctgggcctggagcagcagaaagaggtgtgagggcccgaggccggacctgcacctgctgatgacccgggaccagcaggcagctcacggtgttggggaagggagtggaggggactcagggcaggagccagagggaccaggctggtgggcggggccgggccggggtagggccaggaggcagctctggacacccacaggcctgggctcatagtccacaccaggacagcccctcagagcacccatgcagtgagtcccaggtcttgggagccaggccgcagagctcacgcatccttccgagggccctgagtgaggcggccactcctgtgccgaggggttgggtccttctctggggagggcgtggggtctagagaggcggagtggaggtaaccagaggtcaggagagaagccgtaaggaacagagggaaaatggggccagagtgggggcccagggacgagaggtcaggagtggtcggcctggctctgggccgttgactgactcgggacctgggtgcccaccctcagggctggctggcggctccgcgcagtcccagagggccccggatagggtgctctgccactccggacagcagcagggactgccgagagcagcagggggctctgtcccccacccccgctgccactgtggagccgggagggctgactggccaggtcccccagagctggacgtgtgcgtggaggaggccgagggcgaggcgccgtggacgtggaccggcctctgcatcttcgccgcactcttcctgctcagcgtgagctacagcgccgccatcacgctcctcatggtgggcacccacctccaggggcccggccagggcagggggttgggcagagccagcagagcgccctgacccacgccctcccctcaggtgcagcggttcctctcagccacgcggcaggggaggccccagacctccctcgactacaccaacgtcctccagccccacgcctaggccgcgggccactcacgctccaccaggcccagctttttctctgccagcgcctgagcctccctcgggctgcgccctgccctgggtgggaaaagggaagcagacaagaaaagggggcacaaggtcactactgtgggctgatggccagtgaacctgagcccagagggggccggctcagccgcaaggttaaaggcgccgagagaaccaccagtcgcagcccccacccgaaaaccgtgtctgtcccttcaacagagtcatcgaggaggggtggctgctagccgttctgagctcatcccaggcccctgggtctccgggtcactcccattctgactgtacaatcaccaaaagccaaggagggcccagcacccagcccaggacacagctgagtctgcgtccagcccaacaccagcccacggcctcactccccagcctcggtctgacccttct

SEQ ID NO: 13256 - DNA, 2300 bp, Homo sapien
aaagggaacttccagggtggcccgggcctccaggggttcccactccatttttagctgaaagcactgaggcagagctccccccacccaggctccactgcccgacacagaaataacaaccacggttactgatcatctgggagctgtccaggaacccgacagggagccggacgggccacaccagccacaggcaccaaatggacgacccggcgcttcaggtatcccagcccaccgggagccccaatcaaggggccggcccaggcagcagtgagggagaggctgcctgggtccctgacagcgaggggactcctgggccaccctcacagcatcaaccaagcttcttagttactgcatggactccagacgtcccttccctgcatggggacacaggaaagctagaaacagcctaacgccgacctggagaaggcagggggctgggaatcttggctgggcccaagactaagaaggtcagaggccccatgctgggcagggctaggctgggtgcagactgcctgtcacccccaggacagggacagccaacccagagccgggagggagggtggggaggcggcagcagggagctgtcctgagctccactgcgcaactggctgatcttggcaagtccgagctgggtggactgaggggggcttggctgagtggactagactgagacgggcctaacagactgagctgaggcgagctgggtgggctgagagggctaccctgtcccttagaggacaggtggccaagctgggctgtcctgagccagggcgatcggggctggcccgggccaggcgggtttagctgagttgagtgagtggactgggtagagggaaatgagctaggctcagctgagctaggcttgagctgggttatcctaagccctaaggtggactgagctgggctgagctggacttatctggggagcagggcaaagtcaggctgagctgaggtggcctgccctgggtggtccaggattgagttaagctgaattaggctgacctggacttgactggacttggttgaaataagctgggccgacacaggagtagggacaagctacagttctctacttaggataaaatgggtgctcgtggactatccgggctgaaggagaccaagctggggtattacctgctgagcttacctgacctggcctgagttcagcagggctgcgctgagctggacagacctgagccaagcttagctggttgggctgagtaagctgggctgagctaaatgggattgagctgaggagggctaggctgggggagagacctgacgacggacagggttaaaagctggagtgagcaggccttaaattattgaactaaattgggctggggtgatctgaatttagctgggatgagctgggctgggctgaactgtgcccacgtgaactgggctaaactaggctcgcctgagtggactcagctgggttggtctcaactgggttcagctgagctgggctcggctagactacactgggttcagctgacactacactgggttcaacccgagaggggtgagcgcctacctaagccggcccagcccgttcgacctgttcatccgcaagtcgcccacgatcacctgtctggtggtggacctggcacccagcaagtggaccgtgaacctgacctggtcccgggccagtgggaagcctgtgaaccactccaccagaaaggaggagaagcagcgcaatggcacgttaaccgtcacgtccaccctgccggtgggcacccgagactggatcgaaggggagacctaccagtgcagggtgacccacccccacctgcccagggccctcgtgcggtccacgaccaagaccagcggtgagccacgggcaggccggggtcgtggggggagggagggagcgagtgagcggggcctgggctgaccccacgtctggccacaggcccgcgtgctgccccggaagtctatgcgtttgcgacgccggagtggctggggagccgggacaagcgcaccctcacctgcctgatccagaacttcatgcctgaggacatctcggtgcagtggctgcacaacgaggtgcagctcccggacgcccggcacagcacgacgcagccccgcaagaccaagggctccggcttcttcatcttcagccgcctggaggtgaccagggccgagtgggagcagaaagatgagttcatctgccgtgcagtccatgaggcagcgagcccctcacagaccgtccagcgagcggtgtctgtaaatcccggtaaatgacgtactcctgcctccctccctcccagggctccgtccagctgtgcagtggggagggc

SEQ ID NO: 13257 - DNA, 2300 bp, Homo sapien
gtgcggggacccctcactccgtcctcccccagcctgggaggttgagcccattatgagctccatggggtgaagctggaacgagaggctgggagccgactgggagcctgcggctggaggatggatttccccagggacccacacgtgcacctccacctgtctcctggacattctctctgagggcagggctggtgccagctcagggatccagcagggtcacaagggcaggccgggtccttgtggagagcacatttagtgggagggacatgatttcccttcaaagtgcccattctggacgcttcccgttccatgctggacgcttcctcttccacgctggatgcttcctgttccacactggatgcttcctgttccacgctggatgtttcctgttacactctggatgcttcctgttccacactggatgcttcctgttccatcctggatgcttcctgttccatgctggacatttcctgttccactctggatgctccctgttccatgctggatgcttcctgttccatgctggatgcttcctgttccatgctggacatttcctgttccactctgcatgcttcctgttccactctggatgcttcctgttccatggtggacgtttcctgttccactctgcatgcttcctgttccatgctggatgcttccttttccattctggatgcttcctgttccatgttggatgtttcttgttccactctggatgcttcctattccattctggatgcttcctgttccatgctggacatttcctgttccatgctggatgctttctgttacatcctggatgcttcctgttccatgctggatgttttttgtttgactctggatgcttccagttccattctggatgcttcctgttccatgctggatgcttccttttccattccgcacaattcctattccattctggacacttcctgtgcgacacctccttgggttttctgtctgcccagtccctctatcctcatcccgttccctgctacctcccacctccacaatcgtccttgcccagctcctccctctctctagagcttcggcctggcaaggtccctcctgatctcagtccaggctcccccagcacaggtaggagcctagcacctgcccttggacctccccaccctgcatggtgccagcatcccccggtccccagggaggccccatttctctctctgcttgtagtccagtggccctggagtcccactgcaactcgggtgtgcccctgacctctgaggaagttaagtgtcctgtccctagccaggctatcccgtctgctcagccccagggccctgcccccaaccccttcccctcacctgcaccacaggctctggccaactctgcccaggccctgaatgggcccctctggctcccctctgctgctacactgccctgcaccacctccactcagcttcagtgtgttcatccacctgtcccaagtcccctcggcccccaggagcacagctggtggccctggctcctggcagcccatcttgttccttctggagcaccagcctcagaggccttcctgtgcagggtccacttggccagccctgggaccctcctggtctcaagcacacacgttctccctgcagccagacctgcccctgcctgtgagctcagccctgagccttggaatgccttcccatctccatcccagctcgcctttgccagctgctcagcaggatgaactcacactcccctccctgcaccatgagtcagagccagctggagacacgcccaggccaaagcagccaccagggcctagtgggggccagaagcttcagatgagaggcccaggtattgagaggctgagatcacgggcagaatggtcataatcgctgccagtatcagtccagccccagggactcagagacagagaaaagagcagcacacaaggtctgggctccccaccttctcccgtgagtacgggggagtatgggggcagccaccacccccatccccacacacccatgaggcagcctcggctgtgtctggactccccctcgccctctgacccagaaaccaccagaagaaaagggaacttcaggaagtaagtggtgccgccggtttcaatcctgttcttagtctttgcagcgtggagttcacacacctggggacctgggggccgagctgtgatttcctaggaagacaaatagcggctgacggcaggggcggggctgcccacatgtacctcgccagaacaggaagggctgagacccccacctcggtgagtggggtcagcacagggcaggggcacaggctcgggaggaggacagagcctgggggcagcc

SEQ ID NO: 13258 - DNA, 2300 bp, Homo sapien
gagaggccccaggtgaaccgaggggcttgtccaggccggcagcatcaccggagcccagggcagggtcagcagagctggccgtagggccctcctctcagccaggaccaaggacagcaggtgagctgggagcagagcagggagggtgagtgtggcagcaggacaggagggtggaagccaaggagcccagaggcagaggcagggacaggggaggcacaggggctgggctcagagccagctgatggggttggggcacctgctggccgggagcagggctgtggtcagcagcggagaggaggggagagctgtgctgagtgcacgggcgggaggagggaagagtccagggaggcccagaaaggcccagagtgcagcaggcctggggcgaggggaggggctgaggctccgtgcgttcagggaactgacccagcagagcagaggccactgaggagctgaggttctggagaggcttccagagcaggagcagtgcagggacgggaggatccgggagctcatccaggaggggcacatgggcaagggcaaggggctctgttggggagacctgactggacactggggctgctccacagcatagggaacacgccaagtgctgcaaaaacaaaaatgaggcaagaaaaacagcctaaacctggacagagggtgccaggacaggcaggggggcaacagtggaccgagtgacgttgctgccccaggttgagggagggcagagtgagcagggggcaggcattggagttcaggggaccaggaccaagcagccacaggtgcacagggcaggtgggaggcaggaagaacagggggcagctcctggagctcaggggaccacgggagagcatctgaaggtgaacaggagccggtggaggggcaggatgagcaggaggaagaccctggagctcaggggaccagggcagagcagccacaggtgaggaggcagccacaggtgcgcagggcaggtgggaggcaggaccagcagggggcagcccctggagctcatagagccagggcagagcagttgcaggtgagcagggctcagtggaagatgggcaagcagggggcagctcctggagctcagggcaccagggcagtgtagccacaggtgagcaggggctggtgggaggcaggacaagcaggcggcagctcccggagctcagggaaccagggcagtgtagctgcaggtgagcaggggctggtggaaggcaggacaagcaggtggcagctcctggagctcagggaaccagggcagtgtagctgcaggtgagcaggggctggtgggaggcaggacgagcagggggcagcccctggagctcaggggaccaggggagggcatcagaaggtgagcaggggctggtgggaggcaggatgagtaaggggcagcccctttagctcaggggaccagggcagagcagcctcaggtgagcaggggcaggtgaggggcaggacgagcagggggcagtcctggagctcaggggatcagggcagagcatcagaaggtgagcatggctggtgggaggtgggcgagcagggggcagcccctggagctcaggggaccagggcagagcagtcgcaggtgagcacgggttggtgggaggtagaacgagtagggggcagctcctggagctcagggaacaggggagaacatcagaagatgagaagggccggtgggaggttgcagagcagggggcagcttctgcagctctgccagccagggcagagcagctgcaggtaagcagggctggtgggaagcaggggtagcaggtgggcagcccctggagctcagagagccggggaagatcatcggtaggtgagcaggggctggtggaaagcaggaggagcaaggggcagctcatggagctcagaggaccagggaagagcagccacaggtgaacaggggcaggtgggcggcagaatgagcaggggcagctcctggagctcaggggacaagggcagagcagccataggcaaacaggagcagggtcaggggacaggaggagcagggggcagctcttggagctcaggggaccagggcagagccgctgcaggtgagcaggggcaggtggggggcaggaggagcagggggcatctcctggagctcagagcaccagggcagagcagccacaggtgagcagggacggtgggaggcagcacgcagctcctagactttggcaggagctgggtagttgccggcagcagacagctgagggctggtgaaagtgcagtgcagcctcctggtgccgggaagggagtgtgagtccatcccactgagcagttggcaagggcgagctgggatg

SEQ ID NO: 13259 - DNA, 2300 bp, Homo sapien
gccaggaccccagacccggaggcagcgcccctttgagttcctctctctggtctccgatgttcttctgttgggatcatttcacctacaggcaacagagacagtgtgaaatgctttccctgtggtcgggaagggagccggggcagagatgacccagtggggtggtgtgggggcctccgggctagacgtccagcccaggctgctccctgggccccacattcgccctgcgccctcctccctgtgccacagccgtgctaccttgaacaaggtgacggtggtactgtagaagaggctcaggaggaagaggacgatgaaggtggaggcggtggcccacaggttctcaaagccctcctcgtcggcgctcacctccccctctgcaggagacacagcacgggggaatagggtcaggctggggtggcacccagcaaagcccccccggggcccatcctctaggcccacccttggcccctaggctgtgctgcacccaggggtggggagagcaagtgcaggggggctcgggcactgcccagggcatgggctgggcccctgaaagcctgatgcagcgggggcacaggccgaggctgggcagggctgggactctgaggtcttttcctcagagtcctggggtggcagagagagcgtgggggatgcagcacacagaccaaggtgggggctggagggcggggccccagcggagcagcggccagcatgtcctgactctcctggagggggaagcagggggtgtggccctgccctgtgctgtgggggctggcaggtgggaggactgagctggggggaacccgatcctgactccctcaccaaggccctgactctccagctccctcttggagcagagtctgcatggggacatcctggcggacttgtcctaccctgccaggacccagggagcagacagagacctgagctccacagtgggatgaggacattcggggggttgcatcccctgcacagatgggcccttgggagacacctggagcccaggactccaaagggccaagagtgtggcggggactcggaggtggccccagttagagacagcactgtgcgttgggtgtggagacctcactcgggccctgccttccctgctggggctcggtccttcccgggctgctgctgtctgacctcgcctgctccctgctgtgggttggggagcaggtggtatttgcaggggcagacttgctctagctcatctcctgaggcctcctgctaagaggagcagctgcccagggcagccactctgccctctgggcccatatgcttagtcactgcctgctctcagcacatggcacaggctctggttctgctcaccggtgggtgtgggggctatctgctgccttcatcaggagcctggcctcagcaggggtcacatgctatccctggggcctccgctccccaggcagagcccaagctgggtgccatggcagcacctccaagcagagacagaaggacaagcagagcctgggcccaaagccccggggccagcacagcgcagggagcaaactgctgcagggacagagtatccggcagggccctgggagaatgtgggcgggggccggccggcatgcgcacgtgttgtgcctgtgggtgtgtgcatgtctgtgtacgcgtgtccatctgttgtgtgcctgtgggtagtgtgcccgtgtgtgtgtgtgcctgtagtcagtgttctctttgtgtgcctgtgcatgtttgtacatgtgtgtccacatatgtttgtgtgtgggtccatgtctgtgtatgtgtgtgcccatgggttagcacgtctctgtgtgtccatgtgtttgtgtgtgtccgtgtctgtccatgtgtatccacacatgcctgtgtgctgcctgtatacgtgtggccttgctttcagctttctttctggaagcagtaggaggaatggcaagtctgaggtcagcctgctgtgagcagctgcagggaattcaggggtttctagaagccactgaggcacgcaggtgggtgaggcaggggtgggggctgtggaggaaggtgttctgcaggggaggcgcagggtgggtgcagcacagccgccaccccagtaggccagagcatcgtgcactcaggaccagtatcttttgaatggatctttttatttctaattttataagatgcaacatctcaccccgttgacacggttagtttgcatgcacacacagagcggccagccgccccgagcctgtgggcaggccagcagggtcagtagcaggtgccagctgtgtcggacatgaccagggacacgttgtacagggtgggtttaccggtggacttgtcca

SEQ ID NO: 13260 - DNA, 2300 bp, Homo sapien
acatatgtttgtgtgtgggtccatgtctgtgtatgtgtgtgcccatgggttagcacgtctctgtgtgtccatgtgtttgtgtgtgtccgtgtctgtccatgtgtatccacacatgcctgtgtgctgcctgtatacgtgtggccttgctttcagctttctttctggaagcagtaggaggaatggcaagtctgaggtcagcctgctgtgagcagctgcagggaattcaggggtttctagaagccactgaggcacgcaggtgggtgaggcaggggtgggggctgtggaggaaggtgttctgcaggggaggcgcagggtgggtgcagcacagccgccaccccagtaggccagagcatcgtgcactcaggaccagtatcttttgaatggatctttttatttctaattttataagatgcaacatctcaccccgttgacacggttagtttgcatgcacacacagagcggccagccgccccgagcctgtgggcaggccagcagggtcagtagcaggtgccagctgtgtcggacatgaccagggacacgttgtacagggtgggtttaccggtggacttgtccacggtcctctcggtgaccctgttgggcagggcctcatgggccaccacgcaggtgtaggtctcccccgtgttccattcctcttcggacacggtcaggatgctgtgggcgaagtaccggcctggggcctggggctcaggcattggggcgctggtcacatacttctccggggacaagggctgccccctctgcatccactgcacgaagacgtccgcgggagagaagcccgtcaccaggcacgtgatggtggccgactcccgcaggttcagctgctcccgggctggtggcagcaagtagacatcgggcctgtgcagggccacccctgtgaacagagatggtggtgagggcggggcagtggggggaccagcctgtgggctggggttgagtccccttttccccagttgcccagacaacgggggagtgaggggtgctttccaccatgccccagaggccaagggaggtcccagggagtgcaggaagaggggcaagagtggggcctacccttgggccgggagatggtctgcttcagtggcgagggcaggtctgtgtgggtcacggtgcacgtgaacctctccccggaattccagtcatcctcgcagatgctggcctcacccacggcgctgaaagtggcattggggtggctctcggagatgttggtgtgggttttcacagcttcgccattctggcgggtccaggagatggtcacgctgtcataggtggtcaggtctgtgaccaggcaggtcaacttggtggacttggtgaggaagatgctggcaaaggatggggggatggcgaagacccggatggctgtgtcttgatctggagtcaagagaagggagtcagaggtggggcaggtgtggatgtgggcggaggcatggttcccacccaaagagtagcaactgcctctgccgagcccaggggtcctgccgcccgagcccctgcccttggccgctctgggaagccaaggctcagggagtagatggctgcatccggggtggcgaatgccagacccgagtggacccctgtgtgtcggtgggtgctgcccctggggacaggtcactcaccggggccacacatggaggacgcattctgctggaaggtcaggcccctgtgatccacgcggcaggtgaacatgctctggctgagccagtcgctctctttgatggtcagtgtgctggtcaccttgtaggtcgtgggcccagactctttggcctcagcctgcacctggtccgtggtgacgccagaccccacctgcttcccctcgcgcagccaggacacctgaatctgccggggactgaaacccgtggcctggcagatgagcttggacttgcgggggttgccgaagaagccgtcgcggggtgggacgaagacgctcactttgggaggcagctcggcaatcactgcagtgagggacacgtgtcagcccggtgcccgccactcccgcccccttcggctccctctctgtcccggtggctgggcccggccctcacctggaagaggcacgttcttttctttgttgccgttggggtgctggactttgcacaccacgtgttcgtctgtgccctgcatgacgtccttggaaggcagcagcacctgtgaggtggctgcgtacttgccccctctcaggactgatgggaagccccgggtgctgctgatgtcagagttgttcttgtatttccaggagaaagtgatggagtcgggaaggaagtcctgtgcgaggcagccaacgg

SEQ ID NO: 13261 - DNA, 2300 bp, Homo sapien
ctgtgtcgggctgagccaagctgggccgagctcagcagagctgagccgagctgagcttagctgggctgagctaaccagggctgggctgagctgggctgagctgagctgagctgaactgggctgaacgggctgaggcgagcagggccgagctgagcagagctaagccgaggctgggctgggctaacctgggctgggccgagctgagcagagctaagccgaggctgggctgggctaacctgggctgggctgagctgagctgggttgggcagggctgggctgggctgagctaagctgaactagggtgagctgggccgagccaggctggtttgggctgagttgagctgacctggactggggctgagctaacctgggctgggctcagctgagctgagctacgctgggctgggctgggctgagccgagctgaactgggctgagcaggttgtatcaggctaagccaagctgggccaagctcagcagagccaagccgagctgagcttagctgggctgagctaaccagggctgggctgagctgggctgagctgagctgagctgaactgggctgaacgggctgaggcgagcagggccgagctgagcagagctaagccgaggctgggctgggctaacctgggctgggctgagctgagctgggttgggcaaggctgggctgggttgagttgggctgagctaagctgagctagggtgagctgggctgagccaggctggattgggctgagttgagctgacctcaactgagctgacctaggctgagctgagctgagctgaagtaggctgtgctgggctgagctgggatgacctgggctgggctgagctgatttgggctgggttgagcagacctgggctgagccgggttgagctgagctgaaccaggatgagctgggctgagctgagctgggctgggtggtccaggctgggctgacctggaccaggctgggccaggttgagctgggctaagccgagctgagctgagctgagctgggatgatctgggctgggctgggctgggctgagctgacctgggctgggctgggctgagctgagctgagctgagttaagctgagctgagctgaactgggctgtgctgagctaggctgggctgggctgagctgggctgggctgggctgagccagattgtgcctggctgaactgagctgggctaagctgagctgggctgagctgggctgagctgagctgggctgagtggggcggggctgagctgagccggactgggctgggctgggctcagctgagctgagctgaactgggctgggctgaactgggctgggctgagctgagctgaactgggctgggctgaactgggctgggctgagctgagcttggatgagctgggctgaactgggctgggttgagctgggctgggctgagttgagccaggctgatctgggctgagccgagctgggttaagccgagctgggttgggctgggctgggttgggctgggctgagccggactgggttgggctgagctgagctggactgggctgagctgagctggtctgggctggctgagctgagctgtgttgagccaagctaggctgggctgggctgagctgggctgaactgggctgagcggagctgagctgagctgggctgggttgagcagagctgggggctgagctgggctgggctgggctgagttaagctgggctgacctgggctgagttaagctgggctgacctgggctgagctaagctgggttgagccgatccgggctgggctgggctgggctgagccaggctaggttgagctgggctgggctgggctctgctgtgctgtgctgaacagggctgagctgaactgagctgagctgggctgagctgggctctgctgtgctgtgctgagcagggctgagctgaactgagctgagctgggttgagctaagctaggctgggctgggctgagctgggatgagctgggctgggctgggctgggctctgctgtgctgtgctgaacagggctgagctgaactgagctgagctgggctgagctgggctctgctgtgctgtgctgagcagggctgagctgaactgggctgagctgggctgagctgggctgagttgagcagagctgggttgagcagagctgggctgggctgggctgagttgagccaggctgacctgggctgagccaagctgggttgagccaaactgggctgggctgggctgagccaggctggattgagctgggctgggctgggctaagctgagccgagcaaggttgagcgagctgggctgggttgggctgagctgagctgggctggg

SEQ ID NO: 13262 - DNA, 2300 bp, Homo sapien
cacattctggaggatttattcagatctgtgctgcaaatgcatttcactgattctctctttagctgtgtctacatcagctgttaagcatcccatgatgcagcattgtgggcacagggcaaactttcaaaagatgacagtgtaggatagcggctgctcctccttccctgtgctcttcccacactgtcctcctgggctcactcccagccattgatcctgaataccagtttatggaactctctgcacaggaaagcagaaacagcaaaaggccctgctcaggctctgcccacatcccctcttgcacacctgccaaagctctttccttggggcctgtgcaagcttcccagctgcttctcattttctgtttactctgctcactggctggtggggtgatgtcttggggagagtctggtgcattttgggcattgatggacacccctaggccatacttcccagatgctcccccagcccctcagccccaggagtgggtgcgtttgcagtagggctttaggaatggggttgtgtcactgtgggaatagcagtcaccaccacaatatgctcacagtgacacgaacccccacaaaatcctcctgtccctacaggagactggtgtcaccgagtctcctcttgctggctctggcctggctctcctgctgagactgtgcattccagcgggttgttgtctgaaactgagcctgtctcagagaggactctgagcccagtgctgtacagggggctcctcctttgtcctgggggagttgcgtggaccctgtttttggtcaagggaagcatttgatggtgaaggagacctcccctcctctctttctcaggagccccctctgatgctgttgcctagtgtttcttggggctggtgctgggggctcagcagtgtctgccctgttccaggtgggactgtgggtctgttctgtttccacggggtgttctggggccgccagtgaggggctcgggatgttagcggctggtctctgtccctatggtctgggctccggttcactgctcccctgccctccaggtcggtcactgactcggttactatccagcgacctccgtggctgttcagtggtggctgcaggtctcttcccaggagaggcctgcgagagggctgggctgtctgggagccctgcattctcccgtgatgttgctgcctggatccctcatctttagagggagtgcggagcctccctgcaggtgcaggcagtgagagacacaggcggacgtgtgtcaaggcactggaggccgatttctttcagtgccttctgcctgtggaagagctgagctccctgcttctgcgcacaggaggctcccgtgtaaccaggcagtgagggcaagggcctgcatggggaagacttgggtgagcctttgtcctggaaataccagggccgggtctgagagggaggggagcgtggtcagagtgtccaggaggaaggtgatggcatgggcagtgtgtgggtgggagtgtagggtcagtgccatggctcaagggctccaggagaggaagaactcaagttgtgggcaggaggggttagggggtgggcacaggtaggaaaacctgaggctcttgtggcagaagagcggagggcctgcaggtgcagagttggcctgggaggggtgtttagagggagggacaggggtctggttgcagatcagggtgaggactgcagggtcacgtacccagggttgtttgggtgggcggcaagtgcagcaggtagaaaaggcccgaggcagggtggggtctccccagcgtgtgggctgcagggaggggctgcacagggtgttccccagaaggagggagcacagaggcactgggagggaatggagagggaaatggcagtgaccctagtgccaggcagtcccggtttggggttgatctgtgtgggaacagctccctggcctgtgtgtaagtggtggcaggaaggcaggtcccgccctggggtctggagcttatcttcttcctgtgagctgtgtgtgggtggctcctgtgggctgtgccctggacctgtggtctggtggagcccaggcttcccaggaacggcagtgctgtctgggctggagcagccttagatgccaggtcagggtggccctggggccactgcctccagctgtgtctagtgctgcagggatctcggcatgaggccccttctcccaggaggggaggcacgtgagtgagaccctaagtccataccccatggtggcttggccctcctgcagagggtctgggcagtggtaggtggctgtgtgcagatggggggtggggggtggggaggttagcccctcccagacgc

SEQ ID NO: 13263 - DNA, 2300 bp, Homo sapien
cccaagccactcactggtggtcccacaacaccccatggaaagaggacagacccacagtcccacctggaccagggcagagactgctgagacccagcaccagaaccaaccaagaaacaccaggcaacagcatcagagggggctctggcagaacagaggaggggaggtctccttcaccagcaggcgcttcccttgaccgaagacaggatccatgcaactcccccaggacaaaggaggagccccttgttcagcactgggctcagagtcctctccaagacacccagagtttcagacaaaaaccccctggaatgcacagtctcagcaggagagccagccagagccagcaagatggggctcagtgacacccgcagggacaggaggattttgtgggggctcgtgtcactgtgaggatattgtactaatggtgtatgctatacccacagtgacacagccccattcccaaagccctactgcaaacgcattccacttctggggctgaggggctgggggagcgtctgggaaatagggctcaggggtgtccatcaatgcccaaaacgcaccagactcccctccatacatcacacccaccagccagcgagcagagtaaacagaaaatgagaagcaagctggggaagcttgcacaggccccaaggaaagagctttggcgggtgtgtaagaggggatgcgggcagagcctgagcagggccttttgctgtttctgctttcctgtgcagagagttccataaactggtgttcgagatcaatggctgggagtgagcccaggaggacagcgtgggaagagcacagggaaggaggagcagccgctatcctacactgtcatctttcgaaagtttgccttgtgcccacactgctgcatcatgggatgcttaacagctgatgtagacacagctaaagagagaatcagtgagatggatttgcagcacagatctgaataaattctccagaatgtggagcagcacagaagcaagcacacagaaagtgcctgatgcaaggacaaagttcagtgggcaccttcaggcattgctgctgggcacagacactctgaaaagccctggcaggaactccctgtgacaaagcagaaccctcaggcaatgccagccccagagccctccctgagagcctcatgggcaaagatgtgcacaacaggtgtttctcatagccccaaactgagagcaaagcaaacgtccatctgaaggagaacaggcaaataaacgatggcaggttcatgaaatgcaaacccagacagccacaagcacaaaagtacagggttataagcgactctggttgagttcatgacaatgctgagtaattggagtaacaaagtaaactccaaaaaatactttcaatgtgatttcttctaaataaaatttacaccctgcaaaatgaactgtcttcttaagggatacatttcccagttagaaaaccataaagaaaaccaagaaaaggatgatcacataaacacagtggtggttacttctgctggggaaggaagagggtatgaactgagatacacagggtgggcaagtctcctaacaagaacagaacgaatacattacagtaccttgaaaacagcagttaaacttctaaattgcaagaagaggaaaatggacacagttgtgtttagaaaattctcagtccagcactgttcataatagcaaagacattaacccaggtcggataaataagcgatgacacaggcaattgcacaatgatacagacatatatttagtatatgagacatcgatgatgtatccccaaataaacgactttaaagagataaagggctgatgtgtggtggcattcacctccctgggatccccggacaggttgcaggctcactgtgcagcagggcaggcgggtacctgctggcagttcctggggcctgatgtggagcaagcgcagggccatatatcccggaggacggcacagtcagtgaattccagagagaagcaactcagccacactccccaggcagagcccgagagggacgcccacgcacagggaggcagagcccagcacctccgcagccagcaccacctgtgcacgggccaccaccttgcaggcacagagtgggtgctgagaggaggggcagggacaccaggcagggtgagcacccagagaaaactgcagacgcctcacacatccacctcagcctcccctgacctggacctcactggcctgggcctcacttaacctgggcttcacctgaccttggcctcacctgacttggacctcgcctgtcccaagctttacctgacctgggcctcaactcacctgaacgt

SEQ ID NO: 13264 - DNA, 2300 bp, Homo sapien
ttaagcatcccatgatgcagcagtgtgggcacaaggcaaactttcgaaagatgacagtgtaggatagcggctgctcctccttccctgtgctcttcccacgctgtcctcctgggctcactcccagccattgatctcgaacaccagtttatggaactctctgcacaggaaagcagaaacagcaaaaggccctgctcaggctctgcccgcatcccctcttacacacccgccaaagctctttccttggggcctgtgcaagcttccccagcttgcttctcattttctgtttactctgctcgctggctggtgggtgtgatgtatggaggggagtctggtgcgttttgggcattgatggacacccctgagccctatttcccagacgctcccccagcccctcagccccagaagtggaatgcgtttgcagtagggctttgggaatggggctgtgtcactgtgggtatagcatacaccattagtacaatatcctcacagtgacacgagcccccacaaaatcctcctgtccctgcgggtgtcactgagccccatcttgctggctctggctggctctcctgctgagactgtgcattccagggggtttttgtctgaaactctgggtgtcttggagaggactctgagcccagtgctgaacaaggggctcctcctttgtcctgggggagttgcatggatcctgtcttcggtcaagggaagcgcctgctggtgaaggagacctcccctcctctgttctgccagagccccctctgatgctgttgcctggtgtttcttggttggttctggtgctgggtctcagcagtctctgccctggtccaggtgggactgtgggtctgtcctctttccatggggtgttgtgggaccaccagtgagtggcttgggatgtcagtggctgtcctctggccctatggtgtgggctcgggctcactgctcccctgcctccaggtctggcaatgactccgttactacccatcggcctccagggaggtttggtgttagactccgttgactgggcgtcttcaggtctcttcccaggagaggcctgtgagaggactgggatgtctggtagccctgcattctcctgtgatgctgctgcctggatccctcgtctttagagggagtgccgagcctccctgcaggtgcgggcagtgagagacacaggcagacgtgtgtcaaggcgctggaggccgatttctttcagtgccttctgcctgtggaagggctgagctccctgcttctgtgcacaggaggctgccctgtaaccgggcagtgagggtaagggcccaggcctgcatgggaaagacttgggtaaggctttgtcccagaaataccagagccaggcctgagaggggagtggggctggagtggccaggaggaatgtgagggcatgggcagtgtgtgggtgcgagggcacggtcaatgccatccctcaggggccctaggagaggaagagctcgagctgtgggcaggaggagcacgggggtgggcacaggcaggagaaactgagggtctttggcagtggaggggagggcctgcaggtgtagggttggcctgggagaggtgtttagagggaggaagacgggtctaggtagagaactgggtgggggctgtagggacaggaccccagggctgtcttggtgggtggcaagagcagcgggggagaaagggctggaggagggtcaggtctccccagggtgtgggctgcagggtcgggtctccccagggtgtggactgcagggaggagctgcacagggtgctcccccgaaggaaggaggagggaggaagcacagaggcattggaagtgaatggagaaggaaatggcagtgacctgagtgccaggtggtccccgtctggggttggtctgtgtgggaacagcttcctggcctgtgtgtaagtggacgggggagggcaacgaggtctggggcaggaagtcgtagcagcaaggcaggtcccgggcctgggggtctggagcttatcttcttcctgtgagctgtgtgtgggcggccccagtgtgggcggtgccctagacctgtggtctggtggagcccaggcctcccagggacagcagggcagccagggctagaggagcctgaggggccaggtcagggtggccctggggccactgcctctacctgtgaccagcgctgctggggggatctgggcatgagaccccttctcccaggaggggaggtgcgtgagtgagaccctaagtccatatcccatgggggctctgaccctcctgcagggggcccgggcaagggtgggtggggtgtgcaggtgggggtgggggtggg

SEQ ID NO: 13265 - DNA, 2300 bp, Homo sapien
ccacagaggatgaacccagcaccccgaggatgtcctgccagggggagctcagagccatgaaggagcaggatatgggacccccgatacaggcacagacctcagctccattcaggactgccacgtcctgccctgggaggaacccctttctctagtccctgcaggccaggaggcagctgactcctgacttggacgcctattccagacaccagacagaggggcaggccccccagaaccagggatgaggacgccccgtcaaggccagaaaagaccaagttgtgctgagcccagcaagggaaggtccccaaacaaaccaggaagtttctgaaggtgtctgtgtcacagtggagtatagcagctcgtcccacagtgacactcgccaggccagaaaccccatcccaagtcagcggaatgcagagagagcagggaggacatgtttaggatctgaggccgcacctgacacccaggccagcagacgtctcctgtccatggcaccctgccatgtcctgcatttctggaagaacaagggcaggctgaagggggtccaggaccaggagatgggtcccctctacccagagaaggagccaggcaggacacaagccccctccccattgaggctgacctgcccagagggtcctgggcccaccccacacaccggggcggaatgtgtgcaggcctcggtctctgtgggtgttccgctagctggggctcacagtgctcaccccacacctaaaacgagccacagcctcagagcccctgaaggagaccccgcccacaagcccagcccccacccaggaggccccagagcacagggcgccccgtcggattctgaacagccccgagtcacagtgggtataactggaactaccactgtgagaaaagcttcgtccaaaacggtctcctggccacagtcggaggccccgccagagaggggagcagccaccccaaacccatgttctgccggctcccatgaccccgtgcacctggagccccacagtgtccccactggatgggaggacaagggccgggggctccggcgggtcggggcaggggcttgatggcttccttctgccgtggctccagtgcccctggctggagttgacccttctgacaagtgtcctcagagagtcagggatcagtggcacctccctaacatcaaccccacgcagcgcaggcacaaaccccacatccagggccaactccaggaacagagacaccccaataccctgggggaccccaaccctgatgactcccgtcccatctctgtccctcacttggggcctgctgcggggcgagcacctgggagcaaactcaggattaggggacaccactgtgggcctgacctcgagcaggccacagacccttccctcctgccctggtgcagcacagactttggggtctgggcagggaggaacttctggcaggtcaccaagcacagagcccccaggctgaggtggccccagggggaaccccagcaggtggcccactacccttcctcccagctggaccccatgtcttccccaagataggggtgccatccaaggcaggtcctccatggagcccccttcaggctcctctccagaccccactgggcctcagtccccactctaggaatgcagccaccacgggcacaccaggcagcccaggcccagccaccctgcagtgcccaagcccacaccctggaggagagcagggtgcgtctgggaggggctgggctccccacccccacccccacctgcacaccccacccacccttgcccgggccccctgcaggagggtcagagcccccatgggatatggacttagggtctcactcacgcacctcccctcctgggagaaggggtctcatgcccagatccccccagcagcgctggtcacaggtagaggcagtggccccagggccaccctgacctggcccctcaggctcctctagccctggctgccctgctgtccctgggaggcctgggctccaccagaccacaggtctagggcaccgcccacactggggccgcccacacacagctcacaggaagaagataagctccagacccccaggcccgggacctgccttgctgctacgacttcctgccccagacctcgttgccctcccccgtccacttacacacaggccaggaagctgttcccacacagaccaaccccagacggggaccacctggcactcaggtcactgccatttccttctccattcacttccaatgcctctgtgcttcctccctcctccttccttcgggggagcaccctgtgcagctcctccctgcagtccacaccctggggagacccga

SEQ ID NO: 13266 - DNA, 2300 bp, Homo sapien
tgtaaattttatttagaagaaatcacattgaaagtattttttggactttcctttgttactccaattactcagcattgtcatgaactcaaccacagagtcacctgtaaccctcactgttgtccttctggctgtctgggtttgcatttcatgaacctgccatcgtttatttgcctgttttccttcagatggctgtttgcttcattctcagtttggggctatgacaaacatatgttctgcacatctttgcccatgaggctctcagggagggctctggagctggcattgcctgcagggctctgctttgttgcagggagttcctgccaaggcttttcagagtgtctgtgcccagcctgaaggtacacactgtactttgcccttgcatcaggcactttccttgtgcttgcttctgtgtggctccacattctggagaatttattcagatctgtgctgcaaatccatttcactgattctctctttagctgtgtctacatcagctgttaagcatcccatgatgcagcattgtgggcacagggcaaactcttgaaagatgacagtgtaggatagcggctgcttctccttccctgtgcccttcccacactgtcctcctgggctcactcccagccatcgatcttgaacaccagtttatggaactatctgcacaggaaagcagaaacagcaaaaggccctgctcaggctctgcccgcatcccctcttgcacacccgccaaagctctttccttggggcctgtgcaagcttcccagctgcttctcattttctgtttactctgctcactggccagtggggtgatgtctgggggggagtctggtgcgttttgggcattgatggccacccctaggccctacttcccagacgctccccccagcccctcagctccagaagtggaagcgtttacagcagggctttgggaatggggctgtgtcactgtgggcatagcagctggtactactacaatatcctcacagtgacacgagcccccacaaaatcctcctgtccccgcgggagtcactgagtcccctcttgctgtctctggctagttctcctgctgatactatgatttccagggggtttttgtctgaaactcagggtgtgttggagaggactctgagcccagtgctgtacagggggctcctcctttgtcctgggggagttgcgtggaccctgtttttggtcaagggaagtacttgctggtgaaggagacctcccctcctttctttctcaggagccccctctgatgccgttgcctggtgtttctcagggctggtgctgggggctcagcagtgtctgccctgttccaggtgggaatgtgggtctgttctgtttccacgcggtgttctggggccgccagtgaggggctcgggatgtcagcggctggtctctgtccctatggtctgggctccggttcactgctcccctgccctccaggtcggtcactgactcagttactatccagcgggctccgtggctgttcagtggtggctgcaggtctcttcccaggagaggcctgcgagagggctgggctgtctgggagccctgcattctcccatgatgttgctgcctggatccctcgtctttacagggagtgccgagcctccctgcaggtgcgggcagtgagagacacaggcggacgtgcatcagggtgctggaggccgatttctttcagtgccttctgcctgtggaagggctgagctccctgcttctgtgcacaggaggctgccgtgtaaccgggcagtgagggcaagggcctgcatggggaagacttgggtgagcctttgtcctggaaataccagggctgggtccaagaggggagcagggtcagagtgtccaggaggaaggtgagggcatgggcagtgtgggggtgggagtgcacggtcagtgccatggctcaggggccccaggagaggaagagctcgagttgtgggcaggaggaggcagggggtaggcacagagggtagaaactgaggctctggcagcagaaaaggggagggcctgcatgtgcagggttggcctgggaggggtgtctggagggagagacaggggtctgggtggagaccagggtgtaggctgcagggatgggaccccagggttgtctggatgggcaggaagagcagcgggggagaaagggctggaggcagggttgggcctccccagggtgtggggtgcagggaggggctgcacaggctgttcccctgaaggagggaggagggagggagcacagaggtgctgggagcaaatggagagggaagtggcagcggcccgagtgccaggcggtcccggtttgg

SEQ ID NO: 13267 - DNA, 2300 bp, Homo sapien
acagcacgcatggaggatctgaggtgccacacctgacgcccaggccagaacatgcctccctccagggtgacctgccatgtcctgcattgctggagggacaggggcagcctatgaggatctggggccaggagatgaatcctattaacccagaggaaaactaacaggacccaagcaccctccccgttgaagctgacctgcccagaggggcctgggcccaccccacacaccggggcggaatgtgtacaggccccggtctctgtgggtgttccgctaactggggctcccagtgctcaccccacaactaaagcgagccccagcctccagagcccccgaaggagatgccgcccacaagcccagcccccatccaggaggccccagagctcagggcgccggggcagattctgaacagccccgagtcacggtgggtacaactggaacgaccaccgtgagaaaaactgtgtccaaaactctctcctggcccctgctggaggccgcgccagagaggggagcagccgccccgaacctaggtcctgctcagctcacacgacccccagcagccagagcacagtggagtccccactgaaccccactgaatggtgaggacggggaccagggctccagggggtcatggaaggggctggaccccatcctactgctatggtcccagtgctcctggccagaactgaccctaccaccgacaagagtccctcagggaaacgggggtcactggcacctcccagcatcaaccccaggcagcacaggcataaaccccacatccagagccgactccaggagcagagacaccccagtaccctgggggacaccgaccctgatgactccccactggaatccaccccagagtccaccaggaccaaagaccccgccccggtctctgtccctcactcaggacctgctgcggggcgggccatgagaccagactcgggcttagggaacaccactgtggccccaacctcgaccaggccacaggcccttccttcctgccctgcggcagcacagactttggggtctgtgcagagaggaatcacagaggccccaggctgaggtggtgggggtggaagacccccaggaggtggcccacttcccttcctcccagctggaacccaccatgaccttcttaagataggggtgtcatccgaggcaggtcctccatggagctcccttcaggctcctccctggtcctcactaggcctcagtcccggctgtgggaatgcagccaccacaggcacaccaggcagcccagacccagccagcctgcagtgcccaagcccacattctggagcagagcaggctgtgtctgggagagtctgggctccccaccgcccccggcacaccccacccacccctgtccaggccctatgcaggagggtcagagccccccatggggtatggacttagggtctcactcacgcggctcccctcctgggtgaaggggtctcatgcccagatccccacagcagagctggtcaaaggtggaggcagtggccccagggccaccctgacctggaccctcaggctcctctagccctggctgccctgctgtccctgggaggcctggactccaccagaccacaggtccagggcaccgcccataggtgctgcccacactcagttcacaggaagaagataagctccagacccccaagactgggacctgccttcctgccaccgcttgtagctccagacctccgtgcctcccccgaccacttacacacgggccagggagctgttccacaaagatcaaccccaaaccgggaccgcctggcactcgggccgctgccacttccctctccatttgctcccagcacctctgtgctccctccctcctccctccttcaggggaacagcctgtgcagcccctccctgcaccccacaccctggggaggcccaaccctgcctccagccctttctcccccgctgctcttcctgcccatccagacaaccctggggtcccatccctgcagcctacaccctggtctccacccagacccctgtctctccctccagacacccctcccaggccaaccctgcacatgcaggccctccccttttctgctgccagagcctcagtttctaccctctgtgcctaccccctgcctcctcctgcccacaactcgagctcttcctctcctggggcccctgagccatggcactgaccgtgcactcccacccccacactgcccatgccctcaccttcctcctggacactctgaccctgctcccctcttggacccagccctggtatttccaggacaaaggctcacccaagtcttccccatgca

SEQ ID NO: 13268 - DNA, 2300 bp, Homo sapien
tgctttttatgtcttcacaagttttttcctttcaaaattaattttccaattgtttggtgctaatatgctcaaatgtccttgattttcttagtttgaacagtccgtttttgttttggggatttatttttttttcagattctttaagattttctatgtctataaccatataatctctgaacagagacagttttgctttttcctttcaacttgaggtaggttttctgggtagttcaggacgcgcaggcactgggtgggtggtgttagcagctgcacgatgccttggagaggacactctcgggggactgtggccgctgctcagctgtgaccgttcttatagcaccagcagctgcggccaccattcttatccaatttccaaagccacaccacaggccctctcaagaacgaggcgtggaggctatgccctctcctggacacatcatcattcccaagccccacgatgtgggccccatgggacgcacacctttgtctgtccagacctcagccccacctcctcatcctgcaccagaactcttcagagcccagtgcatgaaatgggctaccaaggaaatgagggtaggttcctgagaggaaactggccctgcatttgggagctaggagtctgctaattcgcctggcagccctgtgcagccctccgtggctacagtccaccccgtgcccatcagtgcctccttcctgtgcaagcctggacctcgccctgggctcaggatgggctgtagaccgagaatgcaggcgggaaagtctttgtctatcggggccatagtcaggttctacagtgagtcagggaaagacctgtggaggtgtggatgaggacaatgggtccaccatcaacaggaggacacgggttcgaccccttgcagaggcacagtcccacatcactgggaggcagccacactcactgcctcgccctctcctcacacagtgcagtttccacgttcacagccccagccagtcaccaggaatgccctgggggcggcctttccccagtgcactccgagccctcccttggctgtgcggtgagctccatgcccaggagatatccacccatagtcctccggaaagcagctgacctgccatgccctggaaccacaaatccccacagatcagccagcctgcagtgggccttggatgtggtgaggagtggtggcacccccgttcccaccccacagatgcaacgcctgtgggtgacgcatgtgagtactgaggagtagagggtagaactgtaggccccgagaaccacagaaactcgggtgttacactctggggccatgtaaggagaaagtgtcactggacagaaacaggcccctcctagacactgtgtgcgccatagtcacctgtcattagctctcactcttgcagattcatgattgaggtggttaaaaaaaaaaaagctcctactcacccatccaaccccatcctggggtgtttccaccacccttggggtttgggatgagctgcccttgcccactgtgctctgtggacctccctttagaagctcacagctccctgcactcggctccatcctgccccaccacacagaagcaaaacccctctcctttccactgcaggcttttcctggaccagaatgctgacctgctgcccttcactcccgaagtggtgggactgcctggggtggtgtgggtgttgagccttcttactctagggacctggcacctggccccaggggcacagggatggtgcatctgcctagggatgcctcctcatgccagggggtgggggttagtaccatcggccctcaggatttgttgcatgaatgagtgaatgggtgaataaatgaaggggatctgatctatgaataagggtatatagactttggttgatgtaggacgccaaatgctggaatttcagagtcatcacacccaggggccctgcctctgagctcctctttgcatccaatctgctgaagaacatggctctagggaaacccagttgtagacctgagggccccggctcttcaatgagccatctccgtcccggggccttatatcagcaagtgacgcacacaggcaaatgccagggtgtggtttcctgtttaaatgtagcctcccccgctgcagaactgcagagcctgctgaattctggctgaccagggcagtcaccagagctccagacaatgtctgtctccttcctcatcttcctgcccgtgctgggcctcccatggggtcagtgtcagggagatgccgtattcacagcagcattcacagactgaggggtgtttcactttgctgtttccttttgtctccaggtgtcctgtcacaggt

SEQ ID NO: 13269 - DNA, 2300 bp, Homo sapien
gcttctctcagggaagggtgcatgtggggacaggtgtgcacatcggagagaatggtccacctggggacaggtgttcttgcctcagggaagagtccaccttctcagggaagaagtgtgctcctctgagggaagggtgcacatggggacaggtgtgcttgtctcagggaagggtccatgtgggaacaggtgagctcatctgagggaagagtccacgtggggacaggtgagctcatctgagggaagggtccacatggggacaagtgacctcgtctgagggaagggtccacgtggggacaggtgagctcgtctgaaggaagggtccacttggggaccggtgtgctcctctgagggaagggtccacgtggggacaggtgtgctcctctggagggaagggtccacgtggggacaggtgagttcatctgaaggaagggtccacatggggacagttatgctcctctgagggaagggtccatgtggggacaggtgtgcttgtctcagggaaaggtccacgtggggacaggtgtgctcaccttggggaagaggacagatgagctcatctcagggaaggggccatgtggggacaggaccaagggttgggacttcagcacaagaatttaggaggaacacagtcttccctagcagcctccttcagggatgtcaaatattttccttctgttccctgtgaaagccttaaaggggtagggaaagggcgttcaacctgcacactcgtagaggggaaaccagcttcattagtaatcgttcatctgtggtaaaaaggcaggatttgaagcgatggaagatgggagtacggggcgttggaagacaaagtgccacacagcgcagccttcgaaacacaccacggtcacgttaagtttaaatggagtgaccacattcgccaggaaagggaaatatttacacttttgaagaaacagtaatttgtgtttctgattatgatctggccttggattttccctcccctcataagcaatgacagaattggcagaaatatgtgaaacgttagttctcagacatgagacacccacagagggccccctgtgcccttccctgagagctgatcagctcctgcatctgaagaaatgaccaaagaccaggagagaaccacacagaagcatcggagggacagcacctggggctctgatggggtcaggaatagcatctgttcccaatagatggactaagtaaaaagtatcataattcacaagagttttacatagcacagaagaaaaagttaccctatatcaactgttgatcttgtgaatccaggaactctggattcaaggtggtcgggcacatcttgatttacgcatttcagggacacatgagacatcagtcaatataagtaagaaggacattagttccatccagaaaggctgagacaactcaaagcaagtcctccccacttagggcttccaggtcacaggtaggtgagagacagatggttgcattcttttgagtttctgataagtgtttgcaaaggaggccatgaggatatgcacctgtctctgtgagcagagggacaactttaaatagactgggaggcagatttgtcctgagtggtttccagcttgacggggcccaagatattttcctttcacaatctggtaacttcaaacaaaacttcaaagccacaacaaaacaacacaacaacaaaaagaataagacatgggtacttattaagagtagaaaaacattcagtccccaaggaaaatattggcagtgtctacctccacatgacaaaggagtaagcagtgtgagccacagaaaggagcactattaacccacagagcaaccgagaataacacgggtgatgcgagggcattggacgcacatcattgcattttgtagattcagaaagaaacggaaaagattgacggtggtaaaagagacagccctgcttccctctcccttttccctccccgatgaggcctcacagccatgaccctcagcctcatcccgcagtgcagcagctgccgtcctgtccaggcccaccccctgccccgccctgggactgttacctcattccctcccggagtccaggtgccccccggggtgtggtgcgggagcctggggaggccctttgttctctgtcagggtctccctgggagggacgcagccaccgcagctggttggggcctggcttcgcccaggacagtcctttcctttcccattgtctttggatgactatcgctgggctgggacatgaggcgggcagaggcgcgggtcacccttaggacccccctcttgctgctggggctctgggcgctcctggctccggtccg

SEQ ID NO: 13270 - DNA, 2300 bp, Homo sapien
atttttatatattatacatacatatcaatatatgatatataatatgtatatataatatataatatgtatattcatatattatataatatgtatattgatatatattacacatatatattttgatatatatatatctccaaaccatctaaatatcaagtattttttaatccatctaagagctgaaattgctgaaaaaactactccctccaaaagctgtagagacaggcacatccacagtcacagcagagacttgctgacttggaagagaagctcctggagacacattggtgagaacatttacctggtgattatgctgaatgtctggaggacaaatgtggactagggggagggtgagcactcctagaggctgtacaccccacacttgtgtggacttgccctccagggccttcaggttctcgtggaagcaattaaaatagattccctatagccatgaactggggaggagtaatcacggagaaaagatgcacaaaaagacttttctagaaagctcatccaagggaaggtattctccaaaatcttagtttatgtgggggaaggaaatacttccaaattacagacccctcctcctcagccttcctctatcacgcaaatgataaaattagccaagaggagtcagattcaaggcggtagccctgggtgcagcatctgcagaagggaggaaagagagaaaatcagctgtatcactggagattccttgtgaaggtcactgctcaggagaagagggcaaccaaaccagggagagtcaactgtaagaacataccatgctcccctgccccacacattacctcctcaacagcatcattaatatggattaaagagggcagtgtgattgctttagatctgtttgagaaagaaagtcacatactgaggcctagggtcagggtcggcggcacttcccgtgagtaagatactacgaagaaggaaaaattaggggtccataactgtgaaaatcagccacagtgtgtgtgagaatgtttgtgtttgtgtttctgtgtgtttgagtaggagttattggaacagcggacgtggagtgagctttaatccacatccatctgcagcttcaggtattctcagatgcagtattcatctgcaagagccgaaatgagaaaagagccacctccaacccccccagagttttagcctccctttgtttccagtgatccagtgcatctagacctccaggaagtggactccctggtgattttagcgattcttctcttggagccaccctgaagaggacattgggtttccaaaggcccattcactatttcaagaagtggtgccatcagctcatgttgtcactgaaggagcattctgagccagggcacagtcacttcctagtgagctacagaggctgagagaaaaatgctctgtgagacccaatgggaagctccctgcagtgcaaggtctgggtggcagggagcgctagggcctcgcccagcacaggctgcagccctggagcaggtgcaagggaggctggggaggggttcctcccagggtctgatgtcttccttttctcggacaaacatgctttaataagttaaacaagactttagtaaagactattgatgtgtctttgtgtctttcagtatacagttctatttgtaggatttatctaacctaacaagtcaatgagaatcacatgtaaaaggagaaatttctaggattttcagatatcttaataggtaggagatggagaaaagggatggttttattaattcagtgcttgccaatcttaacagagacagtagtaagacatgcagaaagcaaagcccagaaaagtatgaaggtgtcaaagtgccatttaagtatgggttcacttggaggaccatgttctgcgggaacttgttttcagcagacaatctattttagcagagttctgggcatacaaggggacacacatcattaaacaaggattgggacagggacttcagcgtcccactgttgcatggcccataaattatgtgtgttctctttctcatcttggatcaagtctagagctatgaaatagtatccctcatgaatatgcaaataacctgagatttactgaagtaaatacagatctgtcctgtgccctgagagcatcacccagcaaccacatctgtcctctagagaatcccctgagagctccgttcctcaccatggactggacctggaggatcctcttcttggtggcagcagccacaggtaagaggctccctagtcccagtgatgagaaagagattgagtccagtccagggagatctcatccacttctgtgttctctccacaggagccca

SEQ ID NO: 13271 - DNA, 2300 bp, Homo sapien
gaacctcagcagatccgcacgttttcaatgggtccacttagctagtgtctgtcctcagccccatccctgggatcctgtcctggtgctgtgtacactgtcacaatagtggtgacagtgacagctggtgcctgcactttccaggccaagaagtttgaaagaagcaagtcacagggccagcctggatttggggcaaacacacaaatttcactctgtggggaagtgctgggaagcagccttgagtcctcctcagctcacgtgtggctgctgctgctcatcccaggtgggacacatgagccctccccatgcccaggatggagctgtttcagtcacagcaggatgggaatgtgtcttctctatgggggcttttgaagcacagctctcctgttcctgagatttgagatttataaagacaagtcccacagagtgaacctgcacaaataagacagtgcaggatccccaggagagacatcccatatgagaagggacaggcaggtcccatcactgacgctggtcctcagaaaccctgaccagctactgaccttcccaggtcccctgttcctggaacagttcgtgtgtctgctcctgaaaagatgcccatcaagagtccccagggttctgcccccttccttgatgtgcctctgggagtggggctggctgggctgtgggtctggcgtgaccctctccacaggtcagcggctcagtgcaggctgcaccgactcggtggggctgggctgtggctgaccctcccagggggagcctggactcttcttaggggtatctgcaggatcccaggttctgggagaacagggaagccacagtgtgtgcagggccccatctccagtaaagtgtttgctgtcgctctgttgacaagggcatatccccaggcctaggggcactgtgggcgcacgaccaatgcgcgagacacagggagtaaggcacagttccctcccattactgtgaggacactagacacagtgtgtgtgtgtgtgtgtgtgtgtgtgtgtgtgtgtgtgtgtgtgtgtccattactgtggggactctaaccaccgtgtgtgtgtgtgtgtgtgtgtgtgtgtgtgtgtgtgtattaggagttttgcagtggcctctgagacccatgatcttgcaggtttagaaattatctgatgagatgttcatccacaggaaccgacaagagattaggtgttctcccaaagcccctggaagctcctggactcactgtgagtgtggactgatccagtgcttccagagctccacagaaggggctccctggtggtttcatagaatccttgcttggggtgtttctgcagagttcactggctttcctacgaccaatttaccattgcaagcgatggcgtcagcagcacatggtgtcacgtgtcactaaaggagcattctgagccaggacacagccacttcatactggggggaaaatgctctgggagcccagacaggagcctctctgcagtgcaagggctgggctgcagggggcgctcaaggcccacccagcacaggctccagccccagagcaggtgcacaggaggctgcggatggagtccccttaagatctgtgtcattcttctaaaaaaatctaaaataagtatttgacaaaaactgctgaagagtccataaatatcctattcaactgcaagaatttatcaatttacactggagatttctaaccctgctacatatcttaatagtaagcatctggaggtcaattaagcttttattttatataaataagtgcaacttttggagaaacacactcatcccccaaataacacattcatgtattaaagcctagaaatattttaaattacctctgagctattcaagtgtgggttcccagtgaagtcctgttctagggaaaattgttctccagtgggagaagctctgtcaacatacagtttagggatatggcagggcacacatggcctctaaggggattatagcttgaacccttagcatcctcctgttgggtaatccatgtgtcatctctccactctttctcatgctgtgttaggtatgaaatagcatcgctcatgaatatgcaaataactgagatgactatagatatctttgtgccctgagagcatcacccaacaaccacatccctcctcagaagcccccagagcacaactcctcaccatggactggacctggaggatcctctttttggtggcagcagccacaggtaaggggctgccaaatcccagtgaggaggaagggatcgaagccagtcaagggggcttccatccactcctgtgtcttctctacaggtgtccactcccaggttc

SEQ ID NO: 13272 - DNA, 2300 bp, Homo sapien
aatattcctagtcatgttgagtttcatcaacttttccagtgttcaaatctagaaatccaatagactcttgaggataaatcaaaatgagggcagtgaaactggtatctgctcagcacctgttaactcaggaggactcaatacacccttgcacactgctgcttctctgaatggctcacaaggactccagctcactctccatcctcctcaaacatctggcccccacttgccctaagttgactctctgctcttagtctgtgctctgaagtcttcccagaggtgaaagtgagctgtcagatggaacttccctctcacctcagcgtggaatttactgctacatttaactatcactctttccataatggttgatttcttggtctgttcattacagatcaaaggcatctgatttgaatctttatttctttgcatttgtctccatgacaattttgggaggttttaccgccagcactatgacacgatgtagtaacatgacacatttgtggttaacaacacctacaaattcagaagctcttcggttgtcttcccagcaaatatagctgcttcttttctgtgtatgaacacatcctggaaacacgtacacacccacatagatatatacatgcctatgacattttcttctctgtaagtgaaaattaacctcaatttcatacgaagttcatcatttccctgaaggtgaaggtaggtcgtttttcatctgttctaacaaatgctcagacaccagctagtaagtgaggagctaccctgcttctggatgttggatctgtctcttcccctttgctttaccacagaagattggccacttgtccaggtcccaagaagagagtccaggtttgtcctgataatatgactcatccaacttctgataactctactgttacacacattcatggaggtagcctattaattacataattcactaaacaaataccaaatacccacattgcaataccccatacccaagggtatgttcatgcattcagtgaaggaaaaggcttttcagagacagatagatcaggctagattggtcaatatatgggtgaaaacactggacttgaatgtatctgttttcccccatgtcacatgtgagacctgtcagacaggaccagggttccttgtgcactcagaggtgagggctcacagaattcctctctggtttccaggaaaggtaactgcagtaatcttggtaatgagaatatcctccagtgctgacctattatagagtttacatatgaaattttcactgcaattcacaatctactctttcacacagaagtgtacagaggtcaggacacatcctcagggtcacacattgagaatgatgaagatatgtcccacgagtttttcctaaggtctcagaaagaattccaggactcaaaaggtctcagagggcagctcccagtgccttagttaaaatggtggctcaggcctgtaatcccagcattttgggaggccaaggcaggtggatcacctgaggtcgggacattgagactagcttggccaacatggtgaaaccttatctctactaaaaatataaaaattagacggggggggttgtgcatgcctgtactcccagctactcgggaggctgaggcaggagaatcacttgaacccaggaggcggaggttgcggtgagccgagatcaggacactgcactctagcctgggcaaaggagcaaaagttcatctaaaaaatttattttaatttaaaaatttttaaaaaatggcccactccctagaacagagagattccctctaaacatgatggaggtcccgaactatacattaagtgaatcctggtgtgtctgaactcacatgattattacgttaagctgctgttccaatctacttcctcacctgggaaaagaggagccagggcatggctagttgaggccccaggaagagaactgagttctcaaagggcaaagcaagcatcctcatcccagggtgagcctaaaagactggggcctccctcatcccttttcacctctttatacaaaggcaccacctacatgcaaatcctcactcaggcacccacaggaaaccaccacacatttccttaaattcagggtccagctcacatgggaaatactttctgagactcatggacctcctgcacaagaacatgaaacacctgtggttcttcctcctgctggtggcagctcccagatgtgagtgtctcaaggctgcagacatggggatatgggaggtgcctctgatcccagggctcactgtgggtctctctgttcacaggggtcctgtcccaggtgcagctgcaggagtcgg

SEQ ID NO: 13273 - DNA, 2300 bp, Homo sapien
taagacatttctataattgaattctaattcaaaaatgtagtacttctttctctttcttatttctttgagacggagtctcactctgtcgcccaggctggagtgcagtgggacaatctcagatcactgtaagctctgcctcctgggttctcgccattctcctgcctcagcctcccaagtagctgggactacaggcacctgccaccatgcccggataattttttgtatctttagtagagacaggctttcaccgtgttagccaggatggtctctatcttctgacttgtgatctgcctgacctggcctcccaaagtactgggattacaggcatgagccaccgtgcccagcctacccctttatatatagaacagagatattataactatatatgtctaattcctcttttctatcccttttttattttatcagtttgtaattacataagctataaaaatgtaatattgacatttttataattgctttacacatttatgtaataaagaaaacacaaatgcaaaaactaaatttaaacctcatttttttcattgttgacaatctttatcttttggatacattcaggtattggatgtatatcatatggctgctcatctagaaactctgctaaaacgtctatggcaagattaatatgctgggaatagattttctcaggatttgtttgtccgacagagtatttatttgtctttgatttatcatctcaagagacaatgtcaagaagatgctgtttctgcaaatgggcaatctgcaaaccaaggacacgtcactacattactgtgcaagagaagcacatgaggaaaggccggtgtgagacacaaacctccaggaacacctgggctaatgagctgcagggggcgctcaggacccactgatcagtcaaccacagaggggagtgcaaaggttaggactgctttcctgcaagcattgaaaaaagaagaaaaaaactccgtctgacagtttctccaaggaacttctgtaattttagaattctgtgcctaccaatgacatctccaaatatttttttaaaatattgtgtttggaggacatactctcacatggacaaaacacaaattgacacagagatgaaaagccctcaaccatagtcaccaaaattggagacatgtagaagctcactgggacctgttgagtcttctccaatcacactcagaacagagaccttagtgggtctcccttagagtagtcattaaggatggtgataacagcctaaagatggtagaccatggtcagtgtcatatagaatatggggaccctcacaagttttttgtctgacccttctcctgacactaaattatgcaaattaataacactgatctggtgcttcttttgattctaatttattttatttttagttgtcgttctcacttttcctttggattttcctgctccctggaaaaggtaaatgtggtctccgtgacctcaattcaagggctgaagccctttccctgtagctcagctggggctcaggctgtggctactgcagccatgtggaagaggctgaagggactttcttcactctccttgctcaggaccatccactgtattgtgtataggcttctctggaaatgcaagtggccatttgtagtgaaagaaatatgtttgtctggttaaaatgggaggtggatgtagagttaattggctgctacataaactgtccttctccaccagtgcttttaggatgagattgtgaaatttgtaagaatcaaaatggagtcacatatgttaaaaccctgacaaatggattcaggaagtgtagggagaattcttacacacatatccctgacaacaagaactatcataaaatagttcttgcaaaaagaccaacatgacctcataatcatgacttctgcaaagacttctactcagaatctacttgcccagccttagattaatgccatctgaattacactgatcatgttactatcactggtcctcaccacagatgcaacaccctcctgagtcctgaaacctgactccatcccatagagtagggcacagatgaggggaatgcaaatctccaccagctccaccctcctctgggttgaaaaagccgagcacaggtcccagctcagtgactcctgtgccccaccatggacacactttgctccacgctcctgctgctgaccatcccttcatgtgagtgctgtggtcagggactccttcacgggtgaaacatcagttttcttgtttgtgggcttcatcttcttatgctttctccacaggggtcttgtcccagatcaccttgaaggagtctggtcctacgctggtga

SEQ ID NO: 13274 - DNA, 2300 bp, Homo sapien
aatgtttatactgcattgcttttgatttcttatgcatttccatttgattttttcttagtattttcaactctcagttccctatctagtccttcattatgtatacagtttccttaatagatttttacatatgaattatagttactttatatatcttgtttaattagatagttctaagatccatatcatatagaagtctcattctgatcatttgtttattatgactttggtatttctcattaatatatgtaatctttgttgatagccagatattttaggttggacagttgatattggcttattacttcattttatgcattttctgcctgtatttgaccatactttatttttgccaggcctttaatgtggaaatgtttgaatcttctcagagctacatttgacgtttacttttgcagtagacgtcatagttgaagtctgttcttctgtgtccaccagagacttcagatcctccagtgataccttgtttttctttcctgcttggctttgtctcttcaccctgttccttcctccagagaatctctttcagctccttcaggtggattaagatattatattgaactgacaattgtgaaattggtggaaggcaatagaataaagggagattttctgacctttcatgggtctatatttctacgaaggcattgtgaccctgagtctgggtgtgacattgccggtgtttctgaacttctgccagatgagatgttggtctgtgtgttcttgctgttttccctgctgtggagtcctcttgttttccccagttgttccctcccacagctccaatgttctcttttggtgttatcagcttccagagttgatgacctgacctagagattaaggctctgattaaataagaaggaggggagatacttctcaatggaacttaggtgaagacctctttttccatctcagttcctaagggatggccccagtgcccctaagatcctggctttggtggcttgctcctgcagagtaatttcttagttctgcaatggggattaaggaggtgggtctgaatgcatttcagagtgtgggctctttttctctcccagacagacacattgggacaaaagatttttgtgactgtccccatttttgggaaaaaggtttcaaggtataggaaagctcttcagtatgtggtccctgagaaattcacgctacaacacatttaccacacttgacttcaccaattcagtatgtatgtatttttttctcttataatagcctacatttttatatgccagactctgcctcagttcaactcatacccatgcctttttactctctgcaagaacttgtctctccctaaatttcggatttgatgattatcttaaaacctccagtatttaaagtatattttaaaattggcaaaattccatctcctgtgtttatctgttatgttgatgctgtaaaacagtaagtaaaatatactcctcatctatgtacattttgaagctgagttgcaggttttttggtaagacccagagtcacagagaattcaaatattgttaagctgcttaatagaaaaacaaattatggtaaatgtgttcactggaatactacccatgatttataataaataaatgcctgacacacagaacagcagcaaaaccacacatgctcttattacagaaagtggcttctgaaaaccacaccgggcacgtacagctttgtcctggagttggtttagggggatgtcagagccagtgacgagaagcacagggccagatggcagcgttcactcatcccagacatgagctcctggatgcatacagagcccccccatgtgtgggtttacttccacttctgtaaaaggagaaaatactgactcctacagagcataatttacacattttttaaaaaatgtaatagggtgatcagggcaaagtgtttatcacagcacaatttcataagacagcatattttccaaataccatcattgtcagcaaacttctgcagagcaccgtcttcttatatgggtacagcctattcctccagcatcccactagagcttcttatatagtaggagacatgcaaatagggccctccctctactgatgaaaaccaacccaaccctgaccctgcaggtctcagagaggagccttagccctggactccaaggcctttccacttggtgatcagcactgagcacagaggactcaccatggaattggggctgagctgggttttccttgttgctattttagaaggtgattcatggaaaactaggaagattgagtgtgtgtggatatgagtgtgagaaacagtggatttgtgtggcagtt

SEQ ID NO: 13275 - DNA, 2300 bp, Homo sapien
atgttgagtttcatcaaatgatttttcagcatcaattgaaaaaaactatatgtcgattaaagatctaaatgtaaaatctaaaactataaaaactctggataataacctaggaaatacaatttaggacattagaactggcaaagacattatgaagaaaatgcaattttaacaaaatcaaaaaatggcaaatgagccctaagtaaactaaagagcttctgcatagcaaaagatactatcaacagagcaaacaggcaacctaaagaatggaaaataaaatatttgcaatctatacatctgacagggtctaatatttatagcatacatgcaattaaacaaacatacaagaaaaaaagtgcccaaaggacatgaaaagacacttataaaaagacctacatgtggccaacaagcataggaaaaaatgctgactatcactatcattagagaaatacatattaaaaccacaatgaggtaccatctcacatcagtcagaatggctaatcttaaaaaaataataacagatgctgctaaggttgcaggaaaaagggaacatttatacacttctagtgcaagtataaattagttcaaccattgtggaaagcagtgccatgatccctccaataacctaaaacagaagtttcatttgacccaacaatcctacaactggacatatacctaaaggagtataaacgtataggttcattccagcactattcacaatagcatagacatggaatttacctaaatgcctgtcactggcataatggatagagaaaaatgtgatacatataaccatggaatactatgcagctaagaaaagaatgaaatcatgttctttgtaggaatatgatggaactggtagtcattactcttagaaaactaattcaggaacagaaaaccagatactatatgttctcacttattttttggagataaataatgagaaatattctctcagggcctgagtcttccatattcaaaaaaaaattctaaaataagtgttcaacaagttgccgacatgcctttaaatatcctgtttcatctggaccccttatatcactcaataaagccatgagaactatatttaaaagtgggattctatgataataaataacttaacagtaagaataggaaggatatggatggttttactaatttaatgggtacataactgtggtatacactatattcctatgaataagatattctgatttcagagctaagtattgtttcctacgttgtgtgtgtgacttggttgtgttggatttgagagtgtagcacgtgcacagaccatgtggatcagaaatccacatgtaaagatgacaatctatggatgtgaactacaagtatgtaagtacttcaagtaattctatttaatggagtttgaaataaaactcaaacttattcaaaacactaattacttggtatttattttgagatctatgagtttatcaagaaattcaaattcctatttctatttaaactcccgattcctactctcagtgggagggaaaactcacagccaatcacacatcacaggacaaatctgtaaacgaagagtcattcctctgaaggtcctgggtgttcaggactctcaggcaggtgctgaggaccctgtcttgggagtgcccagcagatctcagaaccctacatggggcctgctggacactcatgtgggataactagtcgccacttattcagagttaccagtgagctttgactgttccgaatgggaccagcatggagtcaaggtgcctgctcaatgtcagagacagcgatggtctcagaaacaatccaggtaatctctaggccaataaaatgtggattcacagtgagaagtacatcctggaggtggagcttgttcttcagtgggaagagtgctgtgcacagaaagcttagaaatggggaagggggtgcgtttcctcaggcaggattagggcttcgtccctcagcgtcccactcttgtatggctgatgtggcatctgtgttttctttctcatactagataaggctttgagctgtgaaataccctgcctcatgaatatgcaaataacctgagctcttctgaggtaaatataggtatattggtgccctgagagcatcactcaacaaccacatctgtcctctagagaaaaccctgtgagcacagctcctcaccatggactggacctggaggatcctcttcttggtggcagcagctacaagtaaggggcttcctagtctcaaagctgaggaacggatcctggttcagtcaaagaggattttattctctcctgtgttctctccacaggtgcccactccca

SEQ ID NO: 13276 - DNA, 2300 bp, Homo sapien
cgggggttaagatctggtttcccgtcagccctgtggcttcctctccataaaacagttccctcgggggcacgtctctggattccttatcttgttcttactgtgaagtctctgaagaataaacatttgttgtaacaagagaaaaattttctcccatgcaccaaaggcagagtcacctacagtcaattagtcctgtttctcaatgttaataaactatcaatgtttctgaaggtacattgtacagaacccagaattcagccacacaatgtatagccaagtgatattgacaaacttaacaaaatatacaccagggaaaggacgtcccattcaataaatggtacttgggaaaatggatagaaacatgcagaagaacaaaactagatccccaccctcaacacattagtcaggtctctaaaatgcaggagtacatatctaaaatttattattttattgtgcatttttacgtgttccagaaggtgggagaaatttctttctgtgaagagcatcccaaagtcaggcactcctctagaacacgtgtttaatccttgtctttggcttattgatgagctctgttggctgcaataacttctgccatccgggctgactttgcatcatgtagaggagcaaattctgaatgaaagtttgcactactcaattgagtgcataacctacagttttgttactgatgtatgattcatcagagatgatatcagatcaaggatttcaatgagaatctaatctaaaagatgtaaacaaattttcctaatttagataaaattactgtgagcacactgctagtattcagccatgtctcctatcacattgaatctacactaagtttgacctaaaagctagcacttgttctcatgttccaatatgttatttttattttaatgtattcagattactatgtgttgctattttacccaaagtgaaggaaagcaattttaactgactgaaaatgagaaaaagcacaacctaatgaaatggaagtcaggacatgagtgtctccagccttgtctatttcaaaaattcacgtacgcagggggatttctttcctcaattttacacagagaaacttccaaaatgtttgtttcctctcccatggactctatcatcagtttctatgtcagtttgcttagaattttggcctccagctccaaccaatttggtgcaaaaacatgatttcattcttttttatagctgcagagtattgcactgtgtataagtaccatgttttctttatgcagtctataactgatgggcgtctaggttgattccctgtattaggtaatgtgaattgcacagagataaacacatgagtggatgtgtctttgtgttacaatgattggttttctcttgggcatatacccagtaatgagattgctgaggggaatagtagctctgttttaagttctttgagaaatctctagactgactgaattgttttctctgtgaatggtgataattatgtcaatatttgtcaaattttgaatgtattgtttgaagattgttatttgtcaatattacctcattaaaactattaaaaatggaagtgtataatttggtagaaaaggattaaaagaaagataaaaataatacaagaaaagtcacagactcctgaatccacatgtgaattagcactcagtttttctatattatttataaaaacactaagatacagccaaataatatcatgatatccttataagaagagtgtttcgtaaacctcactgggaatttctagctctgtcctagagttaatttagggagcagtcggatccagtcctgagcaacacaggccagacactgagacttaccacatcttaccagatgtgagctcttagacacgtcacatggcctctccatgcttgggggtttaccttcacatctgtaaatgaaggaaacattgactgccacagaacatacttcatgtgcatctatacagtagaaatgctaataagaattaattgtttatgaagtgtaatcactctgggacacagcccactcagaggcatcccttccagaacccgctatatagtaggagacatgcaaatagggccctccctctgctgatgaaaaccagcccagccctgaccctgcagctctgggagaggagccccagccctgagattcccaggtgtttccattcagtgatcagcactgaacacagaggactcaccatggagttgggactgagctggattttccttttggctattttaaaaggtgattcatggagaaatagagagattgagtgtgagtggacatgagtggatttgtgtggcagtttctgaccttgg

SEQ ID NO: 13277 - DNA, 2300 bp, Homo sapien
gcctttattaaccacatttctatgaacctagtcagggttggatttcaagtgtatggttgccacggctatcagagttgaagtcagcttctcctgttcacaaaaagttcaggttcctccagtgatacccacttttgtgtcccggtttggctcttcccatttctttctccccagagagagcctgtctctttcatctgtggcaggtgcatcctgctgacacttttacttggtgattgtttgtggggtgaaagggcttggacacagggggatgttctccaaccttctgaccaagcatccttcttagctatgggtggtgagaatggctctgaagcatggtcttccaagcgttcctgttccttcccttccccaagtcagagtgtctctttctagccacagtggtcttccatcagtgtcctcagcttctgacccactgtccttactccacagactcaggatttcattcctcaggaaagagacgggaggtgtttctgggtagagtctccttagtgtcctctgtttccttctgttctagttgattctaccagtgcctgaaggacacaagatttaataaatgtctcccacatatcgtgaagagggattcagcattgaacggagctactgttcttcctccccagtcaacatcacaggacagcaggtggctgagttgtctggggatttctccaattctgtaggaaaagcccgcaagtgccaggagtttcacactctcacagcattagcacacacatcctcaacaactcatgaaacatttccaggttagctttttcctatcttcaataccatacaatgagtggcacctgccccaggtactctaataaatggacctagttttctctgcaggctccccattttctcagatttcaggggtttttttctctgcaacatcaactcagatatgttgaagggttcattttttgtagttcttcaagtttcttgttaatgaggtcagaagaagatcattttctcatttttttttttacattcccgtgcttagtatctgctttctaaataaaattcggaaactaagacaaaatatcaaatatccactatttggtgcattgttaaactatttgagaaatattcatgtactgaaatacaatgaacaattgaaatcaaggcatgcctcagtcacataagaatgtgaggacattatcaaataattgtgctgagtgaaggaagctaaagaattcacagtaaatctcctgtgatttcttttgtataaattgtagaaaatgcaactattctaaattaacatggagaagatctgaatttttctgagaaaagtgtggtgaggtaacaagatggtgaaataaaattacagagaagtgagagaaaaaaatttggaggttaatttaattgctaatagcacgattgaagtgctgattcaaaggctgcacacatataccaacattttccatatcgtacactataaatttgaattcactattgattgaatttttgaataaagcagtaacaaaaatgagtatattggctgaggaagagcaagaaagagatgaatattgacacttgaataatcacggactcctgaaaatacacacatgtgaacactgattgcatatttcaggtaaatactagaaaaagcaaagtcacataaagtcgttatgacaggtgggataccctgcaaatcacactaggcatgtcccacactgccctggagctgtctcaggggagcagtctcctccagtgtttagaggcacaggcacggataatagggctgacgctgtccagatgtgtgatattggacacattgcacaactgctctgttatgtatgtaattcatcttctctaaaaatgtaacattgacacttgcactgaatatattctgcaaatatgtaaacattaaataagatgatgactgctaattgatcatcaagtcacaatcacataatctgaagttatattttcctgagagataggattacctccagtgttttccgggaccctctcatctgctctgggcactgccctctcctccagcgtcccactagagcttgctatatagtaggagacatgcaaatagggccctccctctgctgataaaaaccagccgagcccagaccctgcagctctgggagaagagccccagccccagaattcccaggagtttccattcggtgatcagcactgaacacagaggactcaccatggagtttgggctgagctgggttttccttgttgctattataaaaggtgatttatggagaactagagacattgagtggacgtgagtgagataagcagtgaatatatgtggcagtttctga

SEQ ID NO: 13278 - DNA, 2300 bp, Homo sapien
aggttacagtttgtccacaaggactcaaacacagaagtacggagtccttttcaggccatatttaattcactttatcagtgcccttcagtatgtggttcctgagaatttcacatgacaacacgtttaccacactggaatttaagcaatccaacacgtttgtagctttgtcttgtaatgggctatatttcatgtggcagcctcggcctcagtttagctaacactatggcttcatttctctctacaagaactcatttcttccaagatttccatgttcctgaaaggaaaataaacctttgggacccccatatcactaagccaaagggaagtcaagctgaaaattgtttggggcaaacccacctccattctttccctaaaatgagagctactaaggtttttaaaagctacagacctccttcaaaatttgaccacaagtaaaatccttgtggacccaggacagagagagtcatttctctgctcatgtaagtcaaacgcatacctgattgctccctgtgctctactgtttcactaaatcagactaaggcctacgtgactattcctgtaaattgtgcattcagttaaaggctaatcagaaactcaaataatgcaaccatttctctcaaacctacctatgatctagaagccctctccccacttcaagttgtcctgcctttctgaactaaatcaatgtacatctgatatatatatattgattaatgtctcatgtctccctaaattgtataaaaccaagctgtgcccacaagcttgggcacatgtcgtcagcactccctgaggctgtgtcacaggcatgtccttaatcttggaaattgaacttcctaaatctattgagattagtctcagatactctttggtttacaggtttgtttttatttcataacttcaattatttgacatgctaaagaaaatttgccaaatagcgcattctcttgtttatgtgttattgttgttgcaaaaataatatattttatatataatttatcatctatgtacattaccaaattgagtagcagatttattagtaagacccaaagtaatgaaaagttcagataccaattagcaacttagaaaaacaaattatgctacatttgtttgctgaaatgctacctattatttataaaaaataaacaatacaacataaaaggtttaattctcagtatttctattgagaaaaataagccaaatagatgagtacatactatattatttcattcttataaattctagagaataaaaactagtctaaagaaatatgaaaacatcagtacttttataaagaaatggtagaagaaaaggagaaaaacaaaaatatatctataaaagagcaagaggaattctgaggtgagttgacttgtcaccttcttgaaaatagagactttctttatcaaaatttactattgtacaggttaaatatgtgaattttatcatctgtcaattaaaactcataaaatttattacaagtaaacaagtgaaattttagacaaaaaagggatgataagaaggaacaaataaatacattaaatgtcagatacaccaaaaatgtatctgcctgacgcctagttgtctctgtatttttaggtaaatgcagcaaaatcacacaggttgtcgtggcaggaagtggattctgcaaaccacactaggccgtttatctctgtcctgtagttggttcagagcaactgaggccagctgtgaggcgcataggcccaggtactaggactcactcatgccagatataagccctgagacacgtacatagcccctccatgtgtgggttcacttttacatctgtacatgaagaaaccactgactcctaaataacatcatctatacacataggtaaaaaaattaaaaatatgatagttgttaaatgtttatcgcagaacaatttcaaaataaggcagcattttcccaaatacaatcattgtcatcaaaatcccccaggacgctctcatctactctgcgccctgccttcacctcagatgtcccaccccagagcttgctatatagtaacagacatgcaaatagttgactccctctcctgatgaaaaccagcccagccctgaccctgcagctctgggagtggagccccagccttgggattcccaagtgtttgtattcagtgatcaggactgaacacacaggactcaccatggagttggggctgagctgggttttccttgttgctatattagaaggtgattcatggagaactagagatattgagtgtgaatgggcatgaatgagagaaacagtgggtatgtgtggcaatttctgacttttgtgtc

SEQ ID NO: 13279 - DNA, 2300 bp, Homo sapien
cagtgcaggcacacaccatctctgaatgggcatttaccatcagacaatgcccacacctgtccccacatggacctttccctcagacaaacaaacacatcctcaggttgactcttccctcagacaagcacccctgtcttcatgtgaactcttccctcagataagcacacatgtccccacattgactttttcctcagacaagcacatatagctgacaacgaacagttatgtggcaaaatgagctcaggatagtggtaattatggactccagctctgatagtttgtagaaattgtcatttttaaaattctgactgaagactttcctttattgtagaagacagtcctttacagctctaattgcacagcctacagacaggagtccatttcctctgggcaaggtttatttttatttgtttactgtacttatttgttgataaatattgatactacaaagatagcctatagggtccacatacgagaaaaaaagagtaatgggcagatcaaccctgcaaatccagtcccaggagtctttgaccctgccctccctggaatccagagacagagatgggaagaggcctgctgagcagtgcactcatgtccccagggagaaagacatggaaatgaggcccctcctctgcaaatgaaaagtagctcatcccctgttcctgtagatcctggtgaggagccatcccacatctgtgcccttcctcagtgtccacaccatggggtctgtgcagatctgggctgctcttgtcatcactctcaatgttcaggttccccgtggatcaggccctgctgtggctgttgcctctgtgttttcagaagtcccctgtgaagttaactaatggagttagacagagaaatactacagaccaggaattctgccttttctgcaaagcctctggattcactttcactgaaaacagcataagcttgatccagcaggcttcatgacaggggtgggtgtgggtaataacaataattcaaatagaagttctcagtgggactctccttgagtaaaaagatgattaacaatcctcaaatacactcagttcaggagattctcttttaagatgattaacctgagagctcaggaaaagtccgtgtattactttgagggacacagtgaggggacatctgtgtgaactcagacaccaacctccctgcagggagacaggaggggactgcctggtagatgcttctcagaaccaccagggggtgctcaggacatcagggggcactcagaaccatcaggggatgctcaggacaccagagggcactcaggacactggggggggggtgtcactcagaaccaccagggggcactcaggacactggggggggggggtcactcagaaccaccagggggcgctcaggacactgcggggggggggggggggtcactcaaaaccaccagggggcgctcaggacactatgagggggggtggtcactcaaaaccaccagggggcgctccggacacggtggtgaggggtagctcaggatagcaggggtgctcagaaccaccagggggcgctcaggacactggggggggggggtcactcagaaccaccaggggacactcaggacactggtggcggggggggggggggtggtcactcagaaccaccagggggcactcgagacaccagggagccctcaggacactagggggagctcagaaacaccaaagggcaatcaagacaccagggggatctcagaaccaccaggaggtgctcaggacaccaggggtctctgaaccactagggggagattaggaccccagggggctcagaaccactagggggttttcaggagaccagggggcgctcaggacaccagggggcgatagggacaccaggtggttcagaaccactagagtgtgctgagaaccaccaggggtgctcagaaccccagggggctgctaaggacaatagggagtgctgagaaccaccagtgggcgctcaggacaccagggggatctcagaatcaccaggctgtgctcaggacaccggggggtgctcaggacctccaggagcgcacacgacacaaaggatagctcaggacctacagggggcgatcagaacgccagggtgcgttgaggacaacaaggggctcacaggacacaacgacgtgcttagtaaaccgggggacactcacaaccaccgggggtactcaggacaccagggggtgcccaggaaaccagggagcactgaggacaccactgctcccttaggaggcagctccacatcaggtccctgagtgggagcagggaggagggttcctcttgtatcttgccactaac

SEQ ID NO: 13280 - DNA, 2300 bp, Homo sapien
gtaactgacaattgataaattagtggaagcccttacactaaaggaagagtctctgacctcatcttggtccatattcctagaaaggcattgtgcccgtaagtctgggtgtgaccttctgagtgttcctgaccctcctccagaggagatgctcatctgtgtgttcttgtccctttcactggggtagaaccaccctgtttcccccaggtgttccctcccacagctccagtgttccgcatcagtgtcatcacctcccagatctgctgccctgccctgcagactaaagctctgattccataagaaggagagttatgtctcaacagaacttcgtggcagtgacctctgttcccatctcaattcctgaggggttgcaccagtgcccctagggtactggttttggtggttcccctgcaaagtaatttttggttctgtagtggatataagggagtcgagtctgaatgcctttcaaaaatgggggctcttgttctctcccagacagacactttgggaaaggaagattttgtgactgccccttttttggggaaagggattcaagaggatagaaaagctcttcagtatgtggtcccttagaatttcaaactacaacaagcttaccatattcagtttcaagcaatcccatatatatttgtatttttatctttaacagactatatttcatatgccagactctgccttaggtaatctcatatgctggctttgttactctctacaagaacttgcttcttgttaaatttaagattttttttaacttcagttatcctaagcattcagaaatttgcaaaatttcatcttgactgtttatctgttattgttgatgtagttgtaagaaataaagaatatatatccctcatttatgtacattttcaagtcgagtagtagatttttagtactaccagagtaataaaataatttgaacattgttaagctgcttaacagaaaatcaaattatggtaaatttgttcaatggaatactacacaacatttataataaataattgtctgatacatgcaacaagaaggtaaaatatctaagtatttttgctgagtaaaataaaccagacaaatgagaagatttaccatataatttcatttatataaattctggaaaataaaaactgaacttacttaagtaatataacaacaaggtaaaatatctaagtattgatgttcaggaaaataaagcaaatgaataagaatatgtactatgttattccattttaataaactctgataaattaaattgaatctacagcaatataaagaagaacagaatttaccatttggggaaatggtagaagaagggaagaggaaaggaggaggaatatagaagaatgagagggaaattttgtgaattttctggttcaccttggtaactaggatggttacatcaggtttatcaattgtacactttaaatatgtgaagtttattatcagtaaactgaaatttataaaatttattaccagcaaacaaatgaaaacttgcacaagaaataagtgacataaagatagaaaaaatattaaatttcagaaacacctaataatttatcttcgtgaaccctagttctcaccatatttttaggtgaatgctagaatgcagcaaaattacacatgctctcaatacagaaagtgggtttcacaaaccacactaggcatgctcagctctgtcctggagttgggttagggagtaatatagggccagtggatgaggagcacaggcctagatactggggctcactaacctcaggtatgagctcttagatacatacaaagcccctccacgcatgggtttacttccccatctgtaaattgagaaaccattgacccctaaaaatatgatttacacaaatatgtaaaaatgtaagagagtgattagtgcaaagtgtttatcacagcacaatttcataacaagacagcaagttttccaaacagcatcattgtcattagattcctgcagggcatcattaccttatctgggccctgccctctgttcaggcatcccaccccagagcttgctatatagtaggtgacatgcaaatagggccctccctctcctgatgaaaaccagcccagtcctgaccctgcagctctgggagaggagccccagccttgggattcccaagtgttttcattcagtgatcaggactgaacacagaggactcaccatggagtttgggctgagctggattttccttgctgctattttaaaaggtgatttatggagaactagagagattaagtgtgagtggacgtgagtgagagaaacagtggatatgtgtggcagt

SEQ ID NO: 13281 - DNA, 2300 bp, Homo sapien
tttcactgtagtttgtttaaatggtagactcacagaagtagaatagaatgttggttaccaggggctggaggggtggactggaaaaggagagattgtggtcaaagtgtaaaatgttccagttagacagaaggagtaagttacagtgttctaatgcacaagatggaaaatatggctgtgaatgcattatatatttcaaaatggctaaacatgcaaatgttaaaattttttcccactaagaaattatacaggtcgggagcgggggctcacacttgtaaacccagcactttcggaggccgaggtgggtggatcacaaggtcaggagttcaagaccagacttgccaagatggtgaaaccctgtctccactaaaaacacaaaaattagccaggcgtggtgttcaccacaggagaattgcttgaagcaaaggctgcagtgagccaagatcataccactgcactccaaccggggtgacagagtgagactcagtctcaaaaaaaaaaaagaaatacatttatgaggtgctggatatgttaaatagcttgattaacaattccataatgtatgcatgtatgatagcatgtgtgaatggacctgtatgaaggtgaggtgccctggtcacgtgacagtgaggtgacttgggggaggtgtaaggttacctgggggtatgtgtgcggtgaacttgggcacatgtgaggtgacccacggtgcatgtgtggtggcctgggtgcgtgtgaggttacctggacatgtatgaggtgacatggggaattcgtgaggtgacttggatatgtatgatgtgacctcaggcatgtgtgaggtgacctggccgacgtgtgaggtgacctgggggacgtgtgaggtgacatggggaatgtgtgaggtgacctgcgggaatgtgtgaggtgacctgcgagcattccaggtgacctggggggtgtgtgagcttagcaggagtgtgtgtgaggtgacatggggtatatgtgaggtgacccccctgacgtgtgaggtgacctgagcacatgtgaggtcacctaaggcacatctgagttgacctgggggatgtgtgaggtgacctagggaaatgtatgagctgacaaagggcatgtgtgcagtgacctgggtgcatgtgaggtgacctggtgcatgtgttagtttacctgggggatgtgtgaggtgaacaggggcaggtgtgaagtgcctgaggaatgcatgaggtgacctggtgcatgtgtgtggtgacctagcagatttacgaggtgacctgcgggatgtgtgaggtgaatagggacttgtgtgaggtggccacaggaatgtgtgaggtgacctgggggatgtgtaaggtgacattggggatgtgtgaggtgactcagggcacatgtgaggtgacctgggggatgtgcaaggtcaccttgggtgagtgtgaggtgaccttggggatgtgcaaggtcacactgtgtgagtgtgaggtcatctgggatatttcaaacttcgtaaggaaagcctgcaacagtatatggcactaaaagcttcacactccaacaccgttaatgcgcacatcctcaaggaactctaagtgtttccaggttagcttaaatgccatggagcgacacctgccccaggcacactcatatatgcatcctgggtctccctatcaacccctatcctcaaattttcagtttatgtttgctccatgatatcaactctgatatgttgaaggttttttttttcttttatttgtagttgttcaggtttgctatttcactctcattactctgggctcagtcctctcctcaggtgtcccacttcagagcttgctatataataggagacatgcaaataggaccctcccttttctgatgaaaagcagcgcagcctgaccctgcagccctgggagagaagccccagccctgggattctcaggtgtttctattgggtcaacagcaataaacaaattaccatggaatttgggctgagctgggtttttcttgctggtattttaaaaggtgattcatggagaactaaggatattgagtgagtggacatgagtgagagaaacagtggatatgtgtggcagtttctgaccagggtgtctctgtgtttgcaggtgtccagtgtgaggtgcagctggtggagtctgggggaggcttggtacagcctggggggtccctgagactctcctgtgcagcctctggattcaccttcagtaacagtgacatgaactgggcccgcaaggctccaggaaaggggctggagtgggtatcgggtgttagttggaatggcagtaggacgcactatgtggact

SEQ ID NO: 13282 - DNA, 2300 bp, Homo sapien
aatgtgaccgttccagagggtcttatacttctaaggtttctggactttctctccagaaacctccagattctaaaatatacaatccaaataaatttccgatgggtcagaattgaagatgaaatgaagatgattaattacagagaaatataccaggagcccacttcaaaagcttctaaagggaatgacttttccagaaccttatcctatgtgaaggaagacaaatctcccattccagattctcccccattcttccattattatatgaatgagtaaagttagccaaaaggggtaagacgtacataaatagtccaaggaggccgaaacctcaaaagggagtaacagccaaaaatgagcttttcccctggagatgctttgtcaaggtcacagcccagaagaggaagcctattgaatctctaggtttccattggaagaacaggcagtgcttacctgcactgcacaatccattctaactaggatgatggctatggattaaagatgaaagtgtggcaatgcacagactccatctgaggagaacacagaaatactaagacaatggcagagggtgagacaaagacagtagagcaatgtgaagcctctgacatcgtgatttttaagaccaacatcttgtaaatgccatcatagttctcagcttcttttattatgggacctttgctggtttcctagctgagaaagtgaaaataacaacctgcatggacttcccaagtctccacctgtatcctgtttgctttagatctctaggagaagaaagtcagataactgggcctggtgtcagtgtaggaggcacttcctaaaagccacatattaggagaagggaaaatgtgtgttattggaatagtggatatggagtgggctttcatttgaatgtatctgcacctgctagtattctcagatgcaacattcaactgcaagagcccagtgaagaaacatggcactcgcaaatctcttgtaagtttttgtcttcattttggttccactaatgaagtgaatctggagcttcagggaaggggctccctcctgtgtcattgaatccttgctctgggtctccctgcagagttcaataggtttagtaaggctaatcaattgtttcaagagatggtgtcagcagcatatggtgtcactgaaggagtattctacactagcacacagccatttcatgctgggctagagaagcctgggggaaatgatttgaagtctcagcaaggaacctccttgcaaggcaggggctgggctgtcgggggcaccgagcaggtgagtcagaaatcaatatgtaaagatgaggacctatggatatgaattgaaaatatataaatacttcaaaaaattccagtaaattgagtccaaaattaaccccaaattattcaaaacacaaattccttgacaattattttgggagcagtgagttcataaagaattcaaaactactgtttcagcttctgattcttattgttcctgagatgagaaaatcatctctaatcacacatcacacagcaaatctgtaaacaagagtgtttctatggaagatcctgggggatctgaacaccaggcaggtgctggagaccctgtttcaggagcgcccagcagatctcagagggacctgctggtcactcacgtgggacatcagcagtaactttctcagtcaccagtcagctgtgctggtgactgatggacccaggacagaaccaaggcacctcctcagtgtcatggagagtgatggttccagaaatcatccaggtgctctctgtgcttataaaatgtaggttcactgtgaggagcatgttctgagggggattgttctgtgaaaggacctctgttcatgagtgttcataaatggagcagggcatgcatttcctcaaacaggaatagcgcttggaccatcagcatctcactcttgtaaatctgatgtgtcatttatcttccctttcttattattgaccaggctttgcgctatgaaatgctctgtctcatgaatatgcaaataacctgagatccactgaggtaaatttggatgtctgtgccctgagagcatcacccaacaaccacatccctcctctatagaagcccctgagagcacagctcctcaccatggactgtacctgggggatcctcttcttggtggcagctgccacaggtaaggggctcccaagtcctagtgatgaggaggggattgagtccagtcaagggggcttttatcatctcctcccttctcctcacagatgtccattcccaggttcagctgttgcagcctggggctgaggtgaagaagcctgcgtcctcagtga

SEQ ID NO: 13283 - DNA, 2300 bp, Homo sapien
gtcagtaaagctgctctgagctacaggaaaaattggatttggccaggtttgtctgagttcaacgtgattattatactcagctcctgctccaatctggactgagtacggggaatttaaatgagcctggctgtgtggtttgttatatgaaaatctgaactatataaacataaatggcatgtctggactagcatgagggtgagagatcctgggaactccaccccccatactcttatcgccctttcctccaggaacctccaggttctcagggtgagaatccacatagatcccttcatggctctatttctaggaaaccaaatctctaataaatacacccagactttcttcagacacagaaaccatgggaaaggcatctctagatcctcatctatgtggggaaaggtaatccatccccattacaagcccatactagcaggcttcctttatcatgaaaatgggtaaaattagccaatagatgtaaatttaaagaaaatttcctgtgatgctccagccagaaaagagcaaaaatcagcttcacttctggagacttcccgtataggtcacagcccagagaaagaagatcaccacagcattaaaattcagctgtaagaacatgtaatgcttccgtgttccacacattatgtctcaccagtttagtcaatatggattaaatacgagagtgtggcaatgcacaaactctatctgaggaggaaataggagaaaaatgttaaggaaaatagaagaattcgacgcctctaataccaggaacttcagcacaaagaaaatgatttcacccttattggcctcaaatttatttttcctgtggcatctgcagggttccaaagtgagaaaaattaattcactgtgcatgcacttccgaagtgtccacttgcattctgatatctttacttctatttgcagaaagtagacacatattcagccttagtgccagtgtagggagtgctttccgtgacatggataccagaaaaatagggtaaacatagggcccattaatgtgaaaatcagacattgtgtgtgtgtgtttgtgtgtgtgtgcgtgtgagttgaatagtagagttggagtgggcttctatccacctacacctgcaggtattctcaggtgccataatcaactgcaggaccctaaaggaaataagagtccccccaaacccctgaagagtttttgggttcaccgtgtgtccaatgattcagtgcctcttgagctctaggaaagggctccccagtgatgcatgagatctttcttggggtctccctgcagagttcactgggattcctaaggccaattcagtatttcaaaagatggtgtgagaagcacaggctgtcactaaaggagaattctgagccagggcacagccactttatacttggctggggacactggtaggaatatactctgtgagatcagacaggaacctccttgcaggggcagggcagggctgcagggggcgctcaggacacacagagcacaggcttccgccccagagcaggtgaaggaggctggggaggggttcctctcagggcctgggacttcctttaaaaaatctaaaataagtatttcacaaggactgccgatgtttatataaatatcctattcaattgtgagcatttatgaaactcgatgttgtaatgagaaccacttttacaattggaatttcaaacttccctagacatcttaatagtaagcagctggaggtcaggaggagatcctttcttataaataagtgcaattttgggagaaacacactcattcccaaaatagcacattcacatattaaggtctagaaatgattcgagttgcccctgagacagtcaaatgtgggttctaagtgaggtgcgtgtcctgggggagcttgttctccagtgggggaagctctgtcaacacagagttcagggatgggtaggggatgcgtggcctctaacaggattacggcttgaaccctcagcttctacaattgtgtcgtccatgtgtcatgtatttgctctttctcatcctgggtcaggaattgggctattaaatagcatccttcatgaatatgcaaataactgaggtgaatatagatatctgtgtgccctgagagcatcacccaaaaaccacacccctccttgggagaatcccctagatcacagctcctcaccatggactggacctggagcatccttttcttggtggcagcagcaacaggtaacggactccccagtcccagggctgagagagaaaccaggccagtcatgtgagacttcacccactcctgtgtcctctccacaggtgcccactcccaggt

SEQ ID NO: 13284 - DNA, 2300 bp, Homo sapien
agccacttactctgggggatcaactagatctccaactctgtcaataagtcgtgcttctcgtcccaaatcgtgttctaaaaataattgtaaccctcttaacatcattgtccatgaacctaattcagctcaatggtactatggtatgtcatggggattaagactttatgtcccagggttcgatgttggaactatgttcaccatccaaaagaaaattttggtcccctggagcccacccaagccaatcggacctttaactgatctaggtgaccctatgttccaaaatcaccctgacaaagttaatttaactgtgcccccaccattctcagttcctaagacccagctacaaagacatcaactccaacccagtctgatgtctatacttggtggagtacatcattttcttaacctcagccagcctacactagcccaagattgttggctatgtttaaaagcaaaacccccatattatataggattaggagtagaagtcgcacttaaaggtagtcctttatcctgtcatgcacaacctcatgctttcacattaggagatgtgtctggaagtgcttcttgtctaattagtactggatatgacttatctatttctccttttcaggctatctgtaatcagtctctgcttactcccatgagcatctcagtctcttaccaagcacctaacaatacctggttggcctgcacctcaggtctcactcgctgccttaatggaactaaatcagaacccctcttgtgtgttctagttcatgtccttccccaggtatacgagtacagtggatcagaaggacaactcctcattgctcccccggaattacatcccaggctacgcagagctgccccactactggtttctcttttagccggtcttagcatagctgggtcagcagctattagtacagctgccctagttcgaggagaaactggactaatgtctttgtcccaacaggtagatgctgatttaaataatcttcagtctgccatagatatactacattcccaggtagagtctctagctgaagtagtacttcaaaactgccgaggcttagatctgctgttcctctctcaaggaggattatgcgcagctctaggagaaagctgttgcttttacgccaatcaatctggagtcataaaagatacactccaaaaagttcaaaaaaatctagataggagccaacaagaacgagaaaataacacagcctggtatcaaagcatgttcaattggaacccctggttaactactttaatcactggtttagctggacccatcatcatcatattattgagtttaatttttggcccttgtatattaaattggttccttgattttgtaaaacaacgtattgcgtctgtcaaacttatgtatctaagaactcaatataacccccttgttgtaactgaagaatcaacgacttgattcccctaaaacacaagtggggaaatgaaatgcctaacggtgtttttactttaactcgttactttgaattttgtcctgcttgtctctttaatcacctaaccttgcttctcatgtaaataagactctctctagctaggaaagccagacaaactccaattgaccccttagtttacaagacactaagggctcctcacccaaccccctttcgtgaggagttggcctgggtaaacagatcctcagcatttcaaaggagcccaattaactgataaggtacccacaccaacaatgtatgaagttcccaggaattttctccaagagataacaacatgaaaccttgagtttgtgtccggcatagaccctatatctaattataataaaagatttagaaccttgcacctggtaccgttgctcttcttgtaaccatttgtcttttaagttgtttatcactctgtaactattttgattattttgattcttgcatgtttttacttctgtaaaattattacatttgagtccctctccccttcctaaacctaggtataaaatttactcgagccccttcctcgtggccgagagaattttgagcatgagctgtctctttggcagccggcttaataaaggactcttaattcgtctcaaagtgtggcgttttcttaactcacctgggtacaacagtgcagctggtggagtctgggggaggcttggtagagcctggggggtccctgagactctcctgtgcagcctctggattcaccttcagtaacagtgacatgaactgggtccgccaggctccaggaaaggggctggagtgggtatcgggtgttagttggaatggcagtaggacgcactatgcagactctgtgaagggccgatt

SEQ ID NO: 13285 - DNA, 2300 bp, Homo sapien
agtaccattttcttgggctcctgggaaacccaacagctttagttaaactcacagctatgtacacccataggcccctcaggaggttctcagtttcactcctacagtctcccaggctgctccttggggtcctaacctgaccatctctaccctctctcctgagtctggccatccattgaacgtccctgctgccctctaatctggatttgtgtacagtagaaggttaactcagcagacctggattgtttaaaccctgcacattcctgaaaaacattgttcatttatggctctcagttacctcctgatgagaactctgagcccttaaaatgctatgccagataacagtgtctgtggttgtctgcagccttgggacctgtagtacacatttaatcatagtgctttgtagtgaatgccagctatttttttttcctgggtagcgggggagctgttgtctgagtattgtggtcagttgaaatgcctaaccttgttttcactctaactcactactttgaatcttccctgtttgtctctttaatcacctagccttgcttctcatgtaagtaagactctctctagctgggaaagctggacaaactccaattgaccccttaatttacaagacactaagggctcctcacccaacccccttccgtaaggagttaacctgtgtaaacagattctcagcatttcaaaggagcccagttaactgataaggtactagcaccaacaatgtatgaagttcccaggatttttctcaaggagataacaacataaagccttgagttcatgcccggcatagcccctatatctaattataatgaaagatttagagccctgcacctggtactgttgctctttttgtaaccatttgtcttttaaattgtttatctctctgtaaccattttgcttcttttgattcttgcatgtttttacttccgtagaattattgcacttgagttcccctccccttcctaaacctaggtatgaaagttaatcaagccccttcctcggggcccagagaattttgagcattagccgtctctttggccgctggcttaataaaggactcttaattcgtctcaaagtgtggcgttttctctaactcgcctgggtacaacatttttggaggccgcagcgagatattaacaccactgggcgagagccggtctcgctccgggctcccccggaaggatggccagctcggaggagggacaccacctgaggaaagaattttcaggtccgcaaagagtgaccgccttccagaggagagcggatcgaccactgtgtcagcgccctaaaagtcaacatctgagtcctcagcttctgaccccggggtcaggtaggtcggatgtgacttcgtttccggtgagaggggagcggccctgacgagggcgctgagtcctcagcttctgaccccggggtcaggtaggtcggatgtgacttcgtttccggtgagaggggagcggccctgacgagggcgctgagtcctcagcttctgaccccggggtcaggtaggtcggatgtgacttcgtttccggtgagaggggagcggccctgacgagggcgctgagtcctcagcttctgaccccggggtcaggtaggtcggatgtgacttcgtttccggtgagaggggagcggccctgacgagggcgtccctcttttgactcagcccattactctaggatgctagtgggttgagccttcgttttccggtaggcgccttcgtatcttggtttgggtgggaagtggtcctgaccaggaccctcccttgacttagctcaagacccaggacgctggagagctaagccttggtttctggcagacctctctctctctcttctatcttccatccttcttttggaaatctccgggaaaggaaaaaaaaaaaaacctgttataaactctgtgtaaatggtgtgtgaatgtgggaggacaaaggcttgcgtttgtcttccagtttgtagctccatggcgaaagctacggagtttgagtgggccctcacctgccgttctgtggtgacctcataaggcttaaggcagcatcgggcatagctcgatccgagctgggggtttatactggcctgccaatgctaagaggaacccaagtcccctcacggggagtggccaggcaggcatctaaatgatcccatcacgggacccccttcccttgtctgtctaatagagaaggtaaaacaggaaaactgtcatcattgtttacatgccctagggtcaattgtttgttttatgtttattgttttgttcggtgtctattgtcttgtttaatagttgtcaaggtgttacat

SEQ ID NO: 13286 - DNA, 2300 bp, Homo sapien
aaaatgttcccaaaccaaatagtggaaatggttgcacagcattgtgaatgtgtaaagtatcactgacccatacacttaccaagggctgaaatggtaagttttatgttatgtgtatctcaacacaataaaaatgagtgccacattttgtttagcatatcaatgacaataacagttcaggtgaatgctggattcctcatcacaaccagtgcttcctgatggagctggattcaggggagggactggagtgggttgggtgcacaggtcatgaaggcagcaaaaattccaacccactcctcaagagtccagtcgccacctccagatctatgtccgccggggcagctcttcctatggctgagctacatgagcaacaagcaaataaccatgttttttgttgttgttgtttagttttgttttgctttgtttttagacagagtctcgctgtgtcacccaggctggagtgcagtggtgcgatctcagctcactgcaatctctgcctcctgagttcaagtgattctcctgcctcagcctgccctagtagctgagactacaggcactcactacgacgcccagctaatatttgtatttttagtagagacagggtttcactatgttggccaggctgttcttgaactcttgacttcgtgatccacccgcctcagcctcccaaagtgccgggattacaggcgtgagccaccgcgctcagccacaaccatgtatttttaagcaaaagacacagtgaggggacatcagtgtgagcccagacacaaacctccctatgcgggttcacaggacagcatggggtgctgaggacagaggtgggcactcaggaaccagcagggaaacccagggggcgcttggcacttcatgggggctcaggaccattgtgggctcagtggtcaggcaggctcaaggctcagcctcagggcaggtgcagcaggcggggaaaggccctggagactgggtttagtgtcaccttctcattgcgccactggacaccctccactacatctattctaatgtgtatgagtacttatgagtttagaaaataacattgatattataaatctatagccatatgtgggtgcatcaagttaccctcttcaacctatgtggaccctgttcatcaggaataagtccctgcatttgaggaccttataaatcaataattatgtagaatcactttctttttcagtctcatttcctccctctttctctctctcacacacactgacaaacacgctgggtgctataactttaattacctgatgtgttaaaaaaaattgattcatttggaacttaaccagtttagctgttgttcacgctgttatgtaaaaaagatccctaaatgacttctacctggtaagaggagggaaggcgttggaaggtgaaattgcaggagaaggagagaatcgtgaaacggagtgagttgttttctctatgaatggtgattaggtcaatatttttcaaacggtgaacatattgtgtgaagattatttgtcaatattatctcattaaaactattgcaaataaaagtgtataatttggtaaaaaaaatgaagagagaaataaaaataatacaagaaaagtcatgaactcctgactccacacgtgagttaaccctcagtttttctatgttacttagaaaaacactgagatacagccaaataatatcatgatatctttataagaagagggttttgtaaccctcactcgaaatttctagctctgtcctagagttaatttagggagcagtcagatccagctgtgagaaacacgggccagacagtgagactggcttttaccagatgtgagctcttagacatgtcacatggcccttccgtgcttgggggtttaccttcacatctgtaaatgaaggaaactttgactcccacagaacataattcatgtgcatctataagtagaaatgctaatgagaattaattatttatgaagtataatcactcgcatccactctgggacacagcctactctgaggcatcccttccagaagtcactatatagtaggagacatgcaggtgggtcctccctctgccgatgaaaaccacccagccctgaccctgcagctctgggagaggacccccagccctgagattcccacgtgtttccattcagtgatcagcactgaacacagaggactcgccatggagtttgggctgagctgggttttccttgttgctattttaaaaggtgattcatggatcaatagagatgttgagtgtgagtgaacacgagtgagagaaacagtggatttgtgtggcagtttctgaccaggtgtctct

SEQ ID NO: 13287 - DNA, 2300 bp, Homo sapien
cagagacttcagatcctccagtgataccttgtttttctttcctgcttggctgtgtctctacacctgttccctcctccagagaatctccttcagttccttcaggggggttaagatgttatattcaactgacaattgtaaaattgtcatagaataaagggatatttagaataaagggatattttctgacctttcatgggtccatattgtgatcctgagtctgggtgtgacctttccattgtttctgaacttcctccagatgagatgttggtctgtgtgttcttgctgttttccctgggtgagagtcctcttgttttccccagttgttccctcccacagctccaatgttctcttttggtgttatcatcttccagatttgctgacctgacccatagattaaggctctgattcagtatgaaagggggaggtacttctcaatggaacttaagtaaagacctctttttccatctcattttctaagggattgtcccagtgcccctaagatcctggttttggtggcttgcccctgcagagtaatttcttagttcctgcaatggggataaaggaggtgagtctgaatgcatttcaaagtgtgggttctttttctctcacagacagacacattggcacggaaagatttttgtgactctccacattattgggaaaactgattcaagaggataggaaagctcttcagtatgtggtccctgagaaattcatacaacaccttttaccacacttgacttcaagcaatccaatatatatatgtgtgtttttctcttgtagtagcctacattttacatgccagactctgcccagttcagctcatatcctggccttgttactgcctacaagaacttgcctctccctgcatttcagatttgatgtttttcttaaaacttcaagtatttaaagtatttttaaaactttgcaaaatcccattttgctctgtttacctgatattgttgatgttgttattgtaaaaagtaagtagaatatattcctcatctatgtacgtttcaaaactgagttgcagctttttttggtaagacccagagtcataaaagactgcaaatactgttaagctgcttaacagaaaaacaaatgctggtaaatgtgttcactggaatactacccgtcatttataataaataaatgcctgacacacagaacaacataaaatatctaagtatttataccgagtaaaatatgccaaacaaataagaatatatactatgtcatttcattttttataaatgctgatgaataaaaaatgcatctgaagtaaaataatgaggatccagtagttgctgggggaaatggtagaagggaaggggagaggaggaggaatacagcagaataagaggaagtgttgagaagaattcacttgtccactttcttgataatgacgacagttacatcacgtttattaattgcacattttaaatatgtgaagtttattatctttcaattaagccacataaaatgtattacaagcaaatggaaatttagacaagcacggagtaatagaaagatccaaacatatgttaaatgtcagaagtatctgaaaattagtgtgtctggaccctagttctctccatattttcaggtgagtgctggtggcaacatcacacatgctcttactacagaaagtgggttctgaaaaccacaccaggcacgtccagctttgtcctggagttggtttagggggatgtcacagccagtgacggaggagcacagggccagataccagcgttcacttatcccagacatgaactcctggatgcatacagagccccctccacttgtgggtttacttccacttctgtaaaaggagaaaatattgactcctacagaacataatttacacaaatatttacagatgaaatagggtgatcagggcaaagtgtttatcacagcacaatttcataagacagcatattttccaaataccatcgtcagcaaacatctgcagggcaccgtcttattatctgggtacagcctattcctccagcgtcccaccctagagcttgttatatagtaggagatatgcaaatagggacctccctctactgatgaaaaccaaccgaaccctgaccctgcagctctgagagaggagccttagccctggattccaaggcctatccacttggtgatcagcactgagcaccgaggattcaccatggaactggggctccgctgggttttccttgttgctattttagaaggtgaatcatggaaaagtagagagatttagtgtgtgtggatatgagtgagagaaacggtggatgtgtgtgacagtt

SEQ ID NO: 13288 - DNA, 2300 bp, Homo sapien
cctcccattcctgggtagagggtctccttgttctttccccaatcttctcccagcagccactatgtcttcccactgatgtcttcagcttcctcttttctgcccttcccagcagatgagtctgttattcctgagggaagagagaggaggtgggagatgaggctttattcctgaaagaatggacagagctttggagcttttctttcttctaccccagtttctacgagttcctccagtgcctgtaacacagagctgtcagtggctttgcccctgcatgttaattctttggtcatgtagtggtggtgagggagctgggtctggatgcatttcagccacagctgctgttccacttccccacacagaaccgtctcaggaggaagaggttggagatttttctgatgtgtcctcaatcctgggagaaaagttttcaatagcaataggaatctctcagttgtatgtccgctgagaatttaaacaataacttctttataatactaaattttaaacaatccaatgaatatatctaatttaattttttattagcttatgtgacatttgctggcctctcccccagataaggtcatattctcttcctgtttgttcctgcaagtcactgaatttcacaagatgtaaggtctcttgattatactataacatcaataatctggtgtactaaagaaaatgtgctaatttgcagcttactaaaattagttgttttagtaaaaataatatatttgttatagcatgcctacatctccaggctgagtagaagctttgtttgtaatactcagaaactgcaaataacacacatattaaggagctttctaaataaatactatgggtgaattctttaactggaatactgttcctcattagaatcaacacattctttatacacaaccaaattactgactcacaagtaattatactgagcaagaagccacacaaatgaaattgaaaatataagatttcactttaacaaaatcttgaaaaatagatctgaattaacaaagatgagaggttgactcagtatggtgagagggaaataatggggaggcaggaatgagaggaacacagggaggcttttaactgtaatcatcgttatctcgattgttattttggatacacaggtgagcacacgtgaaattacgttttttttccttcggagacatggttttgctttgtcgtccaggctggagctccgtggtgagatcatagctctctgcagcctcagaccctgggtctccagcaatcctcctccctctgccctatgtagctgggactacaggtgtgcaccaccatgctcggcttcagtgcgtattaaaccgcacacttcaattatgcagtatttattatatagcaataatgcctcaataagggtattacaaataagtggatagataatttgttaaagattgatggaaagatagataccaacatgagaaatgtatgacactcaagaaaataaaactgtaggaaacttgcttttctttatatttgttaggtaatcaccacagtgtgtacacatcacaccatgttcccattacagagaaaaggttctgcgaacctcacgagctgtgacccctgtgtgctgggcttggttcagggagaagtcaggtccagtggtgagaagcacaggcccagatgcccaggctcactctgaccaaaagtgagcactggggacattgtaaaacccacctgtgcttttgctgataatttttcatctttaacatggaaataatattgatactatataccatggtttctctgcgtatgtaaaaataaaagatgattggtgctaactttaaaaatatgcagtttatgtagatctatggtacctcaataaaactgttttaaaataaaaattacaaaattataagatttttaggttttaaggtttaagtttatcacaaaacaaactgacaataggaaagcacaatttcccaatgctttcaatatcacagatctccccgaggacattctgacatgctctgagccccactatctccaaaggcctctcaccccagagcttactatatagtaggagatatgcaaatagagccctccgtctgctgatgaaaaccagcccagccctgaccctgcagctctgagagaggagcccagccctgggattttcaggtgttttcatttggtgatcaggactgaacagagagaactcaccatggagtttgggctgagctggctttttcttgtggctattttaaaaggtaattcatggagaaatagaaaaattgagtgtgaatggataagagtgagagaaacagtggatacgtgtggcagtt

SEQ ID NO: 13289 - DNA, 2300 bp, Homo sapien
agtctcctttctaaatttataaactgggtgattcttccgttgaaagcacaagctgttgggaagagttatatggcaattccataaatgcctggaagacaagtgtggatagggtagggtaagaagtcctgggggctgcacaccccactctgatggaatttccctccagaaacttctgggttctcaagatgagaatccaaacagattccctcatggctctgtcatcaggagaactatactctgataagtatgcccagaacttcctccagacagaccctatagggaaaaaatacttttcaagatctttattctgtgaggggaagggattcttttccatcccagacagcttcatcttagccttcctgagtcatgaaaaggagtataattaataaaacatctggggtcagattcaagaaaataatctgtggatgctgcagccaggagggggagtggaggacggaggaaaatcagctgtaccactgaatactccttgtaaatggtacagcctagagaaagaatagcaagaaatcattggaattcaatttccagaacatatactgctcccctacccaccacatcacctcaccaccaatatgattatctggattaaagagaaaagtgtggaaaggcacagactccatctaaggactagaatttagggaaaccaaaggcagtgggagagaaaaagtcaaggacagtaaagtgacttaaaacctcttagaccaacagcttcaggaacaaggtcacatcctctccctcactgaaattagatttacctctcatggggcatctgcagggtgcgcaggtgagaactggcaaagagaacatgaaggcactttccaaatctccattagtacctagctcgctttagctgtttggaaaaagcaaaaccacaacaaacataaccaggactaggatcagtgttggaagcacttttcactggcaagacactaagaaggagggcaaattcgaggccagttactatgcaaatatgccactgtgagtgtgtgtggtggtgagctttgagacatagggtctgtgggtaaagttataatcgataaaatcttcaaccacagaatcctaaaaaaaagagccttccccaaagtcccatcagttcctggactcgccatgtgtctggaccgtatcagtggatccggagctccagggaaggggctccctgatggcttttatgattccttgcttgccgtgctgaggtctccctgtagattatgttgggttttctaaggcctattttctattgtaagaggtggtgggggaaacaatttctgtcactgaaagagcattctgagccagggcacagccccttcctactgagcttgagattctgggaggaaaaagttctctgacaggaggaaaaagttcccagacaggaacttccctgcagggcaggagctgagcggcagggggcgctcagggagcacccagcacaggacccagccctggggcaggtgcacaggaggctggggcagggttttctctcaggaattgaatgttccttatttcaaagcaataatgacctaacatttaaataagaatttagcaagtactgatgtgcctgtaagtattttattgtatacgcagcctatacctaacccaataatttaatgcaaaccggatttaaaaggagaaatgtctaggtctttcaaatgtatttctagttaggaattgaggggtggttttattaattcaatgggtgttactgtccggagacacactcatcccagaagttagatgtgcagagggcaaggctcaggaaaagttcaggtagacagtgagccatatgaacagggaatcacattgaggaccatgtcctgtgagattctgggtttctgtgagaggagttctgtcttcatggacttctgggcatgtcagaggacaaatattaaacaaagttcagggcagggagctcagcatcccactgtggcgtggtccacatgtcacctatcttcttcctcagggtggcgtggcctgagctatgaaaaacctgcctcatgaatatgcaaatgcactgctgtctaccgaggtaaatacagatctttccttgcccagagaccatcacacaacagccacatccctcccctacagaagcccccagagcgcagcacctcaccatggactgcacctggaggatcctcttcttggtggcagcagctacaggcaagagaatcctgagttccagggctgatgaggggactgggtccagttaagtggtgtctcatccactcctctgtcctctccacaggcacccacgcccaggtccagctggtacagtctggggctga

SEQ ID NO: 13290 - DNA, 2300 bp, Homo sapien
gtgcttccataagtgtgagccccagcagatcccaaagttttcaatgggttcatctagctagtgtctgtcctcagccccatccccaggctcctgccctggttggtgtccacagtgtcccagcagcggtgacagtgacagccagggcctgcactttccagagcagcaagtttggaagaatcaagtcccagaaccagcctggatttggggcaaacacacaaatttcactctgaggggaagtgctggaaagtagccttgagtcttcctcagctcacctgtggctgatcctctgcatcccatcagcgatacatgagccctccccaaccccagcgtggagctgtttcaatcgcagcaggatgggaatgtgtcttctttctggggactttttaagcacagctcttatgttcctgagatttgaggtttataaaggtgtgtcagtcacccacagagtggacctgcacaagtaagacaaggacaggatccccaggagaggcacctcatatgagacgggacaggcaggtcccatcacagacactggtcctcagaaaccctgaccagctactcaccttcccaggtcacctgtgtgtgatcagttcctgtgtttgctcctgaaaagatccccatcaagggtccccaggtcctgcccccttccttgatgtgcctctgggagtggggctggctgggctgtgggtctgctgtgactttccccacaggtcagcggctcagtgcaggctgcgccaactcggtggggctgggctgtggccgaccctcccagggggagcctggatgcttctcgggggcatctgcaggatcccaggttctgggagaacagggaagccacagtgtgtgcagggccccatctccaggtgtaaagtgtttgctgtcactctgttgacaagggcatatccccaggcgcaggggcactgtgggtgcacaaccaatgtggtagacacagagagtgaggcacatatccctcccattactgtggggaatataggcactgtgtgtgtgtgtgtgtgtgtgtgtgtgtgtgtgtattaggagttttgcagtgggctctgagccccgtgattttgtaggtttagaaattatctgatgagatgttcatccacaggaaccgacaagagattaggtgttctcccaaagcccctgggagctcctggactcattgtgagtgtggactgatccattgcttccagagctccacagaaggggctccctggtggtttcatagaatccttgcttggggtctttctgcagagttcactggctttcctacggccagtttagtattgtaagagatggtgtcagcagcacatggtatcacatgtcactaaatgagcattctgagccaggacacagcatcttcatactggggggagggaaatgctttgggagcccagacaggagcctctctgcagtgcaagggctgggctgcagggggcgctcaaggcccacccatcacaggctccacccccagagcaggtgcaccggaggctggggagggattcctctcaagatctgtgtcattcttctaaaaaaaatctaaaatgagtatttgacaaagactgctgaacattctataaatatcctattcaattgtgagcatttatcaaatttgatgttgtaatgagaaccacttttatactagatatttctaaccctgctagatatcttaatagtatgcagctggaggttaagcaagcttttcttttatataaataagtgcaactttggagaaacacactcatcccccgaataagacattcatgtattaaagcctagaaatactttaaattacctctgagccattcaagtgtgtgttcacagtgaagtcctgttctagggaaaattgttctccagggggagaagctttgtcaacatagagcttagggatgtatcaggaggcacatgacctctaaggggattatagcttgaacccttagcatcctcctgttggtaatacatgtgtcactctccaatctttctcatgcagtatcaggtatgaaataggatcgctcatgaatatgcaaataactgaggtaaatatagatatctttgtgccttgagagcatcatccaacaaccacaactctcctcagaagaagcccctagaccacagcacctcaacatgtactggacctggaggatcctcttcttggtggcagcagcaacaggtaagggacctcccagtcaccgggctgagagagaaaccaggccagtcaagtgagacttcacgcactcctgtctcctctccacaggtgtccactcacaggtgcagctggtgcagtctgggcctgaggt

SEQ ID NO: 13291 - DNA, 2300 bp, Homo sapien
ctgatttcttcagtttctgccttttccttttgaataaggctgttactcctgagggaagatgggaggtgggcctggacagggacttggtgcattcctctctcccctcccagttcttattggtttctccagtgtctgtagaacagtggttttgatggctttacctctgcagataatttctcttgcaatgtagtggtgatggggaggtgtgtctggatgcatttcagctgtagttgctgttttgctttcccagacagcaccatcccaaggggtagaggctggagcattttgtgatgtatccccagtactgaagaaaaaggcttcaatagcaggaggaattcctcaactgcatacactctgagaatttaaacaataacttctctatcacactcaaattgaaaccacccaatgaatatgtctactttaatcgtgtgctaacttaaatgacatttggcagcctctgtcccagaaaagattatcatctgctcctgtttatttccctgcaagtctttatgtctgttcagatttcagatatattgtttgtcctataacatcaaaaatttgatgtatatatgctaatttgcagatcagtaagtttagtatttgttataagaatagtaacatatttttatggggtgcttacatctccaagctgagaagcacctctgtgtaatactaagcaactagaaatggtacaaataccaagaagatacatagataaacagtaatggcatgctaatttatggtaataacatccatcattagaatcaatacattgttgatgctcaacatgtgtgcatcataagtagttatgtgcgagaagccacacaaataaaacacatactatgtaattcctgtataataaattctcgaaactcaaaactaaggtattaaatgtgaaggactgactcagaatatggtggaggaagaaaataattgggaaggaggaattgtagaggaacacaaggaaacttttaagtgtaatttgtttattcattatttggatggcttttggggatgcacaggtgagcacgagtggaataacattttgttttgtttgtttgtttgtttttttctgaagagatgtggtcctactctgcgacccaggctggagtgtagtggtgggatcatagttcaatgtagcctccaacttctggtctccaacaatactcctgcatctgccatctaagtagctggaactaccgttgtttgccagcaggcttggcttgagtacttattaaaccgcacactttttgcaatatttaatgtatagtaataatgtctcaataagactattacaaatcaatgaatgaataatttgttctgtacagatttatggaaaaatagacactaacatgatgaatgactgacatttatgaaaatacagctgcatgaaatgtgcttctctttacattcattaggtaaacacataggtgcatacacatcacaccgcgctttcattacaggaagaaacatctgaaaatgtcactggggtgaaccatattgtgctgggcttggttcaggaagcagtcaggcccagtgttgtgaccttcaaccacagaatcctaaaaaataataaaagaggctcccccaaagtccccatcagttcctggactcgccatgtgtctgggccgtatcagtgcatccggagctccctggtggctttagggattccttgcttgccatgctgaggtctcgctgtagattatgttgggttttctgaggccgttttgctatttaagacccactccctggcacagagcgattccctctaaacctgatagaggttctgaactacaaataacgttaagtgaatcctggtgtgtctgaactcacatgattgttacattaagctgctgttgcaatctgtttcctcacctgggaaaagaggagccaggacatagtgagttgaggccccaggaagataactgaattctcagagggcacaaccagcatcctccttccagggagagcctaaaagactggggcctccctcatcccttttcacctctccatacagaggcaccacccacatgcaaatctcacttaggcacccaagggaaaccatcacacatttccttaaattcagggtcctgctcacatgggaaatactttctgagagtcctggacctcctgtgcaagaacatgaaacacctgtggttcttcctcctgctggtggcagctcccagatgtgagtgtctcaaggctgcagacatggagatatgggaggtgcctctgagcccagggctcactgtgggtctctctgttcacagtggtcctgtcccaggtgcagctgcaggagt

SEQ ID NO: 13292 - DNA, 2300 bp, Homo sapien
ccagctgaggagggatgctgtttggggaagatctctcttggaggtctaagggaccccaggaaaagggagccattatcccaggcttcagttgcatgaccatttggagtttgatggtctgaaaatgagaagaggcaaatctggttattagaagacatgtatgaaaaccaaacaaggtggcaaggacagcttgaaagaaaattccaaggctgctgacattcctagataactgcagctgtagttatgcctgctaaggtttgggcgcatggggcttggcttttgtcagctccctgggatttattttcccaaacaaagaaacctccaggttaggggcaccctattcattcccatcacctggcatgatttaaaggataattgcttagaattaaaatattgatccagattttttatattccccatcgctttttgtttcttctgggctgtagccagagatcattgattggcgctcaggaataagcagagttagtctaaaatgcaggcaaatacttaaacaactgaagagattagaatttaaagacaagtgtatgatatgttttgaaatacaatgtttctctttccagttttggtttttgtcagcagcaaataatgataagactgagttgtttgcaaaataaactttagtcttaaacttggcctgattatttgcataaagtgcagcaagaatattaataataattctgtaggaaaagcctgcaagcaccaggagcttcacagtctaacactatgagcacgtgcatcctcacgcaactcactgaatatgtccaagtcagcctgttccgatcttaaatgccatccagtggcatctgccccaggtacactaatacatgggtcctgcttctctctgcagccgcctctctcctcagatttcaggttttgtgtattgtttgttttctctctgacatcaacacagatatgttgaaggttttcttttttttatttgtagttgttcagctttgttgttaatgaggtcagaataagctcatagtttacacatttttacattcccatgccgagtagctgcttttctctatcaaatccattaactgagagaacaatcacatttcgttacaggtgaacagttaaatagtttggcatatatttctgtgctggaatctaatgcagcttgaaatcaagtcatgcctcactcattgaaaaaaacatggctaaattctcaaagaattgtgctgagtgaaagaaactaaggaatgaagagtaaattttatatgatacatttgtagaaattttagaagatgccactattataaattaacatggagaagatttatatgtttctgagaatatgctattgggagtaatggggatgtgagttaaatttcagaggaataagagaaagatttagggattaatttattcacaccttgattgaagtgctgagtaaatggttgcacacataggtctacatttttcaaatcattcaccataaatttgaattatttattaattacactcgaataaagcaataaagaaactgatgagataatatttgtctgaattgcagcaataaatagatcgatattaacacaaggaatataactgacttccccaaacatacacatgtgccgtggttcactctgcgtatttaggtaaataacagagagttgtcataacagatggggaatcctgcagacttcactaggcatgggccatactcccctggagttgtctcaggggagctgcctcctccagaggttagagcacaggcccaggtaataggactaaatttttagatgtgttatcttagacacactgcacacctgctgtgttctctatgtaaattatctcctgtaaaatataacattgaagcctgcattaaatatattgtgtaaatatgtaagaataaaagaaagttatgagagctaagtgttaatcaaggcacaagcatataagatataactatattttcctgaatgatggaattactaccagtctcccccaggacacttcatctgccctgagcccagcctctcctcagatgtcccacccagagcttgctatatagtgggggacatgcaaatagggccctccctctactgatgaaaaccagcccagccctgaccctgcagctctgggagaggagcccagcactagaagtcggcggtgtttccattcggtgatcagcactgaacacagaggactcaccatggagtttgggctgagctgggttttcctcgttgctcttttaagaggtgattcatggagaaatagagagactgagtgtgagtgaacatgagtgagaaaaactggatttgtgtggcattttc

SEQ ID NO: 13293 - DNA, 2300 bp, Homo sapien
tttctgccttttccttttgaataaggcattattcctaagggaagtcgggaggtgggcctggacagggacttggtgcattcctctctcccgtcccagttcttattggtttctccagtggctgtagaacagcagttttgatggctttacctctgcagataatttctcttgcaatgtagtgctgatggggaggtgtgtctggatgcacttcacctatagttgctgttttgctttcccagacagcaccatcccaaggggtagagggtggagcattttgtgatgtatccccagtactgaagaaaaaggcttcaatagcaggaggaattcctcaactgtatacactctgagaatttaaacaataacttctctatcatactcaaattgaaaccatccaatgaatatgtctactttaatcgtgtgctaacttaaatggcatttggcagcctctgtgccagaaaagattatcatctgctcctgtttatttccctgcaagtccttatctctcttcagatttcagatatattgtttgtcctataacatcaaaaatttgatgtatatgtgctaatttgcagatcagtaagtttagtagctgttgtaagaataataacatatttttatggggtgcttacatctccaagctgagaagcacctctatgtgtaatactaagaaactagaaatgatacaaatatcaagaagatacgtagataaaaagtaatggcatgctaatttactgtaataacatccatcatgagaatcaatacattgttgatgctcaacatgtttgcatcataagtagttatgtgcgagaagccacacaaatagaacacatactatataattcctgtataattcttgaaactcaaaactaaagcattaaatatgaaggactgactcagaatatggtggggaagaaaatatttgggaaggaggaattgtagaggaacacaaggaaacttttaagtgtaatttgtttgttcattatttggatggcttttggggatgcaaaggtgagcacgagtggaataacattttgttttgtttgtttgtttgtttttctgaagagatgtggtccttctctgtgacccaggctggagtgtagtggtgggatcatagttcaatgtagcctctaacttctggtctccaacaatactcctgcatctgccatctaagtagctggaactaccgttgtgtgccaggaggtttggcttggcttgagtacttattaaaccacacactttttgcaatatttaatgtatagtaataatgtctcaataagactattacaaatcaatgaatgaataatttgttcagtacagattcatggaaaaatagacactaacatgatgagtgtctgacatttatgaaaatacagctgcatgaaatgtgcttctctttacattcattaggtaaacacaatagtgcatacacatcacaccgtgctttcattacaggaagaaagttctgaaaatgtcactggggtgaaccacacggtgctgggcttggttcagggagcagtcaggcccagtgttgtgaccttcaaccacagaatccttaaaaaaaaaaaaaaaaaaaaaaagaggctgcctcaaagtccgcatcagttcccggactcgctatgtttctggatcgtatcagtgcatccggatctccctggtggctttagtgattccttgcttgccatgctgaggtctcgctgtagattatgttgggttttctaagaccgttttgctattgtaagatccactccctgggacagagcgattccctctaaacctgatagaggttctgaactaaaaataacattaagtgaatcctggtgtgtctgaactcaagtgattgttacattaagctgctgttccaatctgtttcctcacctgggaaaagaggagccaggacatagtgagttgaggccccaggaagataactgaattctcagagggcacagccagcatcctcctcccagggagagtctaaaagactggggcctccctcatcccttttcacctgtccatagagaggcaccacccacatgcaaatctcacttaggcacccacagaaaaccaccacacatttccttaaattcagggtcctgctcacatgggaaatactttctgagagtcctggacctcctgtgcaagaacatgaaacacctgtggttcttcctcctgctggtggcagctcccagatgtgagtgtctcaaggctgcagacatggagatatgggaggtgcctctgatcccagggctcactgtgtgtctctctgttcacaggggtcctgccccaggtgcagctgcaggagtcgg

SEQ ID NO: 13294 - DNA, 2300 bp, Homo sapien
ccagctgaggagggatgctgtttggggaagatctctcttggaggtctaagggaccccaggaaaagggagccattatcccaggcttcagttgcatgaccatttggagtttgatggtctgaaaatgagaagaggcaaatctggttattagaagacatgtatgaaaaccaaacaaggtggcaaggacagcttgaaagaaaattccaaggctgctgacattcctagataactgcagctgtagttatgcctgctaaggtttgggcgcatggggcttggcttttgtcagctccctgggatttattttcccaaacaaagaaacctccaggttaggggcaccctattcattcccatcacctggcatgatttaaaggataattgcttagaattaaaatattgatccagattttttatattccccatcgctttttgtttcttctgggctgtagccagagatcattgattggcgctcaggaataagcagagttagtctaaaatgcaggcaaatacttaaacaactgaagagattagaatttaaagacaagtgtatgatatgttttgaaatacaatgtttctctttccagttttggtttttgtcggcagcaaataatgataagactgagttgtttgcaaaataaactttagtcttaaacttggcctgattatttgcataaagtgcagcaagaatattaataataattctgtaggaaaagcctgcaagcaccaggagcttcacagtctaacactatgagcacgtgcatcctcacgcaactcactgaatatttccaagccagcctgttccgatcttaaatgccatccagtggcatctgccccaggtacactaatacatgggtcctgcttctctctgcagcctcctctctcctcagatttcaggttttgtttattgtttgttttctctctgacatcaacacagatatgttgaaggttttcttttttttatttgtagttgttcagctttgttgttaatgaggtcagaataagctcatagtttacacatttttacattcccatgccgagtagctgcttttctctatcaaatccattaactgagagaacaatcacatttcgttacaggtgaacagttaaatagtttggcatatatttctgtgctggaatctaatgcagcttgaaatcaagtcatgcctcactcattgaaaaaaacatggctaaattctcaaagaattgtgctgagtgaaagaaactaaggaattaagagtaaattttacatgatacatttgtagaaattttagaagatgccactattataaattaacatggagaagatttaaatgtttctgagaatatgctattgggagtaatggggatgtgagttaaatttcagaggaataagagaaagatttagggattaattttttcaaaccttgattgaagtgctgagtaaatggttgcaaacataggtctacatttttcaaatcattcaccataaatttgaattatttattaattacactcgaataaagcaataaagaaactgatgagataatatttgactgaattgcatcaataaatagatcgatattaacacaaggaatataactgatttccaaaaacatacacatgaaccatggttcactctgcgtatttagataaattacagaaagttgtcataacagatggggaatcctgcagacttcactaggcatgggccatgctgccctggagttgtctcaggggagctgcctcctccagaggttagagcacaggcccaggtaataggactaaatttttagatgtgttatcttagacacactgcacaactgctgtgttctctatgtaaattatctcctgtaaaatataacattgaagcctgcattaaatatattgtgtaaatatgtaagaataaaagaaagttatgagagctaagtgttaatcaaggcacaagcatataagatataactatattttcctgaatgatggaattactaccagtctcccccaggacacttcatctgccctgagcccagcctctcctcagatgtcccacccagagcttgctatatagtgggggacatgcaaatagggccctccctctactgatgaaaaccagcccagccctgaccctgcagctctgggagaggagcccagcactagaagtcggcggtgtttccattcggtgatcagcactgaacacagaggactcaccatggagtttgggctgagctgggttttcctcgttgctcttttaagaggtgattcatggagaaatagagagactgagtgtgagtgaacatgagtgagaaaaactggatttgtgtggcattttc

SEQ ID NO: 13295 - DNA, 2300 bp, Homo sapien
ccagcctgggcaacagaataatcttgtctgtaaaatacaaaagaaagataaattaatagatactgactttgacatttcggataataatattttcataaaccgaatttaattatacccacattgttacctacaccttcactgaaaagttcctagttatgttgagttccatcaacactccacatgttcaaatctggacatccaagagagtctagagaataaaacgcaatgagggcagtgaaacttgcgtatattcagcacctcttaactcaggaggactcaatacaccctggaacactctgcttttctgaatggctcacaatgactccagctcactctccaacctcctcaaacatctggcctctgtttgccctaagttcacgctctgctcttagtctatgttctgaagtctttgtagaggtgaaaatgagctgtcagatggatcttccttctcactgcaacatggaatttgctatttcacttaatgaccactctttccacaatggttgatttcttttggcctgttcattactggtgattttcaagggaatctcagttgaatctttactgttttgcattttgtctccatgacaatgttgggaagtttttcttctagcagcataacatgatctagtgacctgacacatttgcagcaaacaatacctacaaattcagaagctctttggttttctttccacgaaatataattcttgctcttctgtgtatgagcacatcctagcatccctgtacacacccaggtagatgtaaacacgccgatgaaatattccctgtaaataaaaaaagtatctcagtttctctcaatgttcataattctcctgagggtgaggaaggtacttctgggtctgctcaaacaaatggcccagagaccacctggtaggtaggtaaggagctcacctcgctctggatattgagtctgtctctttccctctgtcgtctcatagaaggccagcccacttgttcagctcctaagaagagagcccaggtttatccagattatacaacacaaccagcttctgatgactctcctgttacaacatccatggagatattttgtgtattatataattcaccaaactaatgtgaaatgcccaagttgcaatactgcacaccctagggtatgttcttgcaattcagcggaggagaaattctttcagagacagatggatctgaattggtaaatatgtgggtacgaattctgggtttgagtgtcattgtccagccatgtttcacaggtgtgacctgtcagggaagaaccagagttccttgttctctcagagggtagagctcacagaggtcctctctggttcccaggaaaggtaatttcactaatcttggtgatgagactatcctccagtgctgatgtactatagagttttcatctgaagctgtcactgctatccccaatgtacatcttttcacacagaaatgtttagaggtcaggccatattctcagggttacacattgagaaggatggagatatattctactaccttctcctgagatctcacacacaatctcaaatttcaaaaggtctcagaagggcagctctcaggtactatttaaaaataacccacttcctgggacaggtagcatccttctaaccatgatggatgttctgaactacagtacacattgcatggatccaggtttgtctcaattcactgtgattattacactcagcagctgtttcaatatgtctgaaggggtaaatgacaatttaggtgacctgggtgtatggttggtgttatatgaatctttaaatgtagaacagtattaactgtattccaaaatctgtctttgatccatgatcacacttgtctcccagaccagctccttcagcacatttcctacctggaagaagaggactctgggtttggtgaggggaggccacaggaagagaactgagttctcagagggcacagccagcatacacctcccagggtgagcccaaaagactggggcctccctcatccctttttacctatccatacaaaggcaccacccacatgcaaatcctcacttaggcacccacaggaaatgactacacatttccttaaattcagggtccagctcacatgggaagtgctttctgagagtcatggacctcctgcacaagaacatgaaacacctgtggttcttcctcctcctggtggcagctcccagatgtgagtgtctcaggaatgcggatatgaagatatgagatgctgcctctgatcccagggctcactgtgggtttctctgttcacaggggtcctgtcccaggtgcagctacagcagtggg

SEQ ID NO: 13296 - DNA, 2300 bp, Homo sapien
ccaagttaagtgagtcagtaaagctgctctgagctacagtaaaaattggattgggcccgatttgtctgagttcagtgtaattattatactcagctgctgccccaatatagactgaggatggataatttaaatgagcctggctatgtggtttgttatatatctgaactaaataaacataaagggcctgtctggactagcgtgagggtgagagatcctgggagccccagccccccatactcttatctcccttcctccaggaacctctaggttctcagggtgagaatccacaagatccattcatggctctattaccaggagaccaaaatctctgaccttgttcatacagacaaacaggcgaaggacatttttagatccttatctatgtggcgaaaggcaatctatccccattacaagccttaccagcaaccttcctttgtcatgaaaatgggtaaaattagccaataagattacatttaagaaaattttcctgtgatgttccagccagaaaacagcaaaaatcagcttcacacctggagacttcttgcatcggtcacagcccagagaaagaagatcaccatagcattaaaatgcaactgtaagaacatgtaatgcttccatgttccacgcattacgtctcaccagtttagtcaatatggattaaatatgagagtgtggcaattcgcaaactctatctgaggaggaaaatcggataaaaaatgttatgaaaaataaagcaatttgaagcctctgacttcagcaacttcaccactaatgaaatgatgtaaccctcattggcctcaaatttagttttcacggggcatctgcagggttccaaagtgagaccaggtgaattcaatgtgcatgcacttcccaagtgtccacttgtattctgtttctttacttctgtttacagaaagtagacacatattcagtcttagtaccagtgtagggagcgctttccatgagatggataccagaaaaaaatggcaaacatgggatccgttaatataaaaattagccacgatgtatatatatatatgtgtgtgtgtgtgtgtgtgtgtgtgtacacacgcgcgcgcatgtgtgagttgaatagcagagttggagtgggtttctatccacatgtacctgcacctgcaggtattctcaggtgccataatcaactgtaggaccctaaaggaaataagagtctcccctcaacccctgaagagtgtttgggttcaccgtgtgtccaatgattctgtgcctcttgagctccaggaaagggctccctggtgatgcatgagatcttttcttggagtctctctgcagagttcactgggtttcctaaaggcaattcactatttcaaaagatggtgtgaggagcatgtggtgtccctaaaggagaattctgagccagggcacaaccactttatactgagctggatacactggtaggaatatactctgtcagctcagatagaaacctccctgcatggttggggctgggctgcagggggcgctccggatacacccagcacaggctcccgccccagagcaggtgcacaggaggctggggagaggttcctcccagggcctgggacttcctttaaaaatatctaaaataagtatttcacaaagactgctgaagtttgtataaatatctattcaattgtgagcatttatcaaactggatgttgtaatgagaaccacttttacaatggggatttcaaactctgctggaggtcaggaagagatcctttcttataaataaatgcaatttttggataaacacagtcattccctaaataacgcattcacatattatggtctagaaatgatgcaagttgaccctgagacagtcaaatgtggtttcaaagtgaggtgctgtccttgaggagcttgttctccagtgggggaagctctgtcaacacagagttcagggatgtgtaggggacacatggcctctaacaggattacggcttgaaccctcagcttctacagttgtgtcacccatgtgtctgtttctcatactgggtcaggaattgggctattaaatagcatccttcatgaatatgcaattaactgaggtgactatagtatctccgttccctgagagcctcacccaacaaccacacccctcctctggagaagcccctagatcacagctcctcaccatggactggacctgaaggatcctcttcttgatggcagcagcaacaggtaaggggctccccagtctcagggctgaggaagaaaccaggccagtcatgtgagacttcacccactcttgtgtccactccacaggtgcccactccctg

SEQ ID NO: 13297 - DNA, 2300 bp, Homo sapien
acaagatggaaaatatggctaataatgcattatatatttcaaaatggctaaaaatgcaaatgttaaaaattttctcactaagaaatgatacagcctgggcgcggtggctcacacctgtaatcccggcactttgggaggctgaggcgggcgaatcacaaggtttggagttcaagaccagcctggccagatggtaaaaccccgtctccactaaaaacacaaaaaatagccaggtgtggtggcacgcggttgtaatgccagctactcgggaggctgatgcaggagaattgcttgaacccgggagacagaggttgcagtgagctgagatcatgccactgcactccagcctgggtgacagtgagactccaactcaaaaaaaaaaaaaaagaatgaaatgatagctgtgtgaggtgatggatatgtcaaatagcttgattaacaattccataatatatacatgtatcatagcatgtgtgaggtgacctgtatgaaggtgaagtgacctgggggctgtgtaagattacctgggggtatgtgtgaggtgaacacggcacatatgaggtgaccagagacacatgtgaggggacatgggagatatgtcgggtaagccagggggatttgtgaggtgacacagagcaagtgtgaggtgacgtggatgcatgtaaggtgatttggggcacatgtgaggtgacgtgggggatatgtgtgagctgacctcgggtgagtgtgaggtgatccaggatggatgtgaggtgacctgggggtgtgtgtgaggtgacttgggcacatgtcaggtgacatcggggattggtggtgatgtgggtgtgtgtgaggtgacctaaggaggtatgaggtcacctggggcatctgtggggacctggaaatgtgtgaggtgggtacaggtgaagtcacctagggcacatgtgaggtgacctgtggaatgtgtatggtgacctgggaccgtttgaggtgacatggggaatgcgtgaggtgacctggggcatgtgtgaggtgacaaagggcatgtgtgcagtgacctgggtgcatgtgaggtgacctggtgcatgtgttaggttacctgggggatgtgtgaggtgaacaggggcaggtgtgaagtgcctgaggaatgtgtgaggtgaactggtgcatgtatgtggtgacctgggggatttacgaggtgacctgcgggatgtgtgaggtgaccttgggtgagcgtgaggtgacctgacgtatgtatgaggtgaccagggtgtgtctgaggtgatgtggggtatatgtgcggtgacctggtggatgtgtgaggtgacctgcaggatgtgtaaggtgacactggggatgtgtgaggtgactcagggcacatgtgaggtgaaattggggatgcgtgaggtgattcagggcatatgtgaggtgaccttggggatgtgtgaggtcaccttgggtgagtgtgtggtcatctgggatatttcccaacttcgtaaggaaagcctgcaacaacacatggcattagaagcttcacactctagcaccattaatgcgtacatcctcaaggaactctaaatgttttgaggttagcttaaatgccatggagcggcaccttccccaggcacactcatatatgcatcctgggtctccctgccaagctgtatctcctcaaatttacagtttatgtttgctctgtgacatcaactctgatatgttcaagtgtgtttttttttctttatttgtagttgttcaggcttgttgtttcactctcattactctgggctcagtcctctcctcaggtgtcccacttcagagctcgctgtgaaataggagacatgcaaatagggccccccctttcctgataaaaagcagcccagtcctgaccctgcagccctgggagagaagcaccagccctgggattctcaggtgtttccactttgtcatcagcaacaaacaaattaccatggaatttgggctgagctgggtttttcttgctgctattttaaaaggtgattcatgaagaactaaggatattgagtgagtggacatgagtgagagaaacagtggatttgtgtggcagtttctgaccagggtgtctctgtgtttgcaggtgtccagtgtgaggtgcagctggtggagtctgggggaggcttggtacagcctgggggatccctgagactctcctgtgcagcctctggattcaccttcagtaacagtgacatgaactgggtccatcaggctccaggaaaggggctggagtgggtatcgggtgttagttggaatggcagtaggacgcactatgcagactctgtgaagggccg

SEQ ID NO: 13298 - DNA, 2300 bp, Homo sapien
gcgatttcactgtagtttgtttaaatggtagactcacagaagtagagtggagtgttggttaccaggggctggaggggtggactggaaaaggcgagattttggtcaaagggtgaaatgttccagttagacagaaggagaaagttacagtgttctaatgcacaagatggaaaatatggctaataatgcattatatatttcaaaatggctaaaaatgcaaatgttaaaaattttctcactaagaaatgatacagcctgggcgcggtggctcacacctgtaatcccggcactttgggaggctgaggcgggcgaatcacaaggtttggagttcaagaccagcctggccagatggtaaaaccccgtctccactaaaaacacaaaaaatagccaggtgtggtggcacgcggttgtaatgccagctactcgggaggctgatgcaggagaattgcttgaacccgggagacagaggttgcagtgagctgagatcatgccactgcactccagcctgggtgacagtgagactccaactcaaaaaaaaaaaaaaagaatgaaatgatagctgtgtgaggtgatggatatgtcaaatagcttgattaacaattccataatatatacatgtatcatagcatgtgtgaggtgacctgtatgaaggtgaagtgacctgggggctgtgtaagattacctgggggtatgtgtgaggtgaacacggcacatatgaggtgaccagagacacatgtgaggggacatgggagatatgtcgggtaagccagggggatttgtgaggtgacacagagcaagtgtgaggtgacgtggatgcatgtaaggtgatttggggcacatgtgaggtgacgtgggggatatgtgtgagctgacctcgggtgagtgtgaggtgatccaggatggatgtgaggtgacctgggggtgtgtgtgaggtgacttgggcacatgtcaggtgacatcggggattggtggtgatgtgggtgtgtgtgaggtgacctaaggaggtatgaggtcacctggggcatctgtggggacctggaaatgtgtgaggtgggtacaggtgaagtcacctagggcacatgtgaggtgacctgtggaatgtgtatggtgacctgggaccgtttgaggtgacatggggaatgcgtgaggtgacctggggcatgtgtgaggtgacaaagggcatgtgtgcagtgacctgggtgcatgtgaggtgacctggtgcatgtgttaggttacctgggggatgtgtgaggtgaacaggggcaggtgtgaagtgcctgaggaatgtgtgaggtgaactggtgcatgtatgtggtgacctgggggatttacgaggtgacctgcgggatgtgtgaggtgaccttgggtgagcgtgaggtgacctgacgtatgtatgaggtgaccagggtgtgtctgaggtgatgtggggtatatgtgcggtgacctggtggatgtgtgaggtgacctgcaggatgtgtaaggtgacactggggatgtgtgaggtgactcagggcacatgtgaggtgaaattggggatgcgtgaggtgattcagggcatatgtgaggtgaccttggggatgtgtgaggtcaccttgggtgagtgtgtggtcatctgggatatttcccaacttcgtaaggaaagcctgcaacaacacatggcattagaagcttcacactctagcaccattaatgcgtacatcctcaaggaactctaaatgttttgaggttagcttaaatgccatggagcggcaccttccccaggcacactcatatatgcatcctgggtctccctgccaagctgtatctcctcaaatttacagtttatgtttgctctgtgacatcaactctgatatgttcaagtgtgtttttttttctttatttgtagttgttcaggcttgttgtttcactctcattactctgggctcagtcctctcctcaggtgtcccacttcagagctcgctgtgaaataggagacatgcaaatagggccccccctttcctgataaaaagcagcccagtcctgaccctgcagccctgggagagaagcaccagccctgggattctcaggtgtttccactttgtcatcagcaacaaacaaattaccatggaatttgggctgagctgggtttttcttgctgctattttaaaaggtgattcatgaagaactaaggatattgagtgagtggacatgagtgagagaaacagtggatttgtgtggcagtttctgaccagggtgtctctgtgtttgcaggtgtccagtgtgaggtgcagctggtggagtctgggggaggcttggtacagcct

SEQ ID NO: 13299 - DNA, 2300 bp, Homo sapien
ctgttattcagatttgacaagctgcagatggacacatcacgtttctgtaagacttaggggatgacagttttgaggcatggctggggaagtacaatgtccataagattgaccctcaataagtgcaggctgtaagtctcagagctgaagctgctgaatcaccatagaatttcatctttagttctgctctgatggaatcaggcccacctgtgtaatgaatgacactctacctaacctagagtcaactgatgacaggttaaatatctagacagcaaatttgcaacaccacttagattagtgtttgaataactacaaagtatagccgagccaagtatatcgtaaagcagactattatacatggagaatctttaacatgacatctacaattcttaattttttttacgtataaaactgatggttttacaatcaggctgtcatgattttgctaatgagttgtagaagttacatgtatgttttaaatattaacagttttttcagatgcctggtttgcaactatattctcccattctgtagatttggaattttttccatgctttgcaaaatctttatattttgatgtagttccagtccttcaattctgcttttgttgtctgtgcttttaatcttaaatttaggaaatcattgctaaccttttggtgggagagaattttacaattgcaggctatacatttaactgtttaacccatctagagttgattttttgtgtttattctaacctaatattcttaactatttgcaagtgaaaacccagtttgtttaacaccctctttaggggagagtatgatttagccgttgtgtagaaaatgttataaatcactttgccttcatattggttctcaacttgaaaatgagtttgccatcaatacgtgggtttatttctgagctctctatatgtatttatgccagtaccatcctgttttgattatgtttgtaattaattttgaagtctgagagtaaaatgcctccaagtttattcttgcccttttgcagatattagacaaaatattttaacatttcaccatgaagtatgataacagctatggcttttcataatgaattttattgtgtttaggttattttcttgtatttctattttgggtagagtttttatggtgaaaccttgaatttttttaatgttattttctgtctgagaagttaatgggaccttcttcgtatttaatttggcataccaaatgtattgatttgaggattttgaatcatctgtgcatctcaaaaataaatttgagttggtcatggtgtatgatccttctaaagtcctgtggaacttagttgactattatttggtgtgtggagggggctcatttatgtctactaggaatattggtctgtagtttacttttttgtgaccttgtctattactgaaaatacggtaatttgggccttatagaaagactggaaggttggcatctcaccaatttttgaaaaagttagagaatggttggcattacttctttaaatgttgagagtcctttttttacttaacatgtgacctatcatggagaatatttagtctttgcttcggaagcatacatattacactgctcttggttggaaggttctgtagatgtctattaggtcaatttgttcaatagtgttgttcaagtccactgtcttcttaagaattctcttaatgatgttctatccatcattgaaagtgaggtgctaaagtcttctcctaatttttattattttctatttatctctccatatctcttaaggtttgcttaatgcagttatatttatttttgtacaaatatgtaaaaaataaatgaaataataattgctaagtaattttaatggcaaaatcacataataagaaattatattttcccaaatgctgtcattgacactaagctcctccaggaatctcacatctgctctggacacggctctcctggtgtcctaccccagagcttgctatagaggaggagacatgcaaatagggccctcactgtcctgatgaaaaccagccttgcctgcgtctacgggagaagagccccagtccagaagtaccaggggtttccatttggtggtcaggtctctgaacacagaggactcactatggagtttgggctgagctgggttttccttgttgctaatgtaaaaggtgactcatggagaactagagatattgagtgtgagtggacacaagtgagagaaacagtggatatgtgtggcaggttctgaccagggtgtctgtgtgtgtttgcaggtgtccagtgtgaggtgcagctggtggagtctttgggaggcttgttata

SEQ ID NO: 13300 - DNA, 2300 bp, Homo sapien
aattaatagatgacactgcactccagcctgcacaaccaagcaagtcttcatctgtaaaatctaaaaaagaaaaattaataggtactgacttcgaaatttttgataataatattttcaccacccaaatttaatcacacccacatgttacctgcatcttcactgaaaagttcccagtcacgatgagttccttcaatgctccatgtgttcaaatctggacatcaagagagtccagagaataaaacacaatgacggcagtgaaactgatatatattcagcacctcttaactcaggaggactccatacaccctggcacacaggtgcttttctaaatggctcacaatgactccagctcactcacagagctcagacagaaacctcccttcagggtgggagctgggtggcagggggcactcagtacccgcagaggtgaaaatgagcttcagatggaacttccctgtcacctcaacatggaatttattgtttcatttcattacctctctttccataatggttcatttcttttggcctgttcattactgatatttttcagagcaatctcacttgaatctttactcttttggattttgtctccttgacaatgttgggaagttttacctccagcatcataacatgatctagtgatctgacacattgtgcaaacaatacctacaaattcagaacctctttgtttttctttccacaaaatataattctttctgttctgtgtatgagcatgtcttagcaaccctgtacacacccacatagatgtctacaagcctatgaattgttctctgtaaataaaaatttatctcaaattccttcaatgttcataattctgagagtgaggaaggtccttctcaatctgttcaaacaaaatgcccagagaccatccagtaggtaaggagttcacctggctctggtgtggggtctgtctctttccctctgttgtcccacaggtcagcccagttgttcacgtcctaacaagaaagcccaggtttgtcctgattttaaaacacatcaaacttctgatgactctcctgttacccacatccatggagatagattatttattatataattcagcaaactaatgtcaaatgcccaagttgcaataccgcacatcctagggtatgttcatgcaattcaatggaggagaaaatctttcagagacagatggatctgaaatgataaatatgtgggtaaggactctgggcttgagtatcattgtccagccatgtttcacaagtgtgtcctgtcagggaaggatcagagttccttgtgctctcagagggaaggggtcacagagttcctctctggttcccaggaaaggtaatcgcactaatcttcatgatcttcatgagactatcctccagtgctgacctgttacggagtttttgtctgaagttctcactgtaatccccaatctacatattttcaatcagaagtgtttagagggcaggacacatcttcaaggtcacacattgagaagtatggagatatgtcccactaccttctcctacgatctcagacagaatcccaaatttcaaaaggacacagaaggacagctctcaggtgcttttaaaaaatgacccacttccagggacagtgagcttccctgtaaccatggtggatgttctgaactacaataaacattggatggatccagtattgtttgaagtcactgtcattattacattcagctgttgtttcaatgtgtctgaaagggtaaatgactatttagatggcctgggtgtgtggtgggttttatatgaatctttaagggttgaacagtactgaccctattccaaaatctgtccttgatccaggatcacactcatctctcagaccagctccttcagcacatctctttacctggaagaagaggactctgggcttggagaggggaggcccaagaagagaactgagttctcaaagggcacagccagcattctcctcccagggtgagctcaaaagactggcgcctctctcatcccttttcactgctccgtacaaacgcaccacccccatgcaaatcctcacttaggcgcccacaggaagccaccacacatttccttaaattcaggtccaactcataagggaaatgctttctgagagtcatggatctcatgtgcaagaaaatgaagcacctgtggttcttcctcctgctggtggcggctcccagatgtgagtgtttctaggatgcagacatggagatatgggaggctgcctctgatcccagggctcactgtgggtttttctgttcacaggggtcctgtcccagctgcagctgcaggagtcgg

SEQ ID NO: 13301 - DNA, 2300 bp, Homo sapien
cctgcctcagcctcccgagtagctgagattaaaggcatgcaccactcccggctattttttttttcatatttttagtaaagatgaggtttctccatgttggtcaggctggtctcgaactcccgaccccaggtgatccgcctgcttcagcctcccaaattgctgggattacaggtgtgagccgcacaaacgtttataaaaaacctactttgcaccaggcattgtgctaggcaccctcactgtgtgctgttcccgcaccacaatcatccgctcagaaattaaaaccaagaaaaggaacattgtcgcaaccatacaaactggggggcagagggcaatatcgtggatgcaggtgatccccaggccagaaaatgtacccaccagaaacctgtttggcatctcgataagtctccactaaacagttgttttaaagcctctcgttattgacggagaggaatgttgttctccctgtgccccctgggcctggcgcctgatggacattcaaataccctgaatgctattcgataaaaggagcccgatgacctggtgtaaagaatatcaatatttggattagaaagtgctttttttcagttcatatggtttcaacagcccttatgaaaaatataaacatccctggcctgactgtgtaaatgttgaaggtagacctagttctggattcctgagtcaaaatcttccagttgtccacaacctcacaaggccagagaagcgagaggaaattttcttttccttttttttttttttttttggagatggagtctcgctctgttgcccaggctggaggacagtggtgcgatctcggctcacagcaaactctctctcctggttcaagcgattcccctgcaccagcctcccaagtaggtgggactacaggtgcttgccaccaagcctggctaatttttggttttttagtacagacagggagggtttcaccatgttggccaagatgctctcggtctcctgacctcgtgatcctcccgcgcttcgacctcccaaagtgctgggattacaggcgtgagacactgtgcctggacaagagatttctattctgggaaggggtgagtagacggcacagttggtttggaaatacaagaaactgcgcctgcatttacagaagcaacgcacacagggaacgtcctagcgccatctggtctcgcacacacgcttgggactcacaggaggggcctgggcctcggccagccctagttattggtgcacagtatgcaaggcctgggcggaagtcaggcaggttgtggatcttccggtccagcacctccgggaaactcttcacctccacccccaggtggcgctgtctggatttgctctcctcagtgtctctcttcagggaacgcactttgtcttccagggtttgatcctctctctgccgcctccatcttctcagagacacagttgcactcacctgagctgaggagtagttttactttgcttttggggacttccactctttctcgttttctcggagctccgcctccagctcctctatcttcctcttcagctgcgtgttcttctcctctctgtggatctcacggcctcttcctctgctccacgctggccaccgactcctgcagcgccgtgggcagccgggcgtcgctctcccgccgggtctgcagctccatctcccacctcttcccgtgggcagctctttgcgtcgaggccgccttcagcttgtggttcccagactgcaggtgcgtgtcagctgcagcggcctgagaggcctttcatcgtccgtcccgttgacactggatgccggagtagaagatggggctccatgcccggattctcgggattattactcgagggctccatgttctcctgggtcttgtctttggctgtcttggccgcttcctccacctcctggaatttctctgaaaactttgtcagctgctgctcagaggaaaaccccaaaccaaacaccgtgttggctctgctgtcggcccactgcccagacgtctgtgacacattggtgaaggtcatattcggtgtgattgtgctgtttatggtcaccttggctccgtccacactgacgatcccatagatgttccttgtgacatcatagaagtaagaaacggtggccgcctgttgctcgcaggcatccagtgctttttggtgttggggtcaatctggaagacctgtgctccggtggtgaagatgggctgttcttccatccccggcactgctccggcggccactccgagccggcctctcacgctcactgtccgcccgcttggcgtctgctaccggcgcggcacgtgcggaggcccctgcgc

SEQ ID NO: 13302 - DNA, 2300 bp, Homo sapien
actgccctggcctactggataacagcttctccaaagtgtatttaccctgacaatggagattgcctttctcttttaagtgaaaaaaatggaacactacaataaagtagtggtaatgctgtgtgtgtatgtataagacattctggagtgggtttgtgataattgggatatgtatcacttatccttttatttgtataaatttatggggtgaaagtgccgttttgttacatggatatattgttgagggataaaatctgggctttgagtatagccatcatctggatggtgtatattgtacccattaagtaacttctcatcccacatgccactcccaccctcccaaccttccaagtctccaatatttcttattccacactctgtatccatgtgtacatattatttagctctcacttatatatgacatgtggtattcaactttattcttctgagttctttaacttaagatagtggcctacagtttcatccatgctactggaaaatacataatttcattccttgtctattattgagtagtaattaaatgtgtatatgtacatacacatgtatagtgtgtgtatgtgtggggatgtgtgtgtacatatatgtatatgtatgaacatatacgactgtttcctttatctaatcatttactaatagaaacttagtttggtaccatgtatttgctattgtgaatagagcagcaataaacatataaatgcaggcatctatctgatataataatttatcttcccttgggtagatacccagtagtgggactgctgaatgaaatattagttccaatattaattatttgcaaaatctccatactgttttccatagagcttatagtaatttacatttccactagcagtgtataagcactcctgcttctctgcatccttactagcatctgttttttgttttgttccatttttctttttgactgttttaatagtagcttttctgactggtataagatggtatctcactgtgtctttaaattgcatttttctgatgattaatgtcattgattattttttcatatgctggttgatgatttttttgtcttttgaaaaataaacattgtagtaatttgctcatttttaatgtggttatttgtgggtttttgtgttgcttttgtttcttgtagtttgtaaatattagctctttgtcagatacagagtttaaaaatagtttatcccattctgtacgctttcggttaagttttttgattatttgttttgctgttcagatgctttgcttcttatttgtattaagtccaaatggtctatttcggtttttattgtttacttttaaggttgtagtcatgaattctttgcctaggacaatctccagaacaatatttcctagaatagcatctgcaactttcagactctcaggtctcccagttaagtcttttatccatattggcttaattttggatatagtgagagatacgggtccagttttattctgctgcaaatggctgttcagtttttcctgcacaatttatataacaaggtgacctgttcccagtgtatgcttcttgtctagtttttcacagtcagtttggctgcaggcatttgactttatttatgaaatgtctattctgttccactcatctatggctttctgctagattgttacttgattgttacttgtgtataataatgctactggtttttgtatgcttttttcatttattctaaaactttactgaattaactcatcaattctaggagtattttgaaagaatattagtttttttaagtacaaaatcatattatcagcaaacacaaagagtttgacttcctcttttccaatttgagtgcctttatttctttctcttgcctaatttctctggctaggatttcaagttccatattgattaagagtggtgaaagtgggcatccttgacgtgttctgagtcttaggaggaatactttcaacatattcctattcagtataatgttgtttcggagtttgaaggtgatttatggagaatgagagatgttgagtgcgagtggacatgagtgagagaaacagtagatatgtgtggccgtttctgaccagggtgtctctgtgtttgcaggcgtccagcgtgaggcgcagctggtggagtctgggggaggcttggtacagcctgggtgggtccccgagactctcatttgcagcttctagattcaccttcagtgacttctgaatgcactggatccgccaggcttctgggaaagggctggagtgggttggccgtattagaaccaaacgtaacagttacacgacagaatgcgctgcatctgtga

SEQ ID NO: 13303 - DNA, 2300 bp, Homo sapien
tgtgtgtatgtgtgaatttcaatttccatgtgtggtgtccagaagtcctgagcacaaacagttttgcttctctgtccaattctttgcttctgaaagccaggagtcatcccaacattggtaaattggcgatttgtttttactatttagtgactgacatatttcacttaacctgaagcttcatgaacacattgatgaaaagtagatagaagacttgtttggaaatgccagatttagggtagactttaccacccacgtgtgtctggagatctccttaggattccaagaacagggtggtttttttccaccacaggacaaggatgagaacctccaagctgtgatgataaaggacaggcagggccatgtgtggacaaggatgggctgctgccacgtccagagtgttctctcctagcaacgccgccatctccttcctcacactgtggtatttgtcagatgggaaacatgcctagaatttatctttgacatatggatggaagcccaggctagaggcatttgacagcttatttctgaacctacttctttaaggaatgcccagatcccttgctctgcttcctggttcttaacccctttagctcccttccgctcctgcacccatgcactgcctctttacggccacttccccacacccttcactgtagcaccattttcttgggctccttggaaatatcacagctttggtttaactcacagatcaggcacactcatgggcccctccagaggttctcgatttccctccctcaggctcctccctggggtcctaacttggccatctctatcctctcttctgagcctggccatccacaatccatcccatctggacttgtgtatagcactgggttaactcagcaggtatgaattgttcaaaccctgcacattcctaaaaaataactaaaaaaaaaaaaacttttgttcatttattgctgttacctactgtgatgagatctccgagtccataaaatattgcacctgataacagtgtctgtggatgtctgtagccttgggacatgcggtacaagtttaatcagtgatttatagtgaatgtctacttttgttttgctggagagggctgtcgtctgagtattgtggtcagttccccaggtgttccatagtctatgattcattccccaaacacagccctggacaagagagctcagcggcactccccttgttgtcaacacttcacacaagccatcttacctcacagctgaacaattacacatgtgtagaaggctccactgtgagaggacacctgagagcttgtgcctggattctccagggcttcactccttgtgccttttgtctttacttattttaaattgtatcatttttctgtaataaactgttcctgtgaatagaacagttatgagtcctgtgtttttactgatttttcagcctacaggtggcagatgagaactctcaacacagttgtgttagaagaaggatttcctagagagaccctgactcaatgatgatacatggctgaagcattgcatggaaaacgtaagtgttcaggtatggaatggcaaaatttgatacctggggagtgacagaatactacagtctattacagcagctgagctgaaatcggtttctggaggtaaatgggatttagaaattataaatccaactcccaaggagctggctcaatcaatacataatgaaatgtgaaatgattagaaatagcctaaatatgcaatttccatctgtgagagctaagtgaaaatccaggagagagttggcagggagagggatactgcaccaacctcagattttgaccattttcatttagggctgatgggctcatgaccactagagttagcaattacactgtgataaaagataaaagcttcacaaactctacccacccagaagggggctcaggtggtgaaatagggagggtaaggcatgaaacgactgaaatatgggaggatagtgagatgggttctctctttttgagttttatcttttgcttctttactaatttttgttaatctggatttggagaatgactagtgtaaaagtggattctgttttgagtcccttagaatggaggagaatgtgtgggccaatgttgtgcccagagactactacagaacaatagtagatgaatgtacatgacccaaacacaaagctttgtggttgctgatgggagagctgcactgccctggcctactggataacagcttctccaaagtgtatttaccctgacaatggagattgcctttctcttttaagtgaaaaaaatggaacactacaataaagtagtggtaatgctgtgtgtg

SEQ ID NO: 13304 - DNA, 2300 bp, Homo sapien
gcacaaattctaacccactcctcaagagtccagtcaccacctccagatctatgtccaaaaacagctcttcgtatggctgagtgacattagcaacaagcacacagccatgtttgtttttttgttttgttttggtgtgtgtgtgtgtgtttttgatagagtcttgtgtcacccaggctggagtgcagtggggcaatcaatcttggctcactacgagctccacctcctgggttcaagtgattctccagcctcagcctccaagtagcttggactgcaggcactcaccaccacacctggctaatttttgtatttttagtagagacagggtttcactatgttggccaggctggtcttgaactcctgaccttctgatccacccgactcggcctccaaaagtgctgggattacaggtataagccactgtgcccagccacaaacaagtatttttaagcaaaagacacagtgaagagacttcagtatgagcccacacacaaaccttcctgtgggagtttacagaacagcagtgggtgctgaggacagaagccagcacccaggaaccagcagggaaacccagggggcatttggcaccgcctgaaggctcaggaccattgtggggctcagtggtcaggcaggctcaaggttcagcctcagagcaggtgtagcaggcggcgaaaggctctgaagacggagtttagtgtcaccttctcatttccactactaaacaccctccagcacatctattctaatgtgtatgggtgttcatgtgtttagagaatattatttatgttatgaatctatagccatcttgtgggtgcatcaagttaacctcttcaacctatgtggaccctgttcattaggaataagtccctgtatttgaggacctcacaaattaataattatgtagaatcactttctttttcagtctcctttccttcctctttctttctttctcactcacacactgacaaacacacggggtgccataacattaattacctgatgtattaaagaatattgattcatttgcaacttgaccagtttagctgttgttcatgttgttgtaagatcaggaacatgtttctcagctgtgtactcctctaagctgagcagcagctttatttgaaatacacagaaactgaaaacaatccaaatattaatcagcaccttcataagtaaacaaattgtggaaaagtcgtttattgggatagtacccactactacaatcagtaaatgttggatacgatcaacagcatggttcaattcacaagtacatatgatgagtatagtgagccaaagcacatacatatgattccgttttataaactgtacaaagtgaatactcattggaaattacataacaaagatcactaactgacttctccatagtaagagaagcgaaggtataggagggagaaattgtgagagacaaagagaaaattgagaggcgaattgatttgttttctctgtgaatggtcattaggtcaatgtttgtcaaatggtgaacatattgtgtgaagattatatgtctgtattacttcattaaagctattataaataaaagtctaatgtggtagaaaaagatgaagagagaaataaaaataatacaagaaaagtcatgaactcctgaatgaattaacccttagtttttctctattacttataaaaacaccaagatacagccaaataatatcacgatatcattataagaagagtgttttgtaaacctcactgggaatttatagctctttcctagagttaattttgggaacagttggatccaattgtgagaaatgcaggctggacactgagactggctcttatgagatgtgagctcttgtctatgtcacatggtccttccatacttgggggtttacattcacatctgtaaatgaaggaaacattgactctcaaagaacatatttcatgtgcatgtaaaagtatgaatgctagtgagaattaattacttatgaagtataatcacccacatccactcttggacacagcccactctgaggcatctgttacagaactcattatatagtaggagacatgcaaatagggtcctccctctgctgatgaaaaccagcccagccctgaccctgcagctctgggagaggagccccagccctgagattcccaggtgtttccattcggtgatcagcactgaacacagagaacgcaccatggagtttggactgagctgggttttccttgttgctattttaaaaggtgattcatggataaatagagatgttgagtgtgagtgaacatgagtgagagaaacagtggatatgtgtggcagt

SEQ ID NO: 13305 - DNA, 2300 bp, Homo sapien
cgtgggggcgcctgctgggagcgaggaggcgccatcctggctcgcctgctccaggaggacgctctgggcctgcgcagatgcagttctccaggatgggcgcgggcgctgggggccgcgctccttgggctgctgcgcctccactgagccgcctgggtgtgaggacctcacgccggcgcctccgggaaggacgcggagccgccgcggccgagcccagggctgcagctgctgcccgacgcccgcgagaaggcccttccgccaccgcccgcgggttcgaacttggagcagctgctgccagctgaggcgccagcggcgtcgggagctcctcagagtcagtgttttgtgctggattcggcatgtcctctgaaaactcgggaatttgtcactgaaatggtgacaggaggtgagaagtttttttagacgttgccttcgctgaccgggcgccgggctcaggcctggaatcccagcactttgggaggccgaggcgggcggatcgcttgagctccggaggtggagaagctgccttcgtggtaactgtggtcttaagttcagctgagaacgataaatggcttttccttgaattggctgcttttgtgatttctctcaggctcatctttcgtcagttaaaaatccagtggtaggtgtagcttagagacgggaaatttttggttttgttttggctacacgtaagtcttggaaattattttcttttacgttccaatgtgagcaaatccagaaggatgtcagattaaacaccgaatttaacaaattcagccgggcacggtggctcacgcctgtaatcccagcactttgagagaccgaggcgggtggatgatgagttcaggagtttgagaacagcctgaccaacatagtgaaactccgtctctactaaaaaaacaaaaattagccgggcgtggttgtgcgcgcctgtaatcccagctactcaggaggctgaggcaggagaatcgccgagattgcgccactgcactcagcctgggcgacagagcgagacttcgtctcaaaaaaacaaaaaaaaaaatcaatcattggaatactgttgttcattacaattaatgaacgtttgatacacgcataaacgcactaaattcacgagtacatataagtaaaataagccaaaaaaaaaaaaactacatcctgtatgatgacacttttatacattctacagaatagaaactgaagtgacatgaaggtcgggagttgaatggagaaaaggtgagagaaaagagggaggaaggcgttgcaagagaataagagaaaatgttgagggtaattgatttgttttctatcttaataatggtgatggttacatcaataatttccaaattgtacattttgtgtgttaattagaattttatattattcaagctattacaaataaatacctgtataaatttcttagggacggtgtaagggagatggataaatcacataaaaagtcagatatttctgaatgtacaatgaataacccttagctctatctctattttttggtaattctaaaatgcagcagttttttttaatgtttttattacaagaagggtttcttcaaaccacaccaggtatgcgtaactctgggataaagttggctaagggagctgtgggatccggtggagaggagcacaggtcccgatcctggagcccattcttgtcacatgtgagctccaggacacatctcatagctccctcatgcttctgggtttacattcacatctgtaaatggaggaccaatgggcatctgcctctaacaatgtattttcgtgtgttaagataatgtatgctaaatgtttaccacagcacaatcttttactaagaaattacattttttccaaatattatcattgtcttcaagccccaccacccactagaaaacttcatctgctctgtgccttgccctgtcctcagacatcctgcccaagagacttctatatagtaggagacatgcaaatagttccctccctctgctgatgaaaaccagcccagccttgaccctgcagctctgggagaggagctcaagtgccaggattcccaggtgttttcacttggtgatcagaacttaacacagaggactcaccatgttgtttgggctgagctgggctttccttgttactattttaagaggtgattcatgaagaactacagatattgtttgtgagtggatattagagaaacagtggatatgtgtggcagttgctgaccaggatttctctgtgtttgcaggtgtgcagtatgaggtgcagctggtagagtctttttttttttttttttttcactttttagcgaac

SEQ ID NO: 13306 - DNA, 2300 bp, Homo sapien
atgggacgtgggcggtccggggacgcgcgggggatggcgggacgtcggcgatcggagatgccagggggcagctgggacgtgggcggtctggagaggcgcgggggcagctgagatgcaggtggtccgggacgcgcgggggctggcgggttgtgggcggtccagggatgcgagggggcagctgggacgtgggagttccggggacgcgtggggtcgccaggaagcggggtctaggacttagatccgccttctcttcaggccatgcagccccgaagctccgaatcctgggatgactcctgtccatgttggaagggaccctgccagtcctggcaaggttcaaaggccttagggcaagaaatgttagtagagtcctggaagacgatgtgggaacgggtagcggacaccggatggtgatcgttctcctacaagaccttgacatggatggggagaaacagagaagaaccttccaagtttgtcccactggacatgcccaccacactttaccagcccttttctagaaggcctgtgcgtaacacatgaaaaagctccgctcgacctttccctgaccttttaaaagaaaacatttgctgcatctaatccgcctagatataaggaggttcccaaatgtatgacagagtcagaaaattacatgtcttgtaagttaccatgtgcttgtcttttgttttccgttttttttcgtttttttgttttttgtttttgagacggagtctcactctgtcgcccaggctggagtgcagtggcaggatcttggctcactgcaacctctgcttcctgagtttcaacaattgtgctgcctcagcctcccgagtagcttggattacaagtgtgcaccaccacgcctggctaatttttgtagtttttagtagagatggggttttgccacgttggccaggctggtcttgaactcctgacctcaggtgagccacccaccttgcctctcaaagtgctgggattacaggtgtgagccaccgtgcctggccgtaagttaccatgtgctttttaaaaaaatcatagcaaaggggtgtcttctggaaatgacattttgaaatggtgttattagaccacccctggaagggacacagtaaccacacgtccacgttcgttcagtgggtgagaggacatggaggggagacctgggcaggaagggaagagggttccatgccaggctgctcatatttagaagacattttcatatcattgtcattgttttcttgtgtgcgttttattcctcgctattgtatacatcattggaaattctaagtattcttttgaaatatctagtctttctagatgttctgaagtgcctgatgtatgttaaaattacaggtggtaaaataataaattttgtaaatatctttttgttaaaattcatatgcagtgttttattttattttgatgttggtggggggtggggaggatgaccaaatccctgcttgatcaacacacattgcgtttgtgctctggttcaggggaggagagaggaggagaaagtgcagacttccaggcctctgtgcgcaccgggaggagagattaatgatcatctcttctgtctgtgtgtttgttttatttatctatggatatcctgtgtataaaggatgaacaagtcctatttataacatctaatcttttcaggtgttaagttgccagtgtatgacggaagcagcgttattaaacgaacgcagcttgtacatattgtgttaaaattcataaaaagccagtcttctgaaaagaacccttgggccctccctccgcagcctccggcgccagctgcaggaagacctggccaggggaaggtgggtggaacaagctgctgctggctgtggggaaggcggtggagcccaggcctccacaggttccccacaggctccccacaggctcgcgcggatctggtcgctgggttccgcacgggccgcgtgggggcgcctgctgggagcgaggaggcgccatcctggctcgcctgctccaggaggacgctctgggcctgcgcagatgcagttctccaggatgggcgcgggcgctgggggccgcgctccttgggctgctgcgcctccactgagccgcctgggtgtgaggacctcacgccggcgcctccgggaaggacgcggagccgccgcggccgagcccagggctgcagctgctgcccgacgcccgcgagaaggcccttccgccaccgcccgcgggttcgaacttggagcagctgctgccagctgaggcgccagcggcgtcgggagctcctcagagtcagtgttttgtgctggattcggcatgtcctctgaaaactc

SEQ ID NO: 13307 - DNA, 2300 bp, Homo sapien
ctcagtggaggcgcagcagcccaaggagcgcggcccccagcgcccgcgcccatcctggagaactgcatctgcgcaggcccagagcgtcctcctggagcaggcgagccaggatggcgcctcctcgctcccagcaggcgcccccacgcggcccgtgcggaacccagcgaccagatccgcgcgagcctgtggggagcctgtggggaacctgtggaggcctgggctccaccgccttccccacagccagcagcagcttgttccacccaccttcccctggccaggtcttcctgcagctggcgccggaggctgcggagggagggcccaagggttcttttcagaagactggctttttatgaattttaacacaatatgtacaagctgcgttcgtttaataacgctgcttccgtcatacactggcaacttaacacctgaaaagattagatgttataaataggacttgttcatcctttatacacaggatatccatagataaataaaacaaacacacagacagaagagatgatcattaatctctcctcccggtgcgcacagaggcctggaagtctgcactttctcctcctctctcctcccctgaaccagagcacaaacgcaatgtgtgttgatcaagcagggatttggtcatcctccccaccccccaccaacatcaaaataaaataaaacactgcatatgaattttaacaaaaagatatttacaaaatttattattttaccacctgtaattttaacatacatcaggcacttcagaacatctagaaagactagatatttcaaaagaatacttagaatttccaatgatgtatacaatagcgaggaataaaacgcacacaagaaaacaatgacaatgatatgaaaatgtcttctaaatatgagcagcctggcatggaaccctcttcccttcctgcccaggtctcccctccatgtcctctcacccactgaacgaacgtggacgtgtggttactgtgtcccttccaggggtggtctaataacaccatttcaaaatgtcatttccagaagacacccctttgctatgatttttttaaaaagcacatggtaacttacggccaggcacggtggctcacacctgtaatcccagcactttgagaggcaaggtgggtggctcacctgaggtcaggagttcaagaccagcctggccaacgtggcaaaaccccatctctactaaaaactacaaaaattagccaggcgtggtggtgcacacttgtaatccaagctactcgggaggctgaggcagcacaattgttgaaactcaggaagcagaggttgcagtgagccaagatcctgccactgcactccagcctgggcgacagagtgagactccgtctcaaaaacaaaaaacaaaaaaacgaaaaaaaacggaaaacaaaagacaagcacatggtaacttacaagacatgtaattttctgactctgtcatacatttgggaacctccttatatctaggcggattagatgcagcaaatgttttcttttaaaaggtcagggaaaggtcgagcggagctttttcatgtgttacgcacaggccttctagaaaagggctggtaaagtgtggtgggcatgtccagtgggacaaacttggaaggttcttctctgtttctccccatccatgtcaaggtcttgtaggagaacgatcaccatccggtgtccgctacccgttcccacatcgtcttccaggactctactaacatttcttgccctaaggcctttgaaccttgccaggactggcagggtcccttccaacatggacaggagtcatcccaggattcggagcttcggggctgcatggcctgaagagaaggcggatctaagtcctagaccccgcttcctggcgaccccacgcgtccccggaactcccacgtcccagctgccccctcgcatccctggaccgcccacaacccgccagcccccgcgcgtcccggaccacctgcatctcagctgcccccgcgcctctccagaccgcccacgtcccagctgccccctggcatctccgatcgccgacgtcccgccatcccccgcgcgtccccggaccgcccacgtcccatcagccccgcgtctcccggaccgcccacttcccgacagcccccgcgcatctctgtggcagctgccccggtgcttcccgccccgccgcgcccgcccacccaacggcgctgtgtccccccggtagctcagcggggacttcctttatgtggtacagggttgggcctggagacccggatgccggcgaggtcctggctgggagaggccgccgctgccttcaggtttccgag

SEQ ID NO: 13308 - DNA, 2300 bp, Homo sapien
gagctcttgggtggtggttctgaataaggcagtttgtgcagcaaatgcaaacacatgcatgggatccaggcaggaacaaaagcttccctttacaaagtgggtgggcatctggagggagccctcagaggtgggcagtggtcgtccttgctgactgcacattagccagaggcgtgaccataattggtcttgcagggaaagagcaccactgaggtcataggttatgaaaatgtttgtcatcctccagtgagcaagtccatcctgcttgcttgtgggtgtcaactccatggtggatacactctgggagatgacaagatgcacacaaacctcctctcactaattatccactaccacacactcaagaccaacctttgctccagaaaggaatacgtgtctgtggaaatagacagagcttaagtattttgtaacctggtgaacatactgtgcaaaaccaaacgtttcaggaagattagctcagaaatgtttatcaagtgactgaagggcagtggcgggtgaggtgatgggacagcctcagggctgcacatgaggagggctccctcccccatgcaggcttttcctccaggagctgcaccaggaactcaaggaagatcagggagaattctgagaacaccctgctgtggagctgcctagagaagaagaataaatgatgaaaaatacaactctgagtaatgcatgggtttttgttcatgaaaactctctctctgaaagcttgtgaaggtcttgaaatacccctgattagctgaagacaaacatttaaaccctccttccacagggagttcaagcaggctggatgtgtccttctatggatgatcttcctcagccccttcctcttcccagctcatccctggctctctgtgtaaaaagttctcatcagcggaatgtggttgatgaagtgacgtcttcaatttcctcatcttctatgtggtcatgttattttcctcatctgaagtttaaaaactcacctgcatgcagcacatgacaggctaaaatctcttgtggacaaaacagtaacaaaggcacccaccatggttgagcacccgtgttgctgacaacgaccaccaggggtcaacgtcctcttcacaatcctgtgtcagagcagcacttgagtgatttcaataacaacttcccaggagaatcagctgaaaactacttgtcccattttccatacagatataacccctctattttcctgaagaaatagaaagagctgaatgctgaatacactgaatgtctgctggttttgcaagtttgtgactatatcactttctaatttctgacctgtgcagaccactgtacagacttttctcactggtgggaccaggcttccagatgtcaaatataaatgagcttcttcatataaaagtcaacacaagctcctcatggtttcagtgctcactgaatggagttggaaataaaacccacaattatccataacacaaattccttggaagttattttgggataatgagttcataacctgtagaccaagagtccaagagtgtttctattgaagagcctgggggatcaagacaccaggcaggtgatgcagacactgtctaaagagtgcccagcggctctcagagggacctactggatactcacgtgggacatcagcaatcactttctcagagtcaccagtgagctgtgctggttcctgaagggtccaggatagggccaaggcacctgctctgtgtcggggagagtgattgttccagaaatcatagaggtggtctctatgcttataaaatctatgttcacagtgagaagtctgttctgagagggcttattcttcagtgaaaggacctctgcccacaaatgttcataaatggagcagggcattcatttcctcaagcaggatcagggcttgagtcatcagcatctcactcttgcaaggctgatgtgtcgtttgtcttccctttcttatcatcgaccaggctttgagctatgaaatgccctgtctcatcaatatgcaaataacctgagatcgactgaggtaaatatggatatgtctgtgccctgagagcatcacccaacaaccacatccctcctctagagaatcccctgaaagcacagctcctcaccatggactggacctggagaatcctcttcttggtggcagcagccacaggtaaggggctcccaagtcccagtgatgaggaggggattgagtccagtcaaggtggcttttatccactcctgtgtcccctccacagatgcctactcccagatgcagctggtgcagtctggggctgaggtgaagaagactgggtcctcagtgaagg

SEQ ID NO: 13309 - DNA, 2300 bp, Homo sapien
taagaatcctataatgttccagccagaaaagggaaagcatcaatttgacttctggagactctgtatataggtcacattccatagaaagaagagcactaaattattaagattcaattgtaactacatatgatacttccgggatgcacaaattaaagatgaaagtgtgacaatgcacaggctctgtcagagaaggagaacgtagggaaactgaaagagaatggcagagagtaagacaaggacagaagagcaatatgaagcctctgacatcaactctgtaaggacaaggtcttggcaactcccgcattgaccacagattctgttaccatgggccatttgcagggttcctagctaaggaaaaagaaaaaaaaaactgcatgcacttcccaagtctccacttgtatcctgtttttcttagatctctaggacaaaaaaaatggcataaacctagacctagtgtcagtgtaggaggtactttctttataggcaagacactaggaagaagggaaaatgtgtgttattggactaggagatacagagatggctttaatctgaatagatctacacccgcaggtattctcgaatgcaacattcaactacaagagcctaatgaagaaacacgaccctccccaaacccctgcaagctcttgtattcactgtgtctccactgatttagtgcacctggagcttcagagcactggctccctcctgtgtcctagaatcttttctttgggtctttctgcagaattcaataggattagttaggctaatcaattgtttcaagagatggtgttggcagcatatattgtcgctggaagagtattctaagccaggacacaggcactttatgccggactaaagactctggagaaaatgttttgtgagccctgacagaaacctccttgaaaggtaagggctgggcaggagggggcactgaggagccacgcagcacacggtccagccctagaacaggaggctggggaggaggtttcctctcagggcctcggttttccttcgtcagaaaaaaaaaaatctaaaataaccgttcaacaagttgctgatatgccttcaaatatcctgctacaatggaacaattcatataacttcaggcaatgagaactattttttaaattgggcttctaggattataagtatcttaatagtgaaaatgtgaagaataggtatgattttactatttcaatggatacagaattgtgggagtcactatattcctatgaacaaaaaattcagatttcagtgttaagtaatgttgcctacattgtgtgagtgacggggcagtggtggatccgagagtgtggtgggtgcacggacataatgattcagaaagcaatatggaaagatgagtatctatggatacgaactgaaagtatgtaaatacttcacaaaatactaataaacggagttgaatataaaacccataattatccaaaacacaaatttcttggaagttattttgggaacatgatttcttaaagaactccaaactcttgtttcaacttctgactcctcgtttctgtgatataagaaaaccatttccaattatgcatctcagggcaattctgtaaacccagagcgtttctgctgaagatcctggggaatcaagacaccgggcaggtgatggagacactgtctcaggtgcgcccaacgaatctcagaggaacctgctggagagtcacgtggaacatctacagtcagtttctcagagtcaacagtgagctgtgttggtgcctgaggggaccatgatggggccaaggcacgtgcccagtgtcgtggacagtgatggtccagaaatgatctagatggtcttgacgctaatgaaatatgggttcagagtgaggagcataatctgtggggacttgttcttcagtgaaaggatcctgtccgcaaacagaaatggagcaggacatgcatttcttcaagcaggattagggcttggaccatcagcatcccactcctgtgtggcagatgggacatctatcttctttctcaacctcgatcaggctttgaggtatgaaataatctgtctcatgaatatgcaaataaccttagatctactgaggtaaatatggatacatctgggccctgaaagcatcatccaacaaccacatcccttctctacagaagcctctgagaggaaagttcttcaccatggactggacctggagggtcttctgcttgctggctgtagctccaggtaaagggccaactggttccagggctgaggaagggattttttccagtttagaggactgtcattctctactgtgtcctctccgcaggtg

SEQ ID NO: 13310 - DNA, 2300 bp, Homo sapien
ttttttaaattatgtacagaaatcagaagtgaggtacagaaacagctggattggttacaggctgatgtttgtcttatttaaacacagtttgcacactcaagagtgtatgagtggttgaggtatggctgctgaaattggccaacgctcagctgttggtgaggtgctcaggtacatactcctgagttaggttttcaatctcgtccacctattcaggtaggttaccgtttgtccacaaggactcaaacatagaagtacggagtcctcctcaggccatatttaattcactttatcagtgcccttcagcatatggttcctgagaatttcacacggcaacatgtttaccaccctagaatttaagcaatccaatacatgtaataggctgtatttcacatggcaacttctgcctcagtttagctaacactatggctttgtttctctctacaagaactcatttctcccaagatttccattttcctgaaaggaaaataaatctttgggacccccatatcactaagccaaagggaaaagccaagctgaaaactgtttggggcaaacccaccttccattctttccctaaaatgatagctgttaaggtgtttacaagctacatatctccttcaaaatttgaccgcacagaaaatccttgtagaccaaggacattgtagaccaagcagagagtcacttctctgctcacgtaagtcaaatgcatatctgattgctccctttgctctattgtttcactaagccagactaaggcctatgtgactattcctgtaaactgtgcattcagttaaaggctaatcggaaactcaaataatgcaaccatttctctcatacctacctatgatctggtagctctccccccaacttcaatttgtcctgcctttttgaactaaataaatataccttacatatattaattaatgtctcatgtctccctaaattgtataaaaccaagctgtgtcccaccacactgggcacgtatcatcaggactccctgaggctgtgtcacaggcatgtccttagtcctggaaaaatgaacttcctaaatctattgagattagtctcagatactctttggtttataagtatgttttctatctcataacttcaattatctgaaatactaaaggaaatctgccaaataacacattatcttgtttatctgttattgttgttgcaaaaataaatatatttatataatttatgtataattgatcatctttgtacattaccaaactgagtagcagatttgttagtaagacccaatgtaataaaaaattcaaatatcaattaacaacttaatagaaaaacaaattacgctacatttgtttgccgaaatgctaccaatttttataaaaaaataaacacatataacataaatggtttaattctcagtatttctattgagaaaaataagccaaatacataagcgaatatactatattatttcattcttataaattctaccaaataaatactagtctaaagaaatatgaaaacatcagtagtttataaagaaatggtagaaaaagggaaggggaaaaaacaaataatataaaagatcaagaggaatgctgaggggagttgacttgttacctcattgaaaatagagattattttttcaaagtttactattgcacatgttaaatatgtgaattttatcatctgtcagttaaaactcataaaatttattacaagtaaacagccgacattttatacaaaaaagggatgataggaagaaacaaataaatacattaaatgtcagatacgccaaaaacttatctgcctgacccctagttgtctccgtaatttttggatgaaaaccagcccacccctgaccctgctgctctgggagaggagccccagccttgggattcccaagtgtttgcattcagtgatcaggactgaacacacaggactcaccagggagtttgtgctaagctgggttttccttgttgctatattaaaatgtgattcatggagaactagagagattgagtgtgagttacatgagtgagagaaacagtggatatgtttggcaatttctgacttttgtgtctctgtgtttgcaggtgtccagtgtgaggatcagctggtggagtctgggggaggcttggtacagcctggggggtccctgagaccctcctgtgcagcctctggattcgccttcagtagctatgttctgcactgggttcgccgggctccagggaagggtccggagtgggtatcagctattggtactggtggtgatacatactatgcagactccgtgatgggccgattcaccatctccagag

SEQ ID NO: 13311 - DNA, 2300 bp, Homo sapien
cctgtgtcttctctccctctctccattccccctcccctgaaactaaaaggaatgttttaacattatgggcttttaagtctgtatttctgtgaccagcagaccttatctatgctcccaattcaaattccttgtaaacacaatttgtaaaatcctgcgagatcctgtctccttggccacgccactgcaaggtcataaagtagatcaaacttaagttacaattctgattttcctcaagatctgagacatgttaattgtctttgtttcttgctcaggtaacatctctttttgctcttttttatctctttttgcacttaaatctaagtttacattagtcatgtatctagaatgtagaaatatgtcttaaagttacttaactttttaaaaaatttatggggtttccagaagatgtgagaacctcctttatttataaaatagctgattgcacgttgctcaataatttcctctttaatttatctctctcctgtcacattatactatgataagcaaaaagaaatgaaggcataccatcaacagtttacttagatatctcctcagctaaatttctaaggtataatttactaattctaattttatccaatttaacataattaagataaattatataacaaggtacacatatgttccagttctaacaccatgtttgtgacagaaataaaacagagcttctctctgtaatgtggtcatctgagccctgaggtgatgggtcacataggtatttttatgatatttaagggtttggtcaagaacagtgataacaagtctgaacaagactggtcatacttgaaaggttacaggtaaagttactgctgttattttatattaacgccttattagaataaagctcagaggaagaggccacatcctaggtcacagtaggaggaggaatggagctgtgctctgctctccacactacttttcacatcccaggcacaagcccaggttccatgacgcacggcatctagagggcagttctcaggggatgatctcagggcacctgcttcctcgggcagggcgcttccttctctcaattgcagacttgctccttctgcaaggtctgaagtcagcacttgtattcccatgatttttacaggttctcttccctaatatggcaaaaatctttttattaaattttcaattttattttctctgaagcacactgcattagcagaaacgaatatatcacattccttatccgcccacacagccaaagattcctgaagacagagctgatgtgacgtactcataggtggatctctgcccctcagaggtggccttggtcttcaagtttcagcaatttctaggaagccaaagacacctccatctactcctccctgctcgacagctcacctgagaacagctttctcattggaatgtcttgtgtttaagaaataaaagttgctgtttgaggttagggagcccaggtgcacctaccagatccagcccaggattggagatacttttcagaagacaacatcacctgagacacgaccagtcccactgtttcactttcacaatttcagcttcttcagaagaaaattaaaattgttgagacttgttcataagcgttgtgccatgtcctttctctgttttcttgcctgttcattgatgtcatgccaggtgccacttctatgtaataggatcagaattctgcctctagtaacacatcagaggtgaggtttgattgtacttttggtttatgctccaaaacgtagattataaaattcatcaccctcatttttatgtcaaaagtaatctgcataatctggatgtcaatactttttggaatctatgaaataacagaaattgcaagaaatattacccactccaaacctggagagacaggcatgtgcagaatggcaattgacacctgcttaactggagcagaagctgcagaagccacaagctgttgagggcacttacatggtaagcactacagacgtctgaagacagatgtggactcagtaaatgtaacagttccagagggtcttatacttctaagttttctggaatttctttccagaaacctcaagattctaaaatgtacattccaaagacatttcctatagatcaaaattgcagatattaattactgagaaacataccacgagccttcttcaaaagcttctacaggaaaggacttttccagaaccttatcctatgtgaaggaagacaaatctcccactgcagatttctctcccattcttccataattgtagaaatgagtaaagttagccaatagaggtaagatataagtaaataatccagggatgctgaaaaca

SEQ ID NO: 13312 - DNA, 2300 bp, Homo sapien
aaacataagtaaaatatattattcatctatgtacatttccaagctgtgtagaagaatttttaataagacccagagtaaaaaaagaatgcaaatatgtaggggccagccctacagggtctgtggatctttctccccatgtgcagagatgagagatcatagaaataaaggcacaagacaaagagatagaagaaaaaacagccgggcccaggggaccactaccaccaagacacagactagaagtggccccaaatgcctggctctgctgttatttattggatacaaggcaaaaggggaagggtaaggagtgtgagtcatctgcaatgattgataaggtcatgtgggtcacgtgtccaccagacagagggcacttccctgtttggcagccgaggcggagagagagagaggacagcttaggtcattatttcttccattctcttctcagaaagatcaaagactttaatactttcactaattctgctactgctatctagagggcggagcaggtgtacagagtggaacatgaaagtgaaacaggagtgtgaccgctgaagcacagcatcacagagagacgtttaggcctctggagggctgcgggcaggtttgactgatgtcaggccttccacaagaggtggtggagcagagtcttctctaactcccccggggaaagggagactccctttccaggtcttctaagtaatgggtgccttcccaggcactggcgctaccactagactgaggagccctctagtggccctgtccgggcgtgacagaggctcacactcctgtcttctggtcacttctcaccgtgtcccttcagctcctattgctgtatggcctggtttttcctaggttataattgtagagcaaggattattataatgttggaataaagagtaatgctacagactgatgattaatgatattcatatataaacatatctataacctattactagtacaactattcttattttacatattctcttcattacactagaacagcttgtgccctcagtctcttgcctcagcacctgggtggcttgccgcccagacaaatattgttaagcttcttaatagaaaaacaaattatggtaaatgtgttcactggaatactacccgtcatttataataaattaatgcctgatacacagagcaacaaggtaaaatatctaagtatttatgttgagtaaaataagctaaacaaataagaatatatactatgtaatttcatttttataaattctgataaataaaaatgcatctgaagtaaaataatgaagataagtagttgcctggggaaatggtagaagaagggagggggagaggaggaggaatacagcagaacaaggggcaaatgttgagaagaattcacttgtccactttcttgataatgatagcagttacatcatttttattagttgtacattttaaatatgtgaagtttatcatctttcaattaagcctcataaaatgtcttacaagcaaacaaatggaaacttagacaaggaaagagtaatagaaagatagaaaaaataagttcaatgtcagaagtacctgaaaattaatgtgcctggatcctagttctctccatattttcagaagagtgctggagggcagcaaaaccacacatgctcttattacggaaagtgggttctgataaaaacactagacacatccagctttgtcctggagttggtttagggggatgtcagagacagtgatgaagagcacagggccagataccggggttcactcatcccagacatgagctcctagatgcatacagagcccccccatgtgtgggtttacttccacttctgtaaatggagaaaatattgtctcctacagaacatagtttacatgaatatttaaaatgaaatagggtgattagtgcaaagtgtttatcacagcacaatttcataataagacagcatattttccaaatgcaatcattgccagcaaacttctacagggcaccgtcgtcttatctgggtacagcctactcctcaagggtcccaccctagagcttgctatatagtaggagatatgcaaatagggccctccctctactgatgaaaaccaacccaaccctgaccctgcagctctcagagaggtgccttagccctggattccaaggcatttccacttggtgatcagcactgaacacagaggactcaccatggagttggggctgtgctgggttttccttgttgctattttagaaggtgattcatggaaaactagagagatttagtgtgtgtggatatgagtgagagaaacagtggatatgtgtggcagtt

SEQ ID NO: 13313 - DNA, 2300 bp, Homo sapien
aacaagtgtcctcttcggtgcttccagtcagctctcacataaggaattttttttcaaatttaatatagatacagagggtaaatgtttggatttgtcacgggggattattgagtgatgctgaggtttggaatacagattcccaccgacctctccctcccactctccagcagtccacagtgtctatcattctcataattatgtccatgtgtgctcaatgctgaggtcttacttaggagaatatgtggtattcagttttctgctcctacattaatttgtttaggattaagggccccagcttctttcattttactgcaaaggacatgatttcattctttttcatggctgtgtagtattatacattgtagatgtaccgcattttgtatattcagtctaccaatgatgtgcatctggtttgatctatgtcgttgccactgtgaatagcacagcaatgaacatagatgtggatgtgtctttttggtagaattatttgcttacttttcagtgtataccccgtggtgggattgctgtgtaaaatgatatctctgttttaagttctttgagaaatctccagtctgatttccaaagtggaaacaccaatttatattcccctcatcagtgtatgtgttctcttttctccacagtcccagcagcatccattgttttttgactttttagtgataaccattctgagtggtgcgtggctgcacacctacagtcatctcatctttgataaggctgatgaaaacaagcaatgaggaagggactccctgttcaataaatggtgctgggacaactggctaggcatatgatgaagattgaagctggatatctactttcaacatgtataaaattaacacaaaattcattaaagttttaaatgtaagacctcaaaccataaaaatccttgaagacaacctaggaaatactcttcttgacatcaggtttgacaaaaaaatgttggctgagtatccaaaaccaattgcaacaaaaagaaaaatagacaagtggggcctaattaactgaggagctcctgctcagcaaaacaaacaaagaagcaaacaaaactaacagcacagtactcagacaacctacagaatgtggaaagatattcacaaacgttccatccaacaaagccgtaatatccagaatctatagggaaattaaacaaatcaagaagcaaaaaataataataataataaccccattaaaaatgggctgatatggtttgctgtgtccccacccaaatatcaacttgaattgtatctcccagaattcccatgtgttgtgagacggacccagggggaggtaattgaaccatgggggcctgtctttcccgtgctattctcttggtagtgaataagtctcaccagatctaatgagacttatcaggggtttatctgatgggtttatcaggggtttccgcttttgcttcttcctctttttctcttgccatcaccaggtaaggagtgccttttacctgccaccgtgttttggaggccttcacagccatgtggaactgtaattccaattaaacctctttttgttcccagttttgggtgtgtctttgttagcagtttgaaaatggactaatgcgtgggcaaatgacacagacacttctcaaaggaatacatacaagtgaccagcaaatatatttttaaaatgtttaacatcactaatcatcagagaaatgtaaatagaaaaatgttctgatttctgtcactataggtccattttcttgttttgaatttcatatacatggaataaaatattatagctcatttttgtaagaagcttttactatctgtgaggttcattcatgtgatagcatctatcaaggttttgtcaacatatgtataaatatgtatgtactcatacacatatagatatttcatatctgaatcagtccattgcattaataaatgacagattattaaataaatcagttcattaagtgaataagtgacaatatgtatatctattttcctgttgatggaatttaaatttgtttccaatataaatatcataaacaaaactgtcatacatatctttgtacaagttcttctgtttatattcacatatttttattgataaaatatgttgaaatataagtatgcattataccttttcagctttatggagctatcactgacaaataaaattttctgtatttaaggtacaccaattgatgtattgatattcttggggaaatgctcataatgatcaaggtaattggcatgcctatcatctcagagagttaacattttatgcctttaatttattgtgtatgtgtgatgaaatca

SEQ ID NO: 13314 - DNA, 2300 bp, Homo sapien
ccagagattacaaatcttccaatgatgccttctttgttttttgtctgcttgactttgtctcttcaacttgttctgtaccccagagaatctctttcagctccctcaggtgcattcaattgttttatttaactgacaatttctaaatcagttaaagacattacgctaaagactccatattcctaggtccatattcctttttccatattcctaggaaggcattgtgacccagagtctgggcatgaccttgtgagtgttcctgaccctcctccatatgagatgctggtctgggtgttcttgcccctttccctggggtagagtcctcctgttttccccaggtgctccctcccacagctctagtgttctcaatcagtgtcatcaccttccagatcttctgccctgccctgcagactaaggctctgattccataagcaagataggggagctgctcctcaatagatctttggtgaggatctctgttcccatctcaattcctgtagggtggaaccagtgttcctaggattctggtttcagtagcttgtccctgcagagtaaattcttagttctgtagggggattaagggagttgggtctgaatacattttagatgtcgaggatcttgttctctcccagaaagacacttcgggaaagtaagactttggtaactgtcccctttcttggggaaagggattcaagaggataggttgcttttgggcatgtggtcccttaaaatttcacactaaaaagcgtttcccacactcaatttcaagcagcccaatatatatttgtattttttcttggaacagacaatattttatattccagactctgccttaggtaatttcaaaccctggctttgttactctctacaagaaattgcttctccataagcttcagatttgttgtgtgttttgaaattttatcagaaatattaaagaaaattggcaaaattccatcctccatgtttatctgttattgttgatgcagttgtaaaaaataagaaaaatatattccttttttctgtacatttccaagcttagtagcaaatttttagtaacacccagaataataaaaaattcaaatattgtttagctgcttaataggaaaacaaattatagtaaatttgtttgctagaatgctacccagcatttataataagtaaacatttgatatacccaactacaaggtaaaatatccatttatgctaactaaaataagccaaacaaatgagaatatatactgttatttcatttttataaattctgaaaaattaaaatgaatttgcagcaatgtaaagatcagtagttgccagggaaatggtagaagaaagaaaggaaaaggagaaagaatacagaagaacaaaaggaaatgttaagaattctcttgtccaacttgataaggatgacggttacatcatttttatcaactgtaatctttaaatatgtgaaagtttattatctgtaaactaaacgttataaactttattacaagcaaaaattgaaagttagacaagaaggagtgatagaaagagaaaatgtatattaaatttcagaaatatttaagaatgtatctgcctgaaccctagttctcaccatatctttaggtgaatgctaaaatgcagcaaaatcacgcatgttctcactacagaaagtgggttctacaaaccacactcggcacatttagctttgtcctggagttggtgcagggagttattggggccagtgatgaggagcacaggccaagataccagcgattacttatcccaaacatgagctctaacatacacacttagtcccttttccgtgtgtggtttacttccacatctgtacatggagagaccactgactgacaaaatataatttatacaaatatgtaaaattaaatagggtgatcagttcaaggtgtttatcacagcataattttacaataagacagcatatttcccaaataccatcattgtcaccaaactccttcaaggcacagtcatcttatctgggccccgtcctctcctcaggtgtcccaccccagagcttggtatatagtaggagacatgcaaataaggccctccctctgctgatgaaaatgagcccagccctgaccctgcagctctgggagaggagccccagccgtgagattcccaggagtttccacttggtgatcagcactgaacacagaccaccaaccatggagtttgggcttagctgggttttccttgttgctattttaaaaggtaattcatggtgtactagagatactgagtgtgaggggacatgagtggtagaaacagtggatatgtgtggcagt

SEQ ID NO: 13315 - DNA, 2300 bp, Homo sapien
gttaaaatgtatttttgtttgtgtttgtctgtgtctctgtgtgtgtagcctgggtgcacgctatactacctgttttcataatgacttatggtgaatgcctattagtgctcaagaggccggcgtctgagcactggaggtcaattgtgcaggtgtcacacacatctgtgatgggcccaataaacagccctgggcacaagcactcaggtgagcttccctggtggacaatgcttcacacatgttgtcatgcatcactgctgggagaactggggacaagagactcctcagggaaagaacacctgggagctcatgcctggattctcagggccttctccctggtgcctttgctcattttaattcatattcattcgctataataaagctgcacccatgagaataacagcttttcttgtgtcctttatttgtactgattaaggggcctgaggatggtcttgggacactcaacacaattacatcagagttggagaatgctagaaagttcctgattgctgacgcatggctagaggattttttataacatcaaaggatgagaaagtgcgggataaaagacattcaatgcccagatggctacagaatcatatggcatgagatggcatgtacactccaataaggagcaggaagtgaaagtaatccatggaatttagaaacaacagatacagcttcctaggagttgttccctgaaaaaggaaaagtaaaaataatgaggaacaacccgaatatgcaattcatatctgtgatagctaaaataatagtaaaaagatgcacatccagccctgcagtgtgccctgtgagccgaggctgctagactcccattcaccaccaaagggtacagttgtccagaaacaacacacaacacataagagtgacacagaaggtagcccagagtttgggctggggagaggaatccactagacaactataacaaggaggacagcatggaaagtggcatcattttgtgatatgattgatatcattaatttatatcatcggattgtgaacaaagttagccaatggactatgagagtgactgacgtagcagcttctctggcttcgtgtgctgcagatgagaggagaatgtttgggaggatgctggacccacagctcacaacagacatatgacagacgtagctgatcccaacctcaagtaggatgttcttgatgagacagcttccctggtgcactggatatcagatcctgtatagtttcagaacttgtgtagtttgtgttgctttggctttttctctggatcttttaggtgctaatgaaatgagagtgcttcacaaaaaaatggggcagacaaaggggatagttaagggcctcctccaagcaatgtggatatcataaaataaatgttaaaaaatgaaagaactaaacaagaaggtgctggggttgacacaaaggacttaaaacagcactaccaggagttgggtgcagcaatgggcatcccttcaggtccatcagcaagtcagagacctaaacaaatattccctattcatgttgaattggcagagtgtaaaaatctagaagacaaaatggccaggaaaaatgtgcgattttgcatgggtgaaggtctggcaagttaatcatcttgaggactgttgaggtcctgaggtggtcctgcccttgcttgatgcccaggccgtagtccaactcacacgaaattgccagggaatagacagtagtttttttagtagttcttgttatcaggcataagtgcatttgaattttctcttcatggcctttcctggcactatttctcattttttttaacacacatagtttcaactagatttatcaccttcacagggtcacagagaagggtggaagaagggaggccctggtatgggtctcgaagaaacatggaaaagagtggagagggacaatagcagggtgtaaggaattattgagaccttactctgcccctcccaggaggctcaggccagcctttttctgcatttgaggttctgggttataaacgctgtagactcctcccttcagggcagggtgacaactatgcaaatgcaagtgggggcctccccacttaaacccagggctcccctccacagtgagtctccctcactgcccagctgggatctcagggcttcattttctgtcctccaccatcatggggtcaaccgccatcctcgccctcctcctggctgttctccaaggtcagtcctgccgagggcttgaggtcacagaggagaacgggtggaaaggagcccctgattcaaattttgtgtctcccccacaggagtctgtgccgaggtgcagctggtgca

SEQ ID NO: 13316 - DNA, 2300 bp, Homo sapien
tctcctctgcgcccaatcactgtctgtgatgagcttccaggatgtgtgtgtttggcacaaaccaggtgatggacgtcagacagcagcagctggtgcccggatcatgggctccctaatgctggaggaatgagaggtgcattctcagggacaagacattgttgatggatttttatgtagaaaccacgattttacttgcttctctcaggagacatagaagaagcaaccatgcagtcagcaaataattataatttccacaattaccccaaatggttaatccttaattctgcgcagggtcccaccgtagagtcacctttctcatgaggaatggttgaatctagaatgagtccacatgattttcatatttttggcttctgtccatgttcagagagttagagtagagtaagtttggacctttccacacactaagcctcacctcccccacagaaagagcagagacttcaactattcctgagtgtggggtaggggctggtcctgcacacctcagagcctgcagagactgccacgtgcagtgttatagacttgggtgttttctcattcaggaggggtgacctccacggcctccgatttctgctaagatataactgtgagtgcagaattaggacactattaggctatcatgcctcacttctattctgaaaatcaccctctttatagtaaaagaaaacaattcaatgtccatgcccctgaaagtcatttctttttaatttggttgcgagtttaccacatagtgcctgaatttattctcagaatctactgaattgtttataaatctcacaaattgaacaaaagtgaattcttcattcttactaaaatgtgtgtatgtaggaatttcagtgtgttttccagaagccatgcacaccaaccactgtgtttcatggtcatttattggcctggtgaggccctcacagaccccctccctcacctgtgctgtctctggattctccatcacaactagtgcttcctgctggagctggatccgccagtcctcagtcaagggagtggatcagggcataggtcacgagggagcacaaattctaacccactcctcatgagctcagtcaccatctccagatccacgtccaagaaccaaattttcttttagctgagttctgtgaccaacaatgccacaaccttgtattactgtgagaggaacagaagagatgtcagtgtgatcccagacacaaacttccctggagaggggcccaggaccaccaaagagcactcaggcccatgaaaacagggcccaagctggagaacgggtttcctgtcaccctcacctttcaccattagatactctacactatgcctatgctgaggtgtgtgtttaatataattagaaaatggtatttatatacgtgtataatcatatctagtgtaagaatttgtagtttccaccttatgtgaccattaaagacaacatctctcacgttattcaaggaccttataaagtataatacttttacataagatttatctccttttgtgtgtttctccttctgtctatattctctctctctcttcctccctctttctctctctctctccatctctctctctctgtctctctctcacacacaaatacacacacatgcaatcggtgacagtatataggctaattaagaatatattcccatatgatttaaaaataacagttttacaaatatttgcctttaatttttcaaagaaaattaaatccaaatgccagtgattttttatgtgacttttaaaatttaaattgttaatttgtgttttcatcaatgcttgtatgtgtgcttgtgtattctcacagattatgtggtgccttcacagaattaaacatgtgaaactctccacttgaatttctgtgactcaggactggtgagcaaaaagttagaagtcactctcctgatccttccctacagctgcagattcctgaaggtaatgacctcacagtagaccaaggccctcaaaggtgaccttgagttccagcacatcttgggaggccaagcggatgtttgtgaaagaaatagtggctatgtgacagtttctaaccagaatatctctgtgttttcaggtatccagggtgaggcccagcttacagagtctgggggagacttggtacactgagaggggcccctgaggctctcctgtgcagcctcttggttcaccttcagtatctatgagattcactgggtttgccaggcctcagggaaggggctggaatgggttgcagttatatggcgtagtgaaagtcatcaatacaatgcagactatgttaggggcagactcaccacttccag

SEQ ID NO: 13317 - DNA, 2300 bp, Homo sapien
ctgaaggtgagaagagacaaaccgggttattagaagacatgtatcaaaaccaaacaaggtggtaaggacagtttgaaaaaaaattccaaggctgctgacacacccagatatctggtggctgtagttatgcctgctaagatttgggtgcatggggcttggctttcgttagctcccttggacttattttcccaaacaaagaaacctccgggttagggggaccctatttattccagtcacctggcatgatttgccggataattgctcagaattaaaatattcgtccagatgtttatatagcccatgcctgtgtttcttctgagctgcagccagagatcattggttggttcacagcgataagcagagttagtctaaaatggaggcaaatacttaaaacttatttcttctctcagttaatggattctatagagaaaagtagctactcagcatgggaatgtaaaaaaatgagtaaactatgatcttattctgaactcattaacaacaaacctgaaaaaccaattgaagagactgtaatttaaagacaagtgtatgatatgttttgaaacataatttttctctctccagttctgatttttgtcagaaactaatcattataggactgagttgtttgcaaaataaactttagtcttatggttggtctgatcatttgcataaagtgaagccataataattaataataattctgtaggaaaagcctgcaagcatgaggagcttcacagtctaacactatgagcacatgcatcctccagcaactcactgaatattttcaagtcagccggttcttagcttaaataacatccagttggtatctgtcccaggaacactaatatatggttctctctgcaggcccctttctccacagattaagggttttttttttttctctgtaatatcaactcagatatgttgaatgctttttccttattagtggtttttcaggtttgttgttaatgatttcagaataagatcattgtttactcattttttttaaattcccgtgccgagtagctacttttctctatagaatccattaactgggagaaaaaataacattttcttatgggtgaacaattaaatagtttgacatatatttatgtactggtatataatgcagcttgaaatcaaggcatgcctcaatcataaaaatcatggctaaattctcaaagaattgtgctgagtgaaagaagctaaggaattaagagtaaattttatataattcattgtagaaatattagaagatgccactaccataaattaaaatgaagaagacttaaatttttctgagaaaatggtgttgggaatgatgcggatgtgatttaagtttcagaggaataagaaaaaagatttagggattaatttaattattcaaaacttgattgaagtgccgagtgaatggctccaaacatagtctacatttttcaaatcattccctataaatttgaattaattatttatttttatacttgaataaagcaataacaaagaaataaatgaatatttttgctaaaatggagcaataaaaagactgatattgacagaagaaatatgactgacttctgaaaatacacacacatgagccgtggttctctctacatatttagataaattacagaaagttgtcataactgatggggaatcctgcagacttcactaggcatagtccacactgccctggagttgtctcaggggagctgcctcctccagtggttagagcacaggcccaggtaataggactcatttttttagatgtgtaattttagacacactgcacaactgctgtgttctctgtgcaaattatctcctgtaaaatgtaacattgaaacctgccttaaatatattgtgtaaatatgtaaaaataaaatcagattgtgagagctaaatgctaatcaaggcgcaatcacgtaatatacaattatattttcctgaatgatggaattaataccaatctcccccaggacacttcatctgcacggagcccggcctctcctcagatgtcccaccccagagcttgctatatagtcggggacatccaaatagggccctccctctgctgatgaaaaccagcccagctgaccctgcagctctgggagaggagcccagcactgggattccgaggtgtttccattcggtgatcagcactgaacacagaggactcaccatggagttttggctgagctgggttttccttgttgctattttaaaaggtgattcatggagaactagagatattgagtgtgagtgaacacgagtgagagaaacagtggatatgtgtggcagtttct

SEQ ID NO: 13318 - DNA, 2300 bp, Homo sapien
ataggtgagtctgcactccagcctgggcaacaaaacaagtcttgcctgtaaatacaaaagaaagataaattaataggtactgactttgacatttcggataataatattttcataaaccgaatttaattatacccacattgttacctacaccttcactgaaaagttcctagttatcatgagttccatcaacactccacgtgttcaaatctggacatccaagagagtctggagaataaaatgcaatgagggcagtgaaacttgcatatattcagcacctcttaactcaggaggactcaatacaccctggaacactctgcttttctgaatggctcacaatgactccagctcactctccaacctcctcaaacatctggcttctgtttgccctaagttcacgctctgctcttagtctgtgctctgaagtctttgcaaaggtgaaaatgagctgtcagatggaacttccttctcacctcagcatggaatttactgtttcatttaatgaccactctttccataatggttgatttctttcagcctgttcattactggtgattttcaagggaatctctattgaatttttacatttttgcatttttgtctcggtgacaatgttgagaagtttttacctctagcatcataacatgatctagtgacctgacacatttgtggcaagcaatacctacaaattcagaagttctttggttactttccacaaaatataattatttctggtctgtgtatgagcatatcctagcaaccttgtactccacacaggtagatgtctacaagcctatgaattaatctctgtaaataaaaatttatctcaatttctttcaatgttcataattcttctgaggatgaggaagatctttctggatctattcagacaataggcccagagaccacctggtatgtaaggagctcacctggctcacctggttccccctgttgtctcacataaggtcaagcccacttgttcaggtcctaagaagagagctcagttttatctgattttacaacactcccaatttctgctgactctcctgttacccacatccatggagatacattatttattatacaattaaccaaagtaatgtcaaaggcccaatgtgcaatattgcacatcctagggtatgttcatgcaattgaatcgaggagaaagtctttcagagacagatggatctgaactggtaaatatgtgtgtaaggactctgggcttaagtgtcattgtccagccatgtttcacaggtgtgacctgtcagggaagaaccagagttccttgtgttctcagaggggaggggtcccagaagtcctctctggttcccaggaaaggtaattgcattaatcttggtgatgagactatcatccagtgatgatgtactatagagtttatgtttgaagttgacactctatcgcaatctacatcttttcacacagaagtgtttagaggtcaggccacatcttcaggatcccacattgagaaggacagagatatattccactaccttctcctgagatctcaggcagaaacccaaatttcaaaaggtctcagaagggcagctctcaggggctatttaaaaataacccacttcgtgggacagggagcatccttctaaccatgatggatgttctgaactacaataaacattgcatggaaccagggtctgaattcactgtgattattacactccactgctgtttcaatgtgtctgaaggggtaaatgacaatttagatgacctgggtgtgtggtttgttttacataaatcttcaaggatagaacagcattgaacctattccaaaatctgtccctgatccaagatcacactgatctcccagagcagcatcttcagcacatttccctacctggaagaagaggactatgggcttggtaaggggaggccacaggaagagaactgagttctcagagggcacagccagcttcctactcccagggcaagcccaaaagactggggcctccctcctcccttttcacctgtccatacaaagtcaccgcccacatgcaaatcctcacttaggcacctacaggaaaccagcacacatttccttaaatttgggatccagctcacatgggaaatactttctgagactcatgggcctcctgcacaagaacatgaaacacctgtggttcttcctcctgctggtggcagctcccagatgtgagtgcctcagggatccagacctgaagatatgagatgctgcctctcatcccagggctcaccgtggttctctctgttcacaggggtcctgtcccaggtgcagctgcaggagtcgggcc

SEQ ID NO: 13319 - DNA, 2300 bp, Homo sapien
gagctacagtaaacattggattgggcccagttttgtctgagttcaatgtgattgttatactcagctgctgatcctatatggactgagtatggataatttaaatgagcctggctgcgtggtttgttatatgaaaacctgaactaaatataaataaagggcatgtctggactagcatgagggtgagagattctgggagctccaccccccttactcttattgccctttcctccaggaacctccaggtcctcagggtgagaatccacacagatcccttcatggctctattgccaggagaccaaatctctgataaaatcactcagaccttcttcagacagacaacccagggaaagggcatttttacacccttatgtatgtggggaaaggtaatccatacccattagaagcccctgccagcagcctaactttatcatgaaaatgggtaaaattagccaataggggtacatttaagaaaattttcctgtgatgttccatccagaaaagagcaaaaatcagcttcacacctggagacttcctgtatcgggcacagctcagagaaagaagatcaccacagaattaaaatgcaactgtaagaacatgtaatgcttccgtgttccacacattatgtctcaccagtttagtcaatatggattaaatatgagagcgtggcaatgcacaaactctatctgaggaggaaagtcagagaaaaaatgttaaagaaaatatggcaatttgaagcctctgacaccagcaacttcagcaccaaggaaatgatttcaccctcattggcctcaaatttacttttcatggagcattttcagggttccaaagtgagaccaggtgaattcaatgtgcatgcacttctcaggtgtccacgtgtattttgtttattttatttctatttgcagaaagtaaacacatattcagccttagtgtcagtgtagggagtgctttccatgacatgaataccagaaaaaaaggaaaaacatggggccaattaatgtaaaaattagccactgtgtgtgtgtgtgtgtgtgtgtgtaggtgtgatttgaatactagagttggagtgggcttctatccacatgcacctgcacctgcaggtagtctcaggtgcaataatcaactgcctgaccctaaaggaaacaagaatctccccaaacccctgaagagtgtttgggtttaccgtgtgtccagtgattcagtgcctctagagctccaggaaggggctcccccggtgatgcctgagatcttttcttcaggtctcccctgcagagttcctctgggtttcctaagggcaattcactatttcaaaagatggtgtgagaagcacatgctgtcactaaaggagaattctgagccacggcacagccactttatactgggctagagacactggtatgaatatactctgtaagtttagacagaaagcctcgtgcatggtaggggctgggctgcagggggtgctcaggataaacgcagcacagtctcccgccccagagcaggtgcacaggaggctggggaggggttcctctcagggcctgggacttcctttgaaaatatctaaaataagtatttcacaagggctgctgttgtttgtataaatatcctattcaattgtgagcatttatcaaactggatgttgtaatgacaaccacttttacaatggggatttcaaactcccctagatatcttaatagtaagcagctggaggtcaagaagagatcctttcttttaaataagtgcaatttttggagaaacatactcattcccaaaataacgcattcacatattaaggtctagaaatggctcaagttgtccctggtgcattcgaatgtgggttcaaagtgaggtgcgtgtcctgagggagcttgttctccagtggaggaagctctgtcaacacagagttcagggatgtgtaggggtcgtatcgcctctaacaggattacggcttgaaccctcagcatgtacaattgtgtcgtccatctgtcatgtatttgctctatctcatcctggctcaggaattgggctattcaatagcatccttcgtgaatatgcaaatcactaaggttaatacagatatctctgtgccgtgagagcatcacccaacaaccacacccctccttgggagaatcccctagatcacagctcctcaccatggactggacctggagcatcctcttcttggtggcagcagcaacaggtaagggactccccagtcccagggctgagggagaaaccaggccagtcatgtgagacttcacccactgctgtctcctctccacaggtgcccactcccgagt

SEQ ID NO: 13320 - DNA, 2300 bp, Homo sapien
tttctaaccaggatgatggctctggattaaatatgagagtgtgccaatgcacagtctctgaggagaacatagggacactaaaaaagcaatggcagggagttagacaaggacagtagagcaatatgaagcctctgacgtgaacatttttaaaaacaagatcttggaaactccctcattcacctcagcttcttttatcatgaagactttccaagattcttaactgagacaaagaaaataacaacctgcatgcacttccgaagtctccgcttgtatcctgtttgctttagatctctaggagaaaaatgtcagacacctgggcctagtgtcaatgtgggaggcactttctacagatgaggcgcaagaaggaagggaaaacgtgtgttattggaatagtggatatgaagtgtgctctcatctgaaagcatctgcacctgctggaaatctcagatgcaacattcaactgcaagaaccaaggcacacccaaatctcctgtaagattttggattcattatccactgattcagtgcaactggagcttcagagaaggggctccctcctgtgtcatagcatccttgctttgagttcattagatttagtaaggctaatcaattgtttgaagagatggtgtcagcagcgtatgctgtcactgaaggagtattctaaaccaggacaaagccatttcatgttaggcgagggaagctggcggaaaatgctttatgagccccacaggaacttccttgcaaggcaagggctgggctggagggggcgcgcaggaaccgcccagcacaggttccatccccggaggggtgcacaggaggctggggacgaggttccctctcagcgcctgtgtcttcctttggcaacaaaaaaaatcctaagtgttcaagaagttgctgatgtgtctttaagtatcctgttccgtcagagcctttcctataactgaaggcaaccagaactgtgttttaaagtcggttccgaggactgcaagtatcttaatagtgaggatataaaggataggaatggttttactaattgaaaggatacagaattgtggggttccgaggactgcaagtatcttaatagtgaggatataaaggataggaatggtttcactaattgaaaggatacagaattgtgggagtcactatgttcctatgaataaaaaattcagatttcagtgttaagtaatgttgcctacattgtgtgagtgacagggcagtggtggatctgagagtgtggcaggtgcacagacctagtgagtcagaaatcaatatggaaagatgaggatctatggatatgaactgaaagtaagtaaacagttcatgaaattctattaaatggagtaggaaataaaacccaaacttatccaaaacacaaattccttggcgattattttgggagcagtgagttcatcaggaaccccaaacttctcttacgtcttctgattcctgttgtccatgagatgagaaattcagctctaattgtgcatcacagggcaaatctgtaaaccaggagtgtttctattgaggatcatggtggatcaggattccaggcaggtgctggagacactgtctcaggagcgcccagatgatctcagggggacctgctggacactcacgtggaacatcagcagtcactttctcagagtaaccagtgagctgtgctggtgcctgatgggactaggatggggtcaaggcaccttctcagtgtcatggagagtgattgttccagaaatcatccaggtggtctctacgctaatcaaatatgggttcacagggaggaacatgtgctctgggtgcttggtcttcagtgaaaggacgtctggccaccaaaagtttgtaaatggagcagggcatgcatttcctcaaggaggattagggcttggagcatcagcatcccactcttgtaaggctgatgtgtcatttaccttccctttcttatcccaaatcagggtcttcagctatgaaatgctctgactcatgaatatgcaaataacctgagatgcactgaggtaaatatggatatttgtcagccctgagagcatcatccagaaaccacatccctccgctagagaagcccctgacggcacagttcctcactatggactggatttggagggtcctcttcttggtgggagcagcgacaggcaaggagatgccaagtcccagtgatgaggaggggattgagtccagtcaaggtggctttcatccactcctgtgttctctccacaggtgcccactcccaaatgcagctggtgcagtctgggcctgaggtgaagaagcctgggacctcagtgaagg

SEQ ID NO: 13321 - DNA, 2300 bp, Homo sapien
ttcaaaagcaagttacaagcattgggtaaacacacccattggaaatgacagaaattgcccataacaaaaagaccccatgcaagtccaaaatccagcagggcagtcaaatcataaagctccacaatgatcacctgtaactccccttctcacatccgggacatgttgatgcaacaggtgagttcccatggtcttgggcagctccacccctgtggctttgcagggtacagcctccctcctggctgctttcacaggctggtgttcagtgtctgtggattttccaggcacaaagtgcaaactgtcagtggatctaccattccagggtctggaggatagcagccctcttctcacagctccactaggcagtgccccagtagggactctgtgtgggagctcgggccctatatttcctttcctcactgccgtagcagaggttccccatgaatgagccaccactgcagccaacttgtgactggacatccaggtgttttcatacaccttctgaaatctaggcagaggttctcaaaccccaattcttagcactctttccataatggttcatttttttggcctgttcattactggtatttttcaaaggaatctcacttgaatctttactcttttgcaatttgtctccatgacaatgttgggaagttttatctccaccatcataacatgatctagtgatctcacacatttgtggcaaacaatacctacaaattcagaagctctttgcttttctttccatgaaatataattctttctgttctgtgtataagcatatcttagcaaccctgcacacacccacatagatgtccacaagcctatgaattattctctgtaaataaaaacttatatcaatttccctcaatgttcataattctcctgagtgtgaggaagctccttctcgatctgttcaaacaaaatgcccagagaccatccggtaggtaaggagttcacctggctctggtgtggggtctgtctctttccctctgttgtcccacaggtcagcccagttgttcaggtcctaagaagaaagcccaggtttgtcctgattttaaaacacttcaaacttctgatgactctcctgttacccacatccatggagatagattatttattatataattcaccaaactaatgtcaaatgtccaagttgcaataccgcacatcctagggtatgttcatgcaattcaatggaggagaaagtctttcagagacagatggatctgaaatgataaatatgtgggtaaggactctggacttgagtgtcattgtccagccatgttgcacaagtgtgtcctgtcagggaaggatcagagttccttgtgctctcagagggaaggggtcacagagttcctctctggttcccaggaaaggtaatcgcactaatcttcatgatcttcatgagactatcctccagtgctgacctgttatagagtttttgtctgaagttctcactgcaatccccaatctacatattttcaatcagaagtgtttagaggccaggacacatcttcaaggtcacacattgagaaggatgtagatatgtcccactaccttctcctgagatctcagacagaatcccagatttcaaaaggacacagaaggacagctctcaggtgcttttaaaaaatgacccacttccagggacagggagcttccctataaccatggtggatgttctgaactacaataaacattggatggatccaggattgtttgaagtcactgtcattattacattcagctgctgtttcaatgtgtctgaagtagtaaatgacaatttagatgacaatttatatgaatcttcaagggtagaacaatattgaccatattccaaaatctgtccttgatccatgatcacactcatctcccagaccaggtccttcagcacgtctctttacctgaaagaagaggactctgggcttggagaggggagaccccaagaagacaactgagttctcaaagggcacagccagcatcctactcccagggcgagcccaaaagactggggcctccctcctcctttttcacctctccatacaaaggcaccacccacatgcaaatcctcacttaagcacccacaggaaaccaccacacatttccttaaattcaggttccagctcacatgggaaatactttctgagagtcctggacctcctgtgcaagaacatgaaacatctgtggttcttccttctcctggtggcagctcccagatgtgagtatctcagggatccagacatggggatatgggaggtgcctctgatcccagggctcactgtgggtctctctgttcacag

SEQ ID NO: 13322 - DNA, 2300 bp, Homo sapien
ttccctataaccatggtggatgttctgaactacaataaacattggatggatccaggattgtttgaagtcactgtcattattacattcagctgctgtttcaatgtgtctgaagtagtaaatgacaatttagatgacaatttatatgaatcttcaagggtagaacaatattgaccatattccaaaatctgtccttgatccatgatcacactcatctcccagaccaggtccttcagcacgtctctttacctgaaagaagaggactctgggcttggagaggggagaccccaagaagacaactgagttctcaaagggcacaggcagcatcctactcccagggcgagcccaaaagactgggggctccctcctcctttttcacctctccgtacaaaggcaccacccacatgcaaatccttacttaagcacccacaggaaaccaccacacatttccttaaattcaggttccagctcacatgggaaatactttctgagagtcctggacctcctgtgcaagaacatgaaacacctgtggttcttcctcctcctggtggcagctcccagatgtgagtgtctcagggatccagacatgggggtatgggaggtgcctctgatcccagggctcactgtgggtctctctgttcacaggggtcctgtcccaggtgcagctgcaggagtcgggcccaggactggtgaagccttcggagaccctgtccctcacctgcactgtctctggtggctccgtcagcagtggtggttactactggagctggatccggcagcccccagggaagggactggagtggattgggtatatctattacagtgggagcaccaactacaacccctccctcaagagtcgagtcaccatatcagtagacacgtccaagaaccagttctccctgaagctgagctctgtgaccgctgcggacacggccgtgtattactgtgcgagagacacagtgaggggaggtgagtgtgagcccagacacaaacctccctgcatggacgcggaggggaccggcgcaggtgctgctcaggaccagcaggtggcgcgcggggcccccagagcatgaggccgggtcaggagcaggtgcagggagggcggggcttcctcatctgctcagtggtctccgtcctcgccagcacctcgctgtcaccagggctcctctttctttattatctgtggttctgcttcctcacattcttgtgccaggaaagaaacgaggaagacaaattttcgtctatagttgaagcttcaccaattactaggaacttgcctacaagttcctgcatgacccattataacttatcgattaaaaaatatatattctaatgcttctcaccatctcttgatttgtatcatcaactgaattgtaccctctttgaaattcatatgatgaaaccttaaattcaatggatctatattggaattttaatgaaataattaaggttaaatgtggtcataattgtaagaccctaatgcaatagacgtgttgtctttataagaagaggaagagacaccagagacctctcacttttcacgtgcaggcagagaagaggccatgtggagacatagtgcactagaaggtggcccagtgcaagccaggaagaagccgcgccaagaaccagccctgccagcacactaatcttcaacattcagactgcagaattttaagaaaatcagtatttgttgtttaagccacccactcctgttgtcttcttatgaagatccagacagactaataccacataactctgttagtgctgtcccctggatggagaattagcctcctgaggctgggcacatctctcagatttccacataaaacaggtaaaaaatagtagttctgatataaaaacttgtcatgtccctgttggccaatttctgggcaaggtcttttaaataagccaagtttgcggggaaatggagaccatatgtttgtgggactctaaccgtggaatctactgcattgctctagcagaatcaaaaattgaacaccagtgagctctttattctcattaaaatgtgtgtctttggaaatgttaacattctgtccagaatctgtgctcacaaacaactgtgtttcttagtgcactcttggcctggtggagccctcgcagaccctctccctcacctgtgctgtctctggattttccatcacaaccagtgtttcctgctggagctggatccacgagtccacatgggaaggactggagtggaccaggcgcacacgtcatgaagggagcaaaaattcccacccactccttatgaatccagtcaccatctccaaattcgggtccaa

SEQ ID NO: 13323 - DNA, 2300 bp, Homo sapien
aattgcccataacaaaaaggccccatgcaagtccaaaatccagcagggcagtcaaatcatagagctccacaatgatcacctgtaactccccttctcacatccgggacatgttgatgcaataggtgagttccgatggtcttgggcagctccacccctgtggctttgcagggtacagcctccctcctggctgctttcacaggctggtgttcagtgtctgtggattttccaggcacaaagtgcaaactgtcagtggatctaccattccagggtctggaggatagcagccctcttctcacagctccactaggcagtgccccagtaaggactctgtgtgggagctctggccctatatttcctttcctccttgccctagcagaggttctccatgaatgatccaccactgcagccaacttatgactggacatccaggtgttttcatacatctcctgaaatctaggcagaggttctcaaacaccaattcttagcactctgtcgataatggttcattttggtggcctgttcattactggtattttccaaaggaatctcacttgaatctttactcttttgcattttgtctccatgacaatgttgggaagttttacctccaccatcataacatgatctagtgatctcacacatttgtggcaaacaatacctacaaattcagaagctctttgcttttctttccatgaaatataattctttctgttctgtgtataagcatatcttagcaactctgtgcacacccacatagatgtccacaagcctatgaattattctctgtaaataaaaatttatatcaatttccctcaatgttcataattctcctgagggtgaggaagctccttctcgatctgttcaaacaaaatgcccagaaaccatctggtaggtaaggagttcacctggctctggtgtggggtctgtctctttccctctgttgtcacacaggtcagcccagttgttcaggtcctaagaagaaagcccaggtttgtcctgattttaaaacacatcaaacttctgatgactctcctgttacccacatccatggaggatagattatttattatataattcaccaaactaatgtcaaatgcccaagttgcaataccacacatcctagggtatgttcatgcaattcactggaggagaaagtctttcagagacagatggatctgaaatgataaatatgtgggtaaggactctgggcttgagtatcattgtccagccatgtttcacaagtgtgtcctgtcaggggaaggacaagagttccttgtgttctcagagggaaggggtcacagagttcctctctggttcccaggaaagataatcgcactaatcttcatgatcttcatgagactatcctccagtgctgacctgttatagagtttttgtctgaagttctcactgcaatccccaatctacatattttcaatcagaagtgtttagagggcaggacatatcttcacggacacacattgagaaggatgtagatatgtcccactaccttctcctgagatctcagacagaatcccagatttcaaaaggacacagaaggacagctctcaggtgcttttaaaaaatgacccacttccagggacagggagcttccctataaccatggtggatgttctgaactacaataaacattggatggatccaggattgtttgaagtcactgtcattattacattcagctgctgtttcaatgtgtctgaagtagtaaatgacaatttagatgacaatttatatgaatcttcaagggtagaacaatattgaccatattccaaaatctgtccttgatccatgatcacactcatctcccagaccaggtccttcagcacgtctctttacctgaaagaagaggactctgggcttggagaggggagaccccaagaagacaactgagttctcaaagggcacaggcagcatcctactcccagggcgagcccaaaagactgggggctccctcctcctttttcacctctccgtacaaaggcaccacccacatgcaaatccttacttaagcacccacaggaaaccaccacacatttccttaaattcaggttccagctcacatgggaaatactttctgagagtcctggacctcctgtgcaagaacatgaaacacctgtggttcttcctcctcctggtggcagctcccagatgtgagtgtctcagggatccagacatgggggtatgggaggtgcctctgatcccagggctcactgtgggtctctctgttcacaggggtcctgtcccaggtgcagctgcaggagtcgggcccaggactggtgaag

SEQ ID NO: 13324 - DNA, 2300 bp, Homo sapien
ttaggggcaccctattcattcccatcacctggcatgatttaaaggataattgcttagaattaaaatattgatacagatttttttatattccccatcgctttttgtttcttctgggctgtagccagagatcattgattggcgctcaggaataagcagtcagtctaaaatgcaggcaaatacttaaacaactgaagagattagaatttaaagatgatcgtatgatatgttttgaaatacaatttttctctttccagttctggtttttgtcagaatcaagtaattgtaagactgagttgtttgcaaaataaactttagtcttaaacttggcctgattatttgcataaagtgcagcaagaatattaataataattctgtaggaaaagcctgcaagcaccaggagtttcacagtctaacactatgagcacgtgcatcctcacgcaactcgctgaatatttccaagccagcctgttcctatcttaaatgccatccagttgtatctgccccaggtacactaatatatgggtcctgcttctctgcagcctcctctctcctcagatttcaggttttgtttattgtttgttttctctctgatataaactcaaatatgttgaaggtttttttgtgtgtggttgttcaggtttgttgttaatgagatcagaataagataatactttactctttttatttatttatttatttattttttgagtcggagtctcgctctgtcacccagactggagtgcagtggccctatctcagctcactgcaagctccgcctcccgggttcacgccattctcctgcctcagcctccagagtagctgggactacaggcgcccgccaccatgcccggctaattttttgtagttttagtagagacggggtttcaccgtgttagccaggatggtctcgatctcctgaccttgtgatccgcccgcctcggcctcccaaagtgctgggattacaggcgtgagcctccgcgcccggcccatactttgctccgttttatattcccatgctttagtagctgcttttctctatcaaatccattaactgagagaacaaatcacatttagttacaggtgaacaattaaatagtttggcatatatttatgtactggaacataacgcagcttgaaatcaaggcatgcctcactcatataaacaacatggctaaattctcaagtaattctgtttagtgaaagaaactaaggagttaagagtaaattttatatgatacatttgtaggaattttagaagatgccattattgtaaattaacacggagaagatttgagtttgtctgacaatacgctgttgggagtaatgtggatgtgagttgaatttcagagaaataaaagaaagatttagggattaatttaattattcaaaacttgattgaagtgctgagcaaatggctgcaaacataggtcaacatttttcaaatccttcactataaatttgaattaattacttattaattacacttgaataaagcaataacgaagaaaccaataaaataacatttgactaaaatggagcaataaacagatcgatgttaacacaaggaatatgactgacttatgaaaacatgcacatgaaccatggttcactctacgtattttggtaaattacagaaagttgtcataacagatggggaatcctgcagacttcactaggcatggtccacgctgccctggagttgtctcaggggagctgcctcctccagtggttagagcacaggcccaggtaataggactaatttttttagatgtgtaattttagacacactgcacaactgctgtgttctctgtgtaaattatctcctgtaaaatgtaacattgaaacctgcattaaacatattgtataaatatgtaagaataaaataagattatgagagctaaatattaatcaaggcacaagcacataatataaaattatattttcctgaatgatacaattattccaatctgtcccaggacacttcatctgccctgagcccagcctctcctcagatgtcccaccacagagcttgctatatagtgggggacatgcgaatagggccctccctctgctgatgaaaaccagcccagctgaccctgcagctctgggagaggagcccagcactggaagtcggcggtgtttccattccgtgatcagcactgaacacagaggactcaccatggagtttgggctgagctgggttttccttgttgctattttaagaggtgattcatagataaatagagatgttgagtgggagtggacatgagtgagagaaacagtggatgtgtgtggcagtt

SEQ ID NO: 13325 - DNA, 2300 bp, Homo sapien
gagcccaagataagccatcatatcccctgtgacctgcacatacacatccagatggccggttcctgccttaatggatgacattccaccacaaaagaagtgaaaatggcctattcctgccttaactgatgatactatcttgtgaaattccttctcctggctcatcctggctcaaaagctcccctactgagcaccttgtgaccccctctcctgcccgccagagaacaacccccctttttcctttacctacccaaatcctataaaacggccccacccctatctcccttcgctgactctcttttcagactcagcccgcctgcccccaggtgaaataaacagctttattgctcacacaaagcctgtttggtggtctcttcacatggacacgagtgaaactaaggttttaaaaaactacatacctccttcaaaatttgaccacaaggaaaaaccttgtggaccaacaacagacagagtcatttctctgctcacataagtcaaatgcctatctgattgccaccatttctctattgttttgctaagccagactaaggcctacgtgactattcctgtaaattgtgcattcagttaaaggctaatcagaaactcaagagaatgcaagcatttgtctcaaacctacctgtgatctggacgctctctccccacttcagaaagtcctgcctttctgaaccaaaccaatgtacatcttacatatattgattactgtcccatgtctccctaaattgcataaaatcaagctgtgtcccaccaccttgggcatatatcgtcaggactccctgaggcggtgtcactgccatgtccttaatcttggaatacgaacttcctaaatctattgagattagtctcaggtactctttggattacaggtttgttttttatttcataacttcaattatctgaaatactaaacaaaatttgccaaagtgtacattctcttgttgctgttgttgcaaaaaatatatttatgtaacttatatataatttatcatctatgtgtgttaccaagctgagtagcagatttattagtaagacttagagagagtaatgaaaaattcaaatgccagttagtaacttaatagaaaaacaaattatgctacatttgtttgctgaaatgctacccattatttgtaagaaataaacacatgcaacataaaagatttaattctcagtatttctattgagagaaataatccacatacataagagcatatactatattttttcattcttataaattctagaatataaaagctagtcaaaagacatgtgaaaacatcagtagatttataaagaaatggtagaagaagggaaggagaaaaaccaaaaaaatataaaagagcaagaggaatgctgaggggagttgacttgtcaccttcttaaaaatagagattttatttttcaaagtttactattgtacagaataaatatgtgaattttcttatctgtcaattaaacctcataaaatttattacaaaaaaactgaaattttagacaaaaagagggtgataggaaggaacaaataaatatgttaaatgtcaaatatacctaaaaatttatttgtctgacccctagttttctccgtatttttaggtaaatgcagcaaaatcacacaagttgtcgtggcaggaagtggattctgcaaaccacactaggcccgtttatctctgtcctagagttggttaaaagagcaactgaggccagctgtgaggagcataggcccgggtactaggactcactcatgccagatataagcccttagacacatacatagcccctccatgtgtgggttcacttttacatctgtacatgaagaaaccactgattcctaaataacataatttatacacataggtaaaaataattaaaaatgtgatagttattaagtgtttatcacacaacaatttcacaataaaacagcattttcccaaatgtaatcattgtcatcgaaatccccaaggacactctcatctgccctgggccctgccctctcctcaggcatctcaccccagagcttgctatatagtaggagacatgcaaataggtccctccctctcctgatgaaaaccagcccagccctgactccgcagctctgggagaggagcccccgccctgggattcccaggtgttttcatttggtgatcagcactgaacacagaagagtcatgatggagtttgggctgagctgggttttccttgttgctatttttaaaggtgattcatgaggaaatagagatattgagtgtgagtggacatgagtgagagaaacagtggatttgtgtggcagt

SEQ ID NO: 13326 - DNA, 2300 bp, Homo sapien
actgctcccagctgacaggggatgctgttttgggaagatctcccttgaggtctgtctaagggacctagtaaaagggagccattatcccaggcttcacttggatgaccatttggagttgatgcctgaaggtgagaagagacaaaccaggttattagaagacatgtatcaaaaccaaacaaggtggtaaggacagtttgaaaaaaaattccaaggctgctgacacacccagataactggcggctgtagttatgcctgctaagatttgggtgcatggggcttggctttcgttagctccctaggacttattttcccaaacaaagaaacctccgggttagggggaccctatttattccagtcacctggcatgatttgcaggataattgctcagaattaaaatattcgtccagatgtttatatagcccatgcctgtgtttcttctgagctgcagccagagatcattggttcgttcacagcgataagcagagttagtctaaaatggaggcaaatacttaaaacaattggaagagactgtaatttaaagacaaatgtatgatatgttttgaaacataatttttctctctccagttctgatttttgtcagaaactaatcattataggactgagtgatttgcaaaataaactttagtcttgtggttggtctgatcatttgcataaagtggagcaataataattaataataattctgtaggaaaagcctgcaagcaccaggagcttcacagtctaacagtatgagcacatgcatcctccagcaactcactgaatattttcaagtcagctggttcttagcttaaataacatccagttggtatctgtcccaggaacactaatatatggttctctctgcaggcccctctcgccacagatttaaggtttatttttttcctctgtgatatcaactcagatatgttgaaggtttttcccacatttgtggtttttcaggtttgttgttaataaggtcagaataagatcatagtttactcatttttttacattcccatgctgagtagctacttttctctataaaatccattagctgagagaaaaaataacattttcctaacggtgaacaattaaatagtttgacatatatttgtgtaccagtatataatgcagcttcgaatcaaggtgtgcctcaatcataaaaaacatggctaaattctcaaagaattgtgctgagtgaaagaagctaaggaattaagagtaaattttatataattcattgtagaaatattagaagatgccactaccataaattaaaatgaagaagacttaaatttttctgagaaaatggtgttgggaatgatgcggatgtgatttaagtttcagaggaataaggaaaaagatttagggattaatttaattattcaaaagttgattgaagtgccgagtgaatggctgcaaacatagctctacatttttcaaatcattccctataaatctgaattaattatttatttattatacttgaataaagcaataacgaagaaataaatgaatatttttgctaaaatggagcaataaaaagactgatattgacagaagaaatatgactgacttctgaaaacacacatgaaccatggttctctctgcatatttaggtgaattacagaaagttgtcataacagatggggaatcctgcagacttcactaggcatggtccacgctgccctggagttgtctcaggggagctgcctcctccggtgattagagcacaggcccagataataggattacatttttttagatgtgtaaacttagacgcactgcacagctgctgtattctctatgtaaattatcttctgtaaaatacaacattaaaggctgcattaaatatattgtgtaaatatgtaaaaataaaatcagattatgagagctaaatgttaatcaaggcacaatcacataatataaaattatattttcctgaatgatggaattactaccaatctcccccaggagacttcatctgcactgggcccggcctctcctcagatgtcccatcacagagcttgctatataatgggggacatgcaaatagggccctccctctgctgatgaaaaccagcccagccctgaccctgcagctctgggagaggagcccagcactgggattccgaggtgtttccattcagtgatctgcactgaacacagaggactcgccatggagtttgggctgagctgggttttccttgttgctattttaaaaggtgattcatggagaactagagatattgagtgtgagtgaacacgagtgagagaaacagtggatatgtgtggcagtt

SEQ ID NO: 13327 - DNA, 2300 bp, Homo sapien
ccgaatctaacaacacaaatatcatggaagctttccttggagtagctcctgtaattagaatcattggtattctgccctcctgtcagtggtggaacgttctattggcacatgtggaaacctcttagagggatgagtttctttgaacacaataaaattttaagttaggaataacttatttgaaagcaattcattgaaggttattgctaagaagaagttagaagcagtcttttggcagtcatttcttcaagatgtatggcagcgtaggatggatatatgaagtggaataggaacttgggctagttaaatggaatagcctccaatgttaatctgtttaccttttaactgaatgaaaaagcctatagttgtaagaaaagaaaaaacaatacagtgctcccctgtcccacacattaccttctcatcagtataattaatctacattgaagatgagtgtggtaatgcagagactctatttagggaggagaacatagggaaatgcaaagacaatgggagaaaaaagtcaaggacagtagagcaattcgaagcctctgataccaatagcttgaggaccaaggtcatgactcaacttttggtggacacagagtcacttctcttagggaaactgcagtattctaaggtgacaatatgcaaacatgatgaatgtacacttgctacatctccaattgtgtactgttttccttacttctgtttgaagaagggagtcgtatactcaggtctagtatcagtgtagggggtgctccctatttgcaagatactagaaaaaaatggtaagttagaggcccattgttataaaaatctactagctccgtgtcagtgtgtgtgtgtgtgtctgtgtgaatgtgtgtgttattgaaacagaagacatggagtgggcattgatccacaagcatagatacctacaggcactcttagatgtaatatttaactgcaggagtctaaataaaataaaggattcgccaaaagtcttgaaaattttggtgctgactatgtgtccactgattcaatgcatcctgagttccagggaagggaatccccaattctttcatagagttgactgggtctcctaaggtcaatgttttcaaacgatggtgtcagtaacatatggtgtcactgaaagagcattttaaactagggcatggccacttcctatagccctagagacactgagaggtaaatgccctgtgagcccagatggaaacctccatgcagggcagaggcagtgctgcagggggcgcccaggacccacccagaacaggctccagccccagagctggtgcacaggaggctgcagagggagtctctcacaaggactgagtgttactttactgaaaaccaaaaaattataacatgctaaataagaattttatgaggactatttatgtatatttaaataccctaatgtatttagaaataaataaatcaataattcagtgagaaccacatttaaaaggcaaaattattactgctttgagatattttactagtaaaaagataaagaacaagaatggttttattaaataaaaatgtacacatttcagagacacactggtcccgagagtaagactgcggagagcaaatcctggaaagggcggaggctgtccatgtgccatgggaacttgggctcacgctgagaaccatgtccggtgtgagtcagcttcttagcggagaaattctcccttcacaaatttccgggcatataaagggaaacatgtcattaaataagaatgaagatttgtacctcagcatcccacagttgtgtggtccatgtgagatctattttctctttctcgtgctggatcaggtgtaatgctatgaagtagtagtcctcatgaatacgcaaatcacctgaggtgaacactacagataactctgtgccctgagagcatcacccaataaccacatccctcctctagagaagcccctgagagcacagctcctcaccatggagtggacttggaggatcctaattttggtggtcgtagctgcaggtaggataattctcagtccccaggactaaggtgactgggtccagtcaaagggggttttatccactcccgtgtcctctccacaggtgcccagtcccaggtgcagctggtgcagtctggggatgagatgaagaaggctggggcatcagtgaaagtctcctgcaagacttgtggatacacctaccttcaccagttactctatgcactaggtgcgccaggcccatgcacaagggcttgagtggatgggaaggatgtgccctagtgatggcagcataagctacgcagagaagttccagg

SEQ ID NO: 13328 - DNA, 2300 bp, Homo sapien
gagccccaacaggaacctccttgcaaggcaagggctgggcgggagggggcactcaggagccactcagcacgggttccagccctgcagctggtgcacaggaggctgctgagaaggtttcctctcaggggctgggtcttcctttgggagaaaaaagctaaaattcaataagttgctggtgtgcccttaaatattctatcacatctgagctgctcccacaattcaagagaaggagaactatctttttaaatattctatcacatctgagctgctcccacaattcaagacaaggagaactatctttttaaagtcggcttctaagattataaataccttaatagtgagaatatgaagaatagggatggtcttactaattcaatgcagagagaattatgggagtcactatatttccatgaataataatttcagatttcaggctggggctggtggctcatgcctgtaatcccagcactttgcgaggctgaggtgagcgggtcacgaggtcaggagctggagaccatcctggctaacaccatgaaaccctgtctctattcaaaatacaaaaaattagccaggtggggtggcatgaacctgtagtcccagctactcgggaggctgaggcaggagatttaatcctacaagacctacagcctcagacaatgctgctgtcagtgatcgtgggaagcagagtttgcagtgagctgagattgtgccactgcactccagcttgggcaacaaagcgagattccatctccaaaaaaaaaattcagatttcagtgttaagtaaagttgcctacattgtgtgagtgacagggcagtggtggatccgagagtgtggatctgagagtgagtcagaaatcagcatgtaaagatgaggatctatgcacatgaactgaaagtatgtaaacagttcatgaaattctaataaatccagtaggaaataaaacccaaacttatccaaaacacaaattcccttgaaattattatgggagcatgagttcataaagaactcctaactcctgtttcaacttctgaatcctagtgtccatgacataagaaaatcatctccaattatgcatcacagggcaaatctgtaaactaagagtttttctgttgacgatcctggggaatcaggacaccaggaaggtgctggagaaactgtctcaggagcgccccagggatctcagaggaacgtgctggcactcacgtgggacatcagcgtcacttgctcagagtcatcagtgagctgtgctggtgtctgacgggtccagcatagggccaaggcacctgctctgtgtcatggaccgagatggtccccagaatgatccaagtggtctctgtgctaatctaatgtagtttcacagtgagaggccgttctgagggggcttcttcttcagtgaaaggacctctgtccacaaatattcctaaatggacaggggcatgcatttcctcaagcaggattagggcttggaccatcagcatctcactcttgcaaggctgatgtgtcatttgtcttccctttcttatcatggatcaggctttgagctatgaaatgccctgtctcatgaatatgtaaatacctgagatccactgaggtaaatatggtctgtgccctgagagcttcacccaacaatcacatcccgcctctagagaatcccccgagagcatggctcctcaccatggacaggacctagagctaatcttcctggtggcagcagctacaggtaaggtgctcccaagtcccagtgatgagaaggggattgagtacagtcaaggaggctttcatccactcctgtgtcccaccctccaatgggtgtctgctcccaggtgcagctggggcagtctgaggctgaggtaaagaagcctggggcctcagtgaaggtctcctgcaaggcttccggatacaccttcacttgctgctccttgcactggttgcaacaggcccctggacaagggcttgaaaggatgagatggatcacactttacaatggtaacaccaactatgcaaagaagttccagggcagagtcaccattaccagggacatgtccctgaggacagcctacatagagctgagcagcctgagatctgaggactcggctgtgtattactgggcaagatacacggtgcgagaacccacatcctgagagagtcaggaaccccagggaggaggcagctgtgctggcatggaggagatgacaaagattattagattgaagactttcttagaaaatagcattaagtcatttacgaaaaggaacaatataaatgtgtatttgagaaattgtaattatttgagagattt

SEQ ID NO: 13329 - DNA, 2300 bp, Homo sapien
aagtttttgtattcactgtgggtccactgcttaagtgcatctggagcttcagagaaggggctctgtcctgtgtcatagaacccttgctttgagtctcacggcagagttcaatctgtttagtaaagttgatcaattatttcaagagatggtgtcaccagcatatggtgtcactgagggagtattctacactagcacacagccatttcacgctgggctagagaagctggggggaaatgctttgtgagccccaacaggaacctccttgcaaggcaagggctgggcgggagggggcactcaggagccactcagcacgggttccagccctgcagctggtgcacaggaggctgctgagaaggtttcctctcaggggctgggtcttcctttgggagaaaaaagctaaaattcaataagttgctggtgtgcccttaaatattctatcacatctgagctgctcccacaattcaagagaaggagaactatctttttaaatattctatcacatctgagctgctcccacaattcaagacaaggagaactatctttttaaagtcggcttctaagattataaataccttaatagtgagaatatgaagaatagggatggtcttactaattcaatgcagagagaattatgggagtcactatatttccatgaataataatttcagatttcaggctggggctggtggctcatgcctgtaatcccagcactttgcgaggctgaggtgagcgggtcacgaggtcaggagctggagaccatcctggctaacaccatgaaaccctgtctctattcaaaatacaaaaaattagccaggtggggtggcatgaacctgtagtcccagctactcgggaggctgaggcaggagatttaatcctacaagacctacagcctcagacaatgctgctgtcagtgatcgtgggaagcagagtttgcagtgagctgagattgtgccactgcactccagcttgggcaacaaagcgagattccatctccaaaaaaaaaattcagatttcagtgttaagtaaagttgcctacattgtgtgagtgacagggcagtggtggatccgagagtgtggatctgagagtgagtcagaaatcagcatgtaaagatgaggatctatgcacatgaactgaaagtatgtaaacagttcatgaaattctaataaatccagtaggaaataaaacccaaacttatccaaaacacaaattcccttgaaattattatgggagcatgagttcataaagaactcctaactcctgtttcaacttctgaatcctagtgtccatgacataagaaaatcatctccaattatgcatcacagggcaaatctgtaaactaagagtttttctgttgacgatcctggggaatcaggacaccaggaaggtgctggagaaactgtctcaggagcgccccagggatctcagaggaacgtgctggcactcacgtgggacatcagcgtcacttgctcagagtcatcagtgagctgtgctggtgtctgacgggtccagcatagggccaaggcacctgctctgtgtcatggaccgagatggtccccagaatgatccaagtggtctctgtgctaatctaatgtagtttcacagtgagaggccgttctgagggggcttcttcttcagtgaaaggacctctgtccacaaatattcctaaatggacaggggcatgcatttcctcaagcaggattagggcttggaccatcagcatctcactcttgcaaggctgatgtgtcatttgtcttccctttcttatcatggatcaggctttgagctatgaaatgccctgtctcatgaatatgtaaatacctgagatccactgaggtaaatatggtctgtgccctgagagcttcacccaacaatcacatcccgcctctagagaatcccccgagagcatggctcctcaccatggacaggacctagagctaatcttcctggtggcagcagctacaggtaaggtgctcccaagtcccagtgatgagaaggggattgagtacagtcaaggaggctttcatccactcctgtgtcccaccctccaatgggtgtctgctcccaggtgcagctggggcagtctgaggctgaggtaaagaagcctggggcctcagtgaaggtctcctgcaaggcttccggatacaccttcacttgctgctccttgcactggttgcaacaggcccctggacaagggcttgaaaggatgagatggatcacactttacaatggtaacaccaactatgcaaagaagttccagggcagagtcaccattaccagggacatgtccctgaggacagcc

SEQ ID NO: 13330 - DNA, 2300 bp, Homo sapien
caaatcttttgcaagtttttgtattcactgtgggtccactgcttaagtgcatctggagcttcagagaaggggctctgtcctgtgtcatagaacccttgctttgagtctcacggcagagttcaatctgtttagtaaagttgatcaattatttcaagagatggtgtcaccagcatatggtgtcactgagggagtattctacactagcacacagccatttcacgctgggctagagaagctggggggaaatgctttgtgagccccaacaggaacctccttgcaaggcaagggctgggcgggagggggcactcaggagccactcagcacgggttccagccctgcagctggtgcacaggaggctgctgagaaggtttcctctcaggggctgggtcttcctttgggagaaaaaagctaaaattcaataagttgctggtgtgcccttaaatattctatcacatctgagctgctcccacaattcaagagaaggagaactatctttttaaatattctatcacatctgagctgctcccacaattcaagacaaggagaactatctttttaaagtcggcttctaagattataaataccttaatagtgagaatatgaagaatagggatggtcttactaattcaatgcagagagaattatgggagtcactatatttccatgaataataatttcagatttcaggctggggctggtggctcatgcctgtaatcccagcactttgcgaggctgaggtgagcgggtcacgaggtcaggagctggagaccatcctggctaacaccatgaaaccctgtctctattcaaaatacaaaaaattagccaggtggggtggcatgaacctgtagtcccagctactcgggaggctgaggcaggagatttaatcctacaagacctacagcctcagacaatgctgctgtcagtgatcgtgggaagcagagtttgcagtgagctgagattgtgccactgcactccagcttgggcaacaaagcgagattccatctccaaaaaaaaaattcagatttcagtgttaagtaaagttgcctacattgtgtgagtgacagggcagtggtggatccgagagtgtggatctgagagtgagtcagaaatcagcatgtaaagatgaggatctatgcacatgaactgaaagtatgtaaacagttcatgaaattctaataaatccagtaggaaataaaacccaaacttatccaaaacacaaattcccttgaaattattatgggagcatgagttcataaagaactcctaactcctgtttcaacttctgaatcctagtgtccatgacataagaaaatcatctccaattatgcatcacagggcaaatctgtaaactaagagtttttctgttgacgatcctggggaatcaggacaccaggaaggtgctggagaaactgtctcaggagcgccccagggatctcagaggaacgtgctggcactcacgtgggacatcagcgtcacttgctcagagtcatcagtgagctgtgctggtgtctgacgggtccagcatagggccaaggcacctgctctgtgtcatggaccgagatggtccccagaatgatccaagtggtctctgtgctaatctaatgtagtttcacagtgagaggccgttctgagggggcttcttcttcagtgaaaggacctctgtccacaaatattcctaaatggacaggggcatgcatttcctcaagcaggattagggcttggaccatcagcatctcactcttgcaaggctgatgtgtcatttgtcttccctttcttatcatggatcaggctttgagctatgaaatgccctgtctcatgaatatgtaaatacctgagatccactgaggtaaatatggtctgtgccctgagagcttcacccaacaatcacatcccgcctctagagaatcccccgagagcatggctcctcaccatggacaggacctagagctaatcttcctggtggcagcagctacaggtaaggtgctcccaagtcccagtgatgagaaggggattgagtacagtcaaggaggctttcatccactcctgtgtcccaccctccaatgggtgtctgctcccaggtgcagctggggcagtctgaggctgaggtaaagaagcctggggcctcagtgaaggtctcctgcaaggcttccggatacaccttcacttgctgctccttgcactggttgcaacaggcccctggacaagggcttgaaaggatgagatggatcacactttacaatggtaacaccaactatgcaaagaagttccagggcagagtcaccattaccagggacatgtcc

SEQ ID NO: 13331 - DNA, 2300 bp, Homo sapien
attaaagaacttctgtacagcaaaagacactatcgacagagtaaacaggcaacctacagaatgggaaataaaatatttgcagcctatacatctgacaaaggtccgacacttagtatatacatggaaatttaacaaacatacaagaaataaaaagtgaccaaaggacatgaaaagacacttcaaaaaagacctacatgtggccaacaagcataggaaaaaatgctgaatatcactatcattagagaaatacatatcaaaacctcaatgaggtaccgtctcacatcagtcaggatggctaatcttaaaaaaaaaataacagatttttaaggttacagaaaaaaggggaaatttatacacttttggcgggaatataaatgagttcaaccattgtggaaagcagtgtggtgatccctccaataacctaaaacagaagtttcatttgacccaacaatcctacaactggacatatacctaaaggaatataaacatgtaggttcactgcagcactatccacaatagcatagacatggaatttacctaaatccccatcactggcagaatgatagagaaaaatgtggtacatacaaccatggaatactatgcagctaaggaaagaatgaaactatgtcctttgtaggaacatgatggaactggcagtcaatactcttagaaaactaattcaggaacagaaaaccagatattatatattctcccttatttgttggagataaataaaagcaaatattcttccagggcctgagtcttccttattcaacaagtcattctaaattaagtgttcagcaagttgctgatactcatctaaatattctatttcatctgggccacttacatcactcaaaaagcaatgagagctatatttctaaggggggttctaggataataaatacctgaatagtgagaatatgaaggatatggaaactgggccacttatatcactcaaaaaggaatgagagctatatttataaggggggttctaggataataaatacctgaatagtgagaatatgaaggatatggaaactgggccacttatatcactcaaaaagcaatgaaagctatatttacaaggggggttctaggataataaatatctgaatagtgagaatatgaaggatatggatggtttttttttaactcaatgggcacataactgtgggagatactatattcctatgaagaaggtattcagacttcagagataagtaatgtttcctacattgtgcttgtgacttggaagcagtggattgaagagtgtgataagtgcccagaccaagcagaacagaaatcagcatgtaaagatgatgatctatggatatgatctaaaaccatgtaaatacttcaaataattctatttaatgcagtttgaaataaaacacaaacttattcaaaatacaaattacttggtaattattttgggagctatgagttcaccaagaaactcaaattcctatttctatttcaacccctgattcctactgtcaatgggagggaagtctcagaaccaatcacacatcagacggcaaatctgtcaaccaagagtctttccactgaaggacctgggaggtcaggaccctcaggaaagtgctggggaccctgtcttgggagtgcccagcagatctcagaactctccatgggtcctgctggacactcatgtagggtaacgagtggccaccttttcagtgttaccagtgagctctgagtgttcctaatgggaccaggatgggtctaggtgcctgctcaatgtcagagacagcaatggtcccacaaaaaacccaggtaatctttaggccaataaaatgtgggttcacagtgaggagtgcatcctggggttggggtttgttctgcagcgggaagagcgctgtgcacagaaagcttagaaatggggcaagagatgcttttcctcaggcaggatttagggcttggtctctcagcatcccacacttgtacagctgatgtggcatctgtgttttctttctcatcctagatcaggctttgagctgtgaaataccctgcctcatgcatatgcaaataacctgaggtcttctgagataaatatagatatattggtgccctgagagcatcacataacaaccacattcctcctctgaagaagcccctgggagcacagctcatcaccatggactggacctggaggttcctctttgtggtggcagcagctacaggtaaggggcttcctagtcctaaggctgaggaagggatcctggtttagttaaagaggattttattcacccctgtgtcctctccacaggtgtccagtc

SEQ ID NO: 13332 - DNA, 2300 bp, Homo sapien
taaattaaagaacttctgtacagcaaaagacactatcgacagagtaaacaggcaacctacagaatgggaaataaaatatttgcagcctatacatctgacaaaggtccgacacttagtatatacatggaaatttaacaaacatacaagaaataaaaagtgaccaaaggacatgaaaagacacttcaaaaaagacctacatgtggccaacaagcataggaaaaaatgctgaatatcactatcattagagaaatacatatcaaaacctcaatgaggtaccgtctcacatcagtcaggatggctaatcttaaaaaaaaaataacagatttttaaggttacagaaaaaaggggaaatttatacacttttggcgggaatataaatgagttcaaccattgtggaaagcagtgtggtgatccctccaataacctaaaacagaagtttcatttgacccaacaatcctacaactggacatatacctaaaggaatataaacatgtaggttcactgcagcactatccacaatagcatagacatggaatttacctaaatccccatcactggcagaatgatagagaaaaatgtggtacatacaaccatggaatactatgcagctaaggaaagaatgaaactatgtcctttgtaggaacatgatggaactggcagtcaatactcttagaaaactaattcaggaacagaaaaccagatattatatattctcccttatttgttggagataaataaaagcaaatattcttccagggcctgagtcttccttattcaacaagtcattctaaattaagtgttcagcaagttgctgatactcatctaaatattctatttcatctgggccacttacatcactcaaaaagcaatgagagctatatttctaaggggggttctaggataataaatacctgaatagtgagaatatgaaggatatggaaactgggccacttatatcactcaaaaaggaatgagagctatatttataaggggggttctaggataataaatacctgaatagtgagaatatgaaggatatggaaactgggccacttatatcactcaaaaagcaatgaaagctatatttacaaggggggttctaggataataaatatctgaatagtgagaatatgaaggatatggatggtttttttttaactcaatgggcacataactgtgggagatactatattcctatgaagaaggtattcagacttcagagataagtaatgtttcctacattgtgcttgtgacttggaagcagtggattgaagagtgtgataagtgcccagaccaagcagaacagaaatcagcatgtaaagatgatgatctatggatatgatctaaaaccatgtaaatacttcaaataattctatttaatgcagtttgaaataaaacacaaacttattcaaaatacaaattacttggtaattattttgggagctatgagttcaccaagaaactcaaattcctatttctatttcaacccctgattcctactgtcaatgggagggaagtctcagaaccaatcacacatcagacggcaaatctgtcaaccaagagtctttccactgaaggacctgggaggtcaggaccctcaggaaagtgctggggaccctgtcttgggagtgcccagcagatctcagaactctccatgggtcctgctggacactcatgtagggtaacgagtggccaccttttcagtgttaccagtgagctctgagtgttcctaatgggaccaggatgggtctaggtgcctgctcaatgtcagagacagcaatggtcccacaaaaaacccaggtaatctttaggccaataaaatgtgggttcacagtgaggagtgcatcctggggttggggtttgttctgcagcgggaagagcgctgtgcacagaaagcttagaaatggggcaagagatgcttttcctcaggcaggatttagggcttggtctctcagcatcccacacttgtacagctgatgtggcatctgtgttttctttctcatcctagatcaggctttgagctgtgaaataccctgcctcatgcatatgcaaataacctgaggtcttctgagataaatatagatatattggtgccctgagagcatcacataacaaccacattcctcctctgaagaagcccctgggagcacagctcatcaccatggactggacctggaggttcctctttgtggtggcagcagctacaggtaaggggcttcctagtcctaaggctgaggaagggatcctggtttagttaaagaggattttattcacccctgtgtcctctccacaggtgtcca

SEQ ID NO: 13333 - DNA, 2300 bp, Homo sapien
tatgaacaaatgtgcacctgcaaacaattgtaattttcacatttattttaattgcatttgtttataattgtgcatgaggtcctggtgcagagttgagtttttcatgggaattgttccaagaatcaagaacatccattttccactttcactggtttttccccatgtgcagagaccttgagtagagcacatctggcccttatccacactatctcttgtgtccccgggaaagacagggatttgcctgactgcagaatctagggtaggagtctgcacacgtctgagcctgcagagaagcccagtgaagtttaatgaagtcagagagctttcccgtgtggggaacctctagcttcctcactctcagagattgctggtcagctgtaattgaggggttaagaattagagcacctgggagcctgtctcatcacagctccattctgtaacttaccaccatcagactgcaggtaataactcaatcttgatttttctgaccccatcttattcatttgtaagtttggttatacaaaatgttacattttagtttctgattcaaacctcagaattttgtgaattcatcaggaataattaaaaatgtgtccagtttttgggaaatgtaaattaatgtccatactgtttatgtgtgtgtgcgtgtgtgtgtggggggatatgtcagtcacttacaccccagtaaaaatgattccttaattatatagtcgaactgcaattagatttgctgaaaattgtctacagtaatttctgtgaagctgaccttgccaccttgctgtgaggatgctcagtgcacaggtgaggtctcacaggagagatccaaggttcagcccccaggactggctgagctcctggcttggagccagacataggactgggcatctcagaagcagatcccctggccctcctttatctgggctgtatgggcagcagaggacaagcagaagaaactcagaattcagccaagacagagccccatttaggagcaggtgcatcaaggaaccagccagagaacctctgactacaatctagggttgtcttcttttgcttcacagcatccagtcctaaggagaccacccactatatcatctgtaactcagaactttcttgttacaaaggaaaacacaaatgaatataactctgcagttaacttcttgaacctggattgatgagtttccacggccttatgagcacagagaccacatccagtgcaggtgcagagcaaggctgcaacagtcagcctgctgctccctcaggagtcttccaattcccttgtccaaagcatccgctcattcatgggctgagaaaagggaagtcattcatgcagtctactctctccacagaactgacggggcacaaggacaacatcgatttttcatggaacatgcctctaggaatgcagctgtgtgcacacacactgctaagcacacacttctttacataattacttgtaactgtattttcttatttattctctccaatttttttacacaaattcatcacttttccccataatcaaagaggattttgatcagaatgcttgtggggagccccttgccccccagatgcccaccatcattattcttgaagggaggaggaacggcagctctcttgatttctactctaatcctctaggactaaaaccagaaggttgcatgtccggtgcgggagcatcgaagaagatcctgtctgtagaagcaggagcgtcaagacttgactgagagccatggtgctgaaatgagatagattccctgatggagagcacacgtggacccccacacctgagggctcactgctcctcaccacagatgcactcccctactgagtcctgagacctgagtgcaccccatagagtagggctcagatgaggggatgcaaatctccaccagctccaccctcccctgggttcaaaagacgaggacagggcctcgctcagtgaatcctgctctccaccatggacatactttgttccacgctcctgctactgactgtcccgtcctgtgagtgctgtggtcaggtagtacttcagaagcaaaaaatctattctctcctttgtgggcttcatcttcttatgtcttctccacaggggtcttatcccaggtcaccttgagggagtctggtcctgcgctggtgaaacccacacagaccctcacactgacctgcaccttctctgggttctcactcagcactagtggaatgtgtgtgagctggatccgtcagcccccagggaaggccctggagtggcttgcactcattgattgggatgatgataaatactacagcacatctctgaagac

SEQ ID NO: 13334 - DNA, 2300 bp, Homo sapien
tgtcagaaagcagctgctgggaacctgacccacctgcattttgctgcctgtaggaggaggaggacgtgcattctcagggccaacacactgtttttggatttttatagagaacacctgcttttactttattttttggaaaaatatatgaacaaatgtgcacctgcaaacaattgtaattttcacatttattttaattgcatttgtttataattgtgcatgaggtcctggtgcagagttgagtttttcatgggaattgttccaagaatcaagaacatccattttccactttcactggtttttccccatgtgcagagaccttgagtagagcacatctggcccttatccacactatctcttgtgtccccgggaaagacagggatttgcctgactgcagaatctagggtaggagtctgcacacgtctgagcctgcagagaagcccagtgaagtttaatgaagtcagagagctttcccgtgtggggaacctctagcttcctcactctcagagattgctggtcagctgtaattgaggggttaagaattagagcacctgggagcctgtctcatcacagctccattctgtaacttaccaccatcagactgcaggtaataactcaatcttgatttttctgaccccatcttattcatttgtaagtttggttatacaaaatgttacattttagtttctgattcaaacctcagaattttgtgaattcatcaggaataattaaaaatgtgtccagtttttgggaaatgtaaattaatgtccatactgtttatgtgtgtgtgcgtgtgtgtgtggggggatatgtcagtcacttacaccccagtaaaaatgattccttaattatatagtcgaactgcaattagatttgctgaaaattgtctacagtaatttctgtgaagctgaccttgccaccttgctgtgaggatgctcagtgcacaggtgaggtctcacaggagagatccaaggttcagcccccaggactggctgagctcctggcttggagccagacataggactgggcatctcagaagcagatcccctggccctcctttatctgggctgtatgggcagcagaggacaagcagaagaaactcagaattcagccaagacagagccccatttaggagcaggtgcatcaaggaaccagccagagaacctctgactacaatctagggttgtcttcttttgcttcacagcatccagtcctaaggagaccacccactatatcatctgtaactcagaactttcttgttacaaaggaaaacacaaatgaatataactctgcagttaacttcttgaacctggattgatgagtttccacggccttatgagcacagagaccacatccagtgcaggtgcagagcaaggctgcaacagtcagcctgctgctccctcaggagtcttccaattcccttgtccaaagcatccgctcattcatgggctgagaaaagggaagtcattcatgcagtctactctctccacagaactgacggggcacaaggacaacatcgatttttcatggaacatgcctctaggaatgcagctgtgtgcacacacactgctaagcacacacttctttacataattacttgtaactgtattttcttatttattctctccaatttttttacacaaattcatcacttttccccataatcaaagaggattttgatcagaatgcttgtggggagccccttgccccccagatgcccaccatcattattcttgaagggaggaggaacggcagctctcttgatttctactctaatcctctaggactaaaaccagaaggttgcatgtccggtgcgggagcatcgaagaagatcctgtctgtagaagcaggagcgtcaagacttgactgagagccatggtgctgaaatgagatagattccctgatggagagcacacgtggacccccacacctgagggctcactgctcctcaccacagatgcactcccctactgagtcctgagacctgagtgcaccccatagagtagggctcagatgaggggatgcaaatctccaccagctccaccctcccctgggttcaaaagacgaggacagggcctcgctcagtgaatcctgctctccaccatggacatactttgttccacgctcctgctactgactgtcccgtcctgtgagtgctgtggtcaggtagtacttcagaagcaaaaaatctattctctcctttgtgggcttcatcttcttatgtcttctccacaggggtcttatcccaggtcaccttgagggagtctggtcctgcgctggtgaaacccacacagaccctcaca

SEQ ID NO: 13335 - DNA, 2300 bp, Homo sapien
aggaatccctgcagagtcactcctttcattagagtagaccacaggacatgggcctcagcacacgccatgccacagatgtcagaaagcagctgctgggaacctgacccacctgcattttgctgcctgtaggaggaggaggacgtgcattctcagggccaacacactgtttttggatttttatagagaacacctgcttttactttattttttggaaaaatatatgaacaaatgtgcacctgcaaacaattgtaattttcacatttattttaattgcatttgtttataattgtgcatgaggtcctggtgcagagttgagtttttcatgggaattgttccaagaatcaagaacatccattttccactttcactggtttttccccatgtgcagagaccttgagtagagcacatctggcccttatccacactatctcttgtgtccccgggaaagacagggatttgcctgactgcagaatctagggtaggagtctgcacacgtctgagcctgcagagaagcccagtgaagtttaatgaagtcagagagctttcccgtgtggggaacctctagcttcctcactctcagagattgctggtcagctgtaattgaggggttaagaattagagcacctgggagcctgtctcatcacagctccattctgtaacttaccaccatcagactgcaggtaataactcaatcttgatttttctgaccccatcttattcatttgtaagtttggttatacaaaatgttacattttagtttctgattcaaacctcagaattttgtgaattcatcaggaataattaaaaatgtgtccagtttttgggaaatgtaaattaatgtccatactgtttatgtgtgtgtgcgtgtgtgtgtggggggatatgtcagtcacttacaccccagtaaaaatgattccttaattatatagtcgaactgcaattagatttgctgaaaattgtctacagtaatttctgtgaagctgaccttgccaccttgctgtgaggatgctcagtgcacaggtgaggtctcacaggagagatccaaggttcagcccccaggactggctgagctcctggcttggagccagacataggactgggcatctcagaagcagatcccctggccctcctttatctgggctgtatgggcagcagaggacaagcagaagaaactcagaattcagccaagacagagccccatttaggagcaggtgcatcaaggaaccagccagagaacctctgactacaatctagggttgtcttcttttgcttcacagcatccagtcctaaggagaccacccactatatcatctgtaactcagaactttcttgttacaaaggaaaacacaaatgaatataactctgcagttaacttcttgaacctggattgatgagtttccacggccttatgagcacagagaccacatccagtgcaggtgcagagcaaggctgcaacagtcagcctgctgctccctcaggagtcttccaattcccttgtccaaagcatccgctcattcatgggctgagaaaagggaagtcattcatgcagtctactctctccacagaactgacggggcacaaggacaacatcgatttttcatggaacatgcctctaggaatgcagctgtgtgcacacacactgctaagcacacacttctttacataattacttgtaactgtattttcttatttattctctccaatttttttacacaaattcatcacttttccccataatcaaagaggattttgatcagaatgcttgtggggagccccttgccccccagatgcccaccatcattattcttgaagggaggaggaacggcagctctcttgatttctactctaatcctctaggactaaaaccagaaggttgcatgtccggtgcgggagcatcgaagaagatcctgtctgtagaagcaggagcgtcaagacttgactgagagccatggtgctgaaatgagatagattccctgatggagagcacacgtggacccccacacctgagggctcactgctcctcaccacagatgcactcccctactgagtcctgagacctgagtgcaccccatagagtagggctcagatgaggggatgcaaatctccaccagctccaccctcccctgggttcaaaagacgaggacagggcctcgctcagtgaatcctgctctccaccatggacatactttgttccacgctcctgctactgactgtcccgtcctgtgagtgctgtggtcaggtagtacttcagaagcaaaaaatctattctctcctttgtgggcttcatcttcttatgtctt

SEQ ID NO: 13336 - DNA, 2300 bp, Homo sapien
aaggtttcaatagcaataggattccctcagttgtatgtcctctgataatttaaacaataacttctttattatactcaactctaaacggtctaaagagtatgtctaagttaaccctgcattcgcttatatgacatttgctctaccccagataaggtcatattctctttctgtttgttcctgcaagtcactgactttcacaagatgtaaggtcccttgtttgtcctataacatcaataatctgatgttttaaagaaaatatgctaatttgcagctcagtaagtttagttgtaaaaataatacatttttttctgagatgcctacatctccatgctgagttggagctttatttgtaacactcagaaactggaaataacaaaaatattaaggagctttataaatagtacgggcacactcattaactggaattctgttcctcattacaaggaacatattctttatacacaaccaaactactgactcacaagtaattgtgctgagcaagaagccacacaaatgaaatggaaactgtaaggtttcactttaaccaaattttgaaaaatagacctgaagtagcaaacatgagagactgactcagtgtagtgagcggaaaatgactgggaggcaggaattagaggaaactagggaaaccttgaagtgtaattcattgttatcttgattgttattttggatgcacaggtaagcacatgtgaaactgcattttttcctttggagacatggtcttgctttgtcatccaggctggagctcagtggtgagatcatagctctctgcagcctcagaccctgcgtctccaccaatcttcctccctctgccatacgtagctgggactactggtatgtaagacaatacttggcttcagtgcttattaaaatgcacactttaattaagcagtatttgttatacagcaatcatgcctcaataagagtattgcaaataagtggatagataatttgttcaataaagattgatggaaagatagatgctaacatgagaaaatgcatgacacccaagaaaataacactgtaggaaacatgcttttctttacaattgttaggtaatcacaacagagcatacacatcacaccatgttctcgttacagagaaaaggttctgcaaacctcactagctgcaacccctgtgtgctgggcttggttcagggagaagtcaggtccagtggtgagaagcacaggcccagataaccaagctcactctgaccgaatgtgagccctgggtacattgtacaacccatctgtgcttctgctggtaatttttcatctgtaacatggaaatgacattgatactatataccatgtttcctctgcatatgtaaaaataaaaggtgattggtgctaactttaaatatacacagtttatgtacattgattgcacctcaatacaacagttttaaatagatattacaacattataagttttataggtttaatattttatcacagaacaaactttcaataagaaaccacaatttccaaatgctatcaatatcacaaatctcccccaggacactctcacatgctctgagccccactctctcctcaggcgtcccatcccagagcttggcatgtagtaggagacatgcaaatagagccctccctcggcttatgaaaaccagcccagccctgaccctgcagcactggaagaggagccccagccctgggattttcaggtgttttcatttggtgatcaggactgaacacagaggactcaccatggagtcatggctgagctgggtttttcttgccgctattttaaaaggtaattcattgagaactattgaaattgagtgtgagtggataagagtgagagaaacagtggatttgtgtggcagtttctgaccagggtttctttttgtttgcaggtgtccagtgtgaggtgcagctggtggagtccgggggaggcttggtccagcctggggggtccctgagactctcctgtgcagcctctggattcaccttcagtgactactacatgagctgggtccgccaggctcccgggaaggggctggagtgggtaggtttcattagaaacaaagctaatggtgggacaacagaatagaccacgtctgtgaaaggcagattcacaatctcaagagatgattccaaaagcatcacctatctgcaaatgaacagcctgagagccgaggacacggccgtgtattactgtgcgagagacacagtgaggggaagtcagtgtgagcccggacacaaacctccctgcaggggtccccaggaccaccagggggcgccagggacactgtgcacggg

SEQ ID NO: 13337 - DNA, 2300 bp, Homo sapien
ccagtttctacgagttcctccagtgcctgtaacacagagctgttagtggctttgcccctgcctgttaattctttggtcatgtaatggtggtgagggagctgggtctggatgcatttcagccacagctgctgttccacttccccacacagaaccatctcgggaggaagaggttggagatttttctgatgtgtcctcaatcctggcagaaaaggtttcaatagcaataggattccctcagttgtatgtcctctgataatttaaacaataacttctttattatactcaactctaaacggtctaaagagtatgtctaagttaaccctgcattcgcttatatgacatttgctctaccccagataaggtcatattctctttctgtttgttcctgcaagtcactgactttcacaagatgtaaggtcccttgtttgtcctataacatcaataatctgatgttttaaagaaaatatgctaatttgcagctcagtaagtttagttgtaaaaataatacatttttttctgagatgcctacatctccatgctgagttggagctttatttgtaacactcagaaactggaaataacaaaaatattaaggagctttataaatagtacgggcacactcattaactggaattctgttcctcattacaaggaacatattctttatacacaaccaaactactgactcacaagtaattgtgctgagcaagaagccacacaaatgaaatggaaactgtaaggtttcactttaaccaaattttgaaaaatagacctgaagtagcaaacatgagagactgactcagtgtagtgagcggaaaatgactgggaggcaggaattagaggaaactagggaaaccttgaagtgtaattcattgttatcttgattgttattttggatgcacaggtaagcacatgtgaaactgcattttttcctttggagacatggtcttgctttgtcatccaggctggagctcagtggtgagatcatagctctctgcagcctcagaccctgcgtctccaccaatcttcctccctctgccatacgtagctgggactactggtatgtaagacaatacttggcttcagtgcttattaaaatgcacactttaattaagcagtatttgttatacagcaatcatgcctcaataagagtattgcaaataagtggatagataatttgttcaataaagattgatggaaagatagatgctaacatgagaaaatgcatgacacccaagaaaataacactgtaggaaacatgcttttctttacaattgttaggtaatcacaacagagcatacacatcacaccatgttctcgttacagagaaaaggttctgcaaacctcactagctgcaacccctgtgtgctgggcttggttcagggagaagtcaggtccagtggtgagaagcacaggcccagataaccaagctcactctgaccgaatgtgagccctgggtacattgtacaacccatctgtgcttctgctggtaatttttcatctgtaacatggaaatgacattgatactatataccatgtttcctctgcatatgtaaaaataaaaggtgattggtgctaactttaaatatacacagtttatgtacattgattgcacctcaatacaacagttttaaatagatattacaacattataagttttataggtttaatattttatcacagaacaaactttcaataagaaaccacaatttccaaatgctatcaatatcacaaatctcccccaggacactctcacatgctctgagccccactctctcctcaggcgtcccatcccagagcttggcatgtagtaggagacatgcaaatagagccctccctcggcttatgaaaaccagcccagccctgaccctgcagcactggaagaggagccccagccctgggattttcaggtgttttcatttggtgatcaggactgaacacagaggactcaccatggagtcatggctgagctgggtttttcttgccgctattttaaaaggtaattcattgagaactattgaaattgagtgtgagtggataagagtgagagaaacagtggatttgtgtggcagtttctgaccagggtttctttttgtttgcaggtgtccagtgtgaggtgcagctggtggagtccgggggaggcttggtccagcctggggggtccctgagactctcctgtgcagcctctggattcaccttcagtgactactacatgagctgggtccgccaggctcccgggaaggggctggagtgggtaggtttcattagaaacaaagctaatggtgggacaacagaataga

SEQ ID NO: 13338 - DNA, 2300 bp, Homo sapien
taagcctgggagcgctacgggagactggggcttatttcatccccccgctgcgaccgtaaaggacagccgccccccgaagcggccattttagaggcgtttagagcgtttctgtcttctctcccagtttctacgagttcctccagtgcctgtaacacagagctgttagtggctttgcccctgcctgttaattctttggtcatgtaatggtggtgagggagctgggtctggatgcatttcagccacagctgctgttccacttccccacacagaaccatctcgggaggaagaggttggagatttttctgatgtgtcctcaatcctggcagaaaaggtttcaatagcaataggattccctcagttgtatgtcctctgataatttaaacaataacttctttattatactcaactctaaacggtctaaagagtatgtctaagttaaccctgcattcgcttatatgacatttgctctaccccagataaggtcatattctctttctgtttgttcctgcaagtcactgactttcacaagatgtaaggtcccttgtttgtcctataacatcaataatctgatgttttaaagaaaatatgctaatttgcagctcagtaagtttagttgtaaaaataatacatttttttctgagatgcctacatctccatgctgagttggagctttatttgtaacactcagaaactggaaataacaaaaatattaaggagctttataaatagtacgggcacactcattaactggaattctgttcctcattacaaggaacatattctttatacacaaccaaactactgactcacaagtaattgtgctgagcaagaagccacacaaatgaaatggaaactgtaaggtttcactttaaccaaattttgaaaaatagacctgaagtagcaaacatgagagactgactcagtgtagtgagcggaaaatgactgggaggcaggaattagaggaaactagggaaaccttgaagtgtaattcattgttatcttgattgttattttggatgcacaggtaagcacatgtgaaactgcattttttcctttggagacatggtcttgctttgtcatccaggctggagctcagtggtgagatcatagctctctgcagcctcagaccctgcgtctccaccaatcttcctccctctgccatacgtagctgggactactggtatgtaagacaatacttggcttcagtgcttattaaaatgcacactttaattaagcagtatttgttatacagcaatcatgcctcaataagagtattgcaaataagtggatagataatttgttcaataaagattgatggaaagatagatgctaacatgagaaaatgcatgacacccaagaaaataacactgtaggaaacatgcttttctttacaattgttaggtaatcacaacagagcatacacatcacaccatgttctcgttacagagaaaaggttctgcaaacctcactagctgcaacccctgtgtgctgggcttggttcagggagaagtcaggtccagtggtgagaagcacaggcccagataaccaagctcactctgaccgaatgtgagccctgggtacattgtacaacccatctgtgcttctgctggtaatttttcatctgtaacatggaaatgacattgatactatataccatgtttcctctgcatatgtaaaaataaaaggtgattggtgctaactttaaatatacacagtttatgtacattgattgcacctcaatacaacagttttaaatagatattacaacattataagttttataggtttaatattttatcacagaacaaactttcaataagaaaccacaatttccaaatgctatcaatatcacaaatctcccccaggacactctcacatgctctgagccccactctctcctcaggcgtcccatcccagagcttggcatgtagtaggagacatgcaaatagagccctccctcggcttatgaaaaccagcccagccctgaccctgcagcactggaagaggagccccagccctgggattttcaggtgttttcatttggtgatcaggactgaacacagaggactcaccatggagtcatggctgagctgggtttttcttgccgctattttaaaaggtaattcattgagaactattgaaattgagtgtgagtggataagagtgagagaaacagtggatttgtgtggcagtttctgaccagggtttctttttgtttgcaggtgtccagtgtgaggtgcagctggtggagtccgggggaggcttggtccagcctggggggtccctgagactctcctgtg

SEQ ID NO: 13339 - DNA, 2300 bp, Homo sapien
cttggaacacaggatttaggggtgattgaggctctttcttttgggttaaatgaaagttgctaggtggagggtgttaagtaaaaattactacataagctgcatagttttgtcaaatggttgtagttttcttgtccagcctgctgttcctgaaccaccctatatgaaagccctcaataaactatatgtcttgttcactggtttggcctgttgtacacgatgccagtcctattggagtccatattggtctggcgtgacatccagtcaacctggtaaaaggtccaaaaaaaatctcatgagcacccagacaatggaatctaaaaagaggagacccctgcagaaaccttgggcaggctgttaatttctacgtggggcccaacagccgttatccatgatggatggggcccagtgcctgagtatggggataccgccacaatgccaaaagttctggaagaacctcttcagtgggtgcatcttacaaagtgaaagtcagatgtccaggctgttgcattatcaggtgagtggttcttcctgactgcactctgagaagccactgagacagtgctcactgtgtatgctacagtgtgtcagtcacaagaagagctactcctagaaaaacatgccagactagctcagactaatcagagacctttctgtcctgcctgtggaagcagaatggcaaattggggaccgccgcttgtggagcagcacatttgaaggatttctggccatcacatgaattagttacggctgtgatgactaaactgtcatgggaccctaagacctagttcccataaagagttctagggggaggaggatgaagtttggggtaagcccatgggggttcctgtcctctctacacatctggtggctaccaccaaggtaaaaatgggccaactgcaccagcagaggcgagccccagagacatttcccacctgaaataaggaaacacaccacaatgtgggattccaccactgcggaattgctgacacttagaaatgggttcagacagaagaagagagagttgatcacagggtggcttcttcatctgtgaggcatgcgggaggagggcattatactccctgaactcaagattagtaaagtgacatccatcacaaaccatctgggcctgaggcagcacctcgatggtgtcagtcatggagattggaccatccctctccttagctgggtggttgcagactgcaagggaccctggtgaaacgagggagatgtccgctttattagtgtgttctcgtattgctagaaagaaatacctgaaactgagtaattcacatagaaaataggtttaatttactcatgattctgctggctgtatgggaagcatgatgaaaaatctgttcagcttctggagaggcctcaggaaatttacaatgatagtgaaaggcaaaaggggagcagccactttatatggtgggagcaggagcaaagaaagagtgagggtggaggtcccacacactgttaaacaaccaaatctcatgagaactcatttactatcatagcaaggggaccgtgctaaccattattcataaatccggacccacgatacaaccaccgggccccgcctcaaacattagggaagcaaaatcacatacagttgttatgacaggtgggacatcctgaaaacctctctaggcatgtcccacacggccctggagctgtctcaggggagcagtctcctccagtgtttagacgcacaggcacggataatagggctaagtctggccagatgtgtgatattcaacacattgcacaactgctctgttctgtatgtaatttatcttctctacaaatgtaacattgatggttgcattaaatatattctgcaaatatgtaaaaataaaataagatgatgattgctaaatgattatcaaggcacaatcacataatccgaagttacaatttcctgagagataggattactgcccatgcttaccaggacactcacatctgctctgggcactgccttctcctcaggcgtcccaccccagagcttgctatatagtaggagacatgcaaatagggtcctccctctgctgatgaaaaccagcccagccctgaccctgcagctctgagagcggagccccagccccagaattcccaggtgttttcatttggtgatcagcactgaacacagaggactcaccatggagtttgggctgagctgggttttccttgttgttattttacaaggtgatttatggagaactagagatgttaagtgtgagtggacgtgagtgagagaaacagtggatttgtgtgacagtttctgaccagggtgtctc

SEQ ID NO: 13340 - DNA, 2300 bp, Homo sapien
atcaggtaattaggctgtcgaaggcaacactgccaaatgacagcatttccgtggaaactgcgtgtacatccaggactgcacctgtgaacgatgacatcatacccttcacagtgtcgaggaaagagacatcactcaaacagacaagccaagggacttcagaaaatataaggggaaatacagtgtgcaaatatgtaaaaaatgcaataagatgattactcctaaatgaatatcaagacacaatcacataatatgaaattaaattttcctgaatgataggattactaccaatcaccccccaggacaccctcatctactctgtgcacagccttctcgtcaggcgtcccagcccagaccttgctatgtagcagaagacatgcaaataagacccccctttttgctgatgaaaagcagcccagccctgaccctgcagctctgggagaggagctccagccttgggattcccagctgtctccactcggtgatcggcactgaatacaggagactcaccatggagtttgggctgagctgggttttccttgttgctattttaaaaggtgattcatggggaactagagatactgagtgtgagtggacatgagtgagagaaacagtggacgtgtgtggcactttctgaccagggtgtctctgtgtttgcaggtgtccagtgtgaggtgcagctggtggagtccgggggaggcttggtccagcctggggggtccctgaaactctcctgtgcagcctctgggttcaccttcagtggctctgctatgcactgggtccgccaggcttccgggaaagggctggagtgggttggccgtattagaagcaaagctaacagttacgcgacagcatatgctgcgtcggtgaaaggcaggttcaccatctccagagatgattcaaagaacacggcgtatctgcaaatgaacagcctgaaaaccgaggacacggccgtgtattactgtactagacacacagtgaggggaggtcagtgtgagcccggacacaaacctccctgcaggggcgcgcggggctaccagggggcgctcgggactcactgagggcgggacaggtcccaggaacaggtgcagcggtaggttttctttctcctcagctggagaagtcaggtttgtgttttcagaactctggagtcttacaggttgctacattttcatacagttattagtatgtatttattatcattggtatttaagttttaataattttaaaccttttatgtagtgttattttttaaaactgtttactttcatttgcagttattcttccagagtttcattaacatctattgctatgagcaactacatagctatgagagcataaatttacacctgtagacgtaggtctaaatgccacaaacctgtgcataaatgtatagtgacttatatttaacattataataagataatttttaaaatatatcctaaacgatcaaacttactgatgaactaaatataaattatcagagtaatgcataattgatttcaataattttatattgtttatattaattaatatctatttctttactgaaacataatatattggtcatttcaaaatagctacgatacatttcaaatggccttgatgctaataatgaaaagattttgaggtgattaatatgctaattagttatatttaattattccatattgtattaatatatcaaaacattgctttgtacctcataaatagatacagtcgtaatttgtcaattttcaagacagttatttaatccatcctgggtcataatctttttttcccctgtccatggctgattggattgtcctgataaacccatccatacgcctgcctcccgcaggcttctgagacgggctccatgaaggccagaagcaggcaccctgtgagagtccacacgacctggagcctccctctccttggattaggccatctcctcgggatcgcagggctcttcattatcctcacccccttgttgtaccaaacaagcaacatcacactttaattcatcacgctttgctttaattttccccccaaaaatcaaggtaataattttagcaataaacatcacaacctactatgagtaagtcctttccaacgtactaaggtttcttctgaggactttacatgtattacacagtttaaatttctttatgaaatgagataccaatatctctatattagagattgtttttctaagtcgtttctgacaattaatttgtccaagggcctgtaaggattctgttagaaatccaggataaaatttgaaatttcagcagtaatatctggaaaaacattgagactat

SEQ ID NO: 13341 - DNA, 2300 bp, Homo sapien
ccatcacggcaaatgatttaagagaagaacattccaaatgcttatggccctaatgaggaagcttcaatcacgaatataaatagagttatctcattaccagtgtgatggtgtgagaaacttcaagatttccaaagagacaacctaatctggtaaaaattatagaaacccaacctgtactatcaaggaaaattattctgagaacacacagtaaatgaaatccattgactgacataaagtcctcctgttgactgaagggttatgaccccccacaaggcatatgttggaatctcaactccatcgtgacggtggcaggaggtggggcctttggtctcctttgaaaggtgttgaggctccgtttcatgaatggaatcagcgtcctgatacaataccccagagagctccctctttccttccaccaggtgtggtcacagtaggaaggtggcaatctataaataaagaattgggacatcaccagataccaatctttaagtcatctttatcttgaacttcccagccttgaaaattgggacaaatgcatttatgttatttctgagccacccagtccatgatatcctcttatagcaactcaaacagtcttagcaagtgcagtgaggatcacaatacttgagagaagagcattacctcttctttacatctcaggatcacagaatcttgaccttgggctgaactgacaagaaggtggtgcttccctctcccccagatctcagttgaggtcatgatgtcagatctttatggtggagactaaattcctgcctgtgatttgatggatgcctttctcctcccagcctcactcacaagacatagtttccatgtcaggtgttatagaccaagaacaggtggaccccgattattctcaccccagctcacttgtagggcagaggttctgggagcttcctgggagaggaacagtgagatcatacaagtccatcacttccatgcagttttctgtacttaaagcaggagtgtccttctgagctgcttgaaccctttcttctgcaccaaggtagagacttccatgtttttctagtgatacagtcagggcataaaaacagtgatagaaagctctctctaaagggcgtgaccagatttgcagtagaatgagaatagtttcaaccctaaagttcatctaaaatgttagtggttttcatggtaagtaattaatagaaacctgacagctccatgacagcaatatagaaatcaatagtccactcattttaacagagagaattagaaaacctataatttaagaataaccagctgggcactgtggctctgcctgcagttgaatttacttgggagtttgaggtgagaggatcacttgagcccaggatttcaagcgcagcctggaaacatagctagacttaatttcttgaaaaaaatcagtgctattttggggtcagaacaatcctcaaaaatggtccccggaaagaagcccaaatttaattgcaccagattgttgaacgatttatgctacaaaacagtgtcacatgtcagaaatgagcacagtgtaacatctacatggtttgttaagagacacaaatggtcaagtagaacaatcaggtaattaggctgtcgaaggcaacactgccaaatgacagcatttccgtggaaactgcgtgtacatccaggactgcacctgtgaacgatgacatcatacccttcacagtgtcgaggaaagagacatcactcaaacagacaagccaagggacttcagaaaatataaggggaaatacagtgtgcaaatatgtaaaaaatgcaataagatgattactcctaaatgaatatcaagacacaatcacataatatgaaattaaattttcctgaatgataggattactaccaatcaccccccaggacaccctcatctactctgtgcacagccttctcgtcaggcgtcccagcccagaccttgctatgtagcagaagacatgcaaataagacccccctttttgctgatgaaaagcagcccagccctgaccctgcagctctgggagaggagctccagccttgggattcccagctgtctccactcggtgatcggcactgaatacaggagactcaccatggagtttgggctgagctgggttttccttgttgctattttaaaaggtgattcatggggaactagagatactgagtgtgagtggacatgagtgagagaaacagtggacgtgtgtggcactttctgaccagggtgtctctgtgtttgcaggtgtccagtgtgaggtgcagctggtggagtccgggggaggcttggtccagcctggggggtccctgaa

SEQ ID NO: 13342 - DNA, 2300 bp, Homo sapien
aaagaaagataaaggaaaggtggatttgcaatattaaaatataaaaagtgtatttctgaacaaatgataatactgatgaggggggacaagtttattccatcacggcaaatgatttaagagaagaacattccaaatgcttatggccctaatgaggaagcttcaatcacgaatataaatagagttatctcattaccagtgtgatggtgtgagaaacttcaagatttccaaagagacaacctaatctggtaaaaattatagaaacccaacctgtactatcaaggaaaattattctgagaacacacagtaaatgaaatccattgactgacataaagtcctcctgttgactgaagggttatgaccccccacaaggcatatgttggaatctcaactccatcgtgacggtggcaggaggtggggcctttggtctcctttgaaaggtgttgaggctccgtttcatgaatggaatcagcgtcctgatacaataccccagagagctccctctttccttccaccaggtgtggtcacagtaggaaggtggcaatctataaataaagaattgggacatcaccagataccaatctttaagtcatctttatcttgaacttcccagccttgaaaattgggacaaatgcatttatgttatttctgagccacccagtccatgatatcctcttatagcaactcaaacagtcttagcaagtgcagtgaggatcacaatacttgagagaagagcattacctcttctttacatctcaggatcacagaatcttgaccttgggctgaactgacaagaaggtggtgcttccctctcccccagatctcagttgaggtcatgatgtcagatctttatggtggagactaaattcctgcctgtgatttgatggatgcctttctcctcccagcctcactcacaagacatagtttccatgtcaggtgttatagaccaagaacaggtggaccccgattattctcaccccagctcacttgtagggcagaggttctgggagcttcctgggagaggaacagtgagatcatacaagtccatcacttccatgcagttttctgtacttaaagcaggagtgtccttctgagctgcttgaaccctttcttctgcaccaaggtagagacttccatgtttttctagtgatacagtcagggcataaaaacagtgatagaaagctctctctaaagggcgtgaccagatttgcagtagaatgagaatagtttcaaccctaaagttcatctaaaatgttagtggttttcatggtaagtaattaatagaaacctgacagctccatgacagcaatatagaaatcaatagtccactcattttaacagagagaattagaaaacctataatttaagaataaccagctgggcactgtggctctgcctgcagttgaatttacttgggagtttgaggtgagaggatcacttgagcccaggatttcaagcgcagcctggaaacatagctagacttaatttcttgaaaaaaatcagtgctattttggggtcagaacaatcctcaaaaatggtccccggaaagaagcccaaatttaattgcaccagattgttgaacgatttatgctacaaaacagtgtcacatgtcagaaatgagcacagtgtaacatctacatggtttgttaagagacacaaatggtcaagtagaacaatcaggtaattaggctgtcgaaggcaacactgccaaatgacagcatttccgtggaaactgcgtgtacatccaggactgcacctgtgaacgatgacatcatacccttcacagtgtcgaggaaagagacatcactcaaacagacaagccaagggacttcagaaaatataaggggaaatacagtgtgcaaatatgtaaaaaatgcaataagatgattactcctaaatgaatatcaagacacaatcacataatatgaaattaaattttcctgaatgataggattactaccaatcaccccccaggacaccctcatctactctgtgcacagccttctcgtcaggcgtcccagcccagaccttgctatgtagcagaagacatgcaaataagacccccctttttgctgatgaaaagcagcccagccctgaccctgcagctctgggagaggagctccagccttgggattcccagctgtctccactcggtgatcggcactgaatacaggagactcaccatggagtttgggctgagctgggttttccttgttgctattttaaaaggtgattcatggggaactagagatactgagtgtgagtggacatgagtgagagaaacagtggacgtgtgtggcact

SEQ ID NO: 13343 - DNA, 2300 bp, Homo sapien
tatccctcccctagccccccaccccccaacaggccccagtgtgtgatgttcccctccctgtgtccatgtgttctcattcttcaactcccacttatgagtgagaacatgcagtgtttggttttctgttcctgtgttagtttgctgagaatgatggtttccagcttcatcaatgtccctgcaaaggacatgaacaggaaattccttctaaatgaactgtgttttgacaaatattatccagtgactcttcctacatggggtttctacatgatctatttttcttttccaaaaacaaatcactcaagtttctcatctcctgagtgagaaaaattttccccaaacacaatctcagtctaggtagacaccttcatgaatgagccttcattctcagacaggcacacactgtccccatgtggatgcttctctcagacaggcacacatatccccacatggttgggatcatctgctgggactttgccccatggggatctctattatcactggggcaagttagcacctcgatcctcatccacactgtggcctttgatgtctgtgacctgccacaccctgtctgtccctcagtgtctagaatggtgaagtagtccaccccagggatggaggaagatcccagattttcctgtgaaggagacagaatgccaatcacagagatggaaatctctcacatccctcctgggtcatattctgggcagggtctctgaagtcacccctggatcagtgtcctaagatgtctccctctatttccttgggaagaacccatagaaagacaaataagtttttctattagggcatcgtagaacttgtgctttcttgtgtgacaaatataggtattttgactattttaaaaattagatataatattaagtctaccaaatatgtaaatatataagctttataatgtatccctagagggatgtctcctggaattgagaattgaatatatatatatatatatatatatatatattccaagataaatcttggtgaacattataaaattgactctaatatttatgttcaagatgatcatttcaaaaaagttttaacaacagagaccagatgtatctttccaccagaaataactgtaaaacacagtgaaattttttaaacatgattttaaggtattttacatcaaataacaaggacagtgattgctgaggtggggaaaatatacaaaaggagccctctgatgaacgcatgctttgctactttttaaagagagtttccaggccacagtgctgaagaggaaccaggtagatttgaagttgaggaaaaggagctgagatcccagacaggccaagaagtgtggagatcacagactagacagtggatagcagaacactgttcagagagtgagccccgtagatggccggagagagacccagccttggtagagtgtggatcagtgtatgggaaccctggaaagttgtacatgagaacacaccttactctagggggcttgccttaaaatctaaaattaccctaaaatttaaacataatcagttacaaattttaaaacataaagaaagacaccatgttaaagaaagataaaggaaaggtggatttgcaatattaaaatataaaaagtgtatttctgaacaaatgataatactgatgaggggggacaagtttattccatcacggcaaatgatttaagagaagaacattccaaatgcttatggccctaatgaggaagcttcaatcacgaatataaatagagttatctcattaccagtgtgatggtgtgagaaacttcaagatttccaaagagacaacctaatctggtaaaaattatagaaacccaacctgtactatcaaggaaaattattctgagaacacacagtaaatgaaatccattgactgacataaagtcctcctgttgactgaagggttatgaccccccacaaggcatatgttggaatctcaactccatcgtgacggtggcaggaggtggggcctttggtctcctttgaaaggtgttgaggctccgtttcatgaatggaatcagcgtcctgatacaataccccagagagctccctctttccttccaccaggtgtggtcacagtaggaaggtggcaatctataaataaagaattgggacatcaccagataccaatctttaagtcatctttatcttgaacttcccagccttgaaaattgggacaaatgcatttatgttatttctgagccacccagtccatgatatcctcttatagcaactcaaacagtcttagcaagtgcagtgaggatcacaatacttgagagaagagcattacctcttctt

SEQ ID NO: 13344 - DNA, 2300 bp, Homo sapien
gctgcccgggttttcaaggaggcgccacttccacttccctccctggaaccccgaagtttgacatgggggctcctttctgccttgctccgcagctccccttcccccggagtggagccccctgtttccctggcgttccctcccacagctgcagtgttctccatcggtgtcatcaccttccagctctgctgccctgctctgcagactaaggctctgattccataagagaggggagctgcttcccagtagaaccttgctggggagctctgttcccatctcagttcctgaggggttaaaccagtgcatttaggatactggttttggtggtttgcccctgttgagtaatttcttagttctctagtgggtgtaagagacttggctctggaagcatttcagaagtgtgggctctgatacaccccagacagacactttgggaagggaagatttttgtgactattctcattataagggaaaggcattcaaaagaatagaaaaactctccagtatgtggttcctgagaatttctcactaaaaacatgcttatcacactcgactcaaaacagttcaatgtatattagtgtattttatcttgtactagcctttattgcatttggtgaactctgccccagttcagctcatactctagctttgattctccctacaaaaacttgtctctctctagatttcagatttgttgattgtcttaaaatttcaatgatctgaagtattaaagaaaatttgcaaaagtccattttctctgattaacagttattgttgattttattcttgttgtaaaaaaaagaaattctcatctatgtacatttcaaacctgaataacaaaatttttattaacaccaaaaataataaaagaatccaaatatttatcagctgcctaatagaaaaacaaatcatggtaacattgttcgctggaatattacccatcattcataataagggaatgtctgatacacaaaataagaagataaaattatcaagtatttaaattgagtaaaataagccaaacaaataagagtatgtatgattctatttttaaaaattctggaaaatgaaaactgatctaaagtaatataaagaagattagtagtttcctgggaatatgttggcagaagggaaggagaaaggataaggaaatagaaataggaagtagaaggacagaaaagaagttgagggaatttcacttgtccaccttccttataatggtaatagttatgccatgattatcagttttacactttaaatatgtaaagtttataatctgtcaatcaaatcttataaaatgtattatgaggaaacaagttgaaaattagacaatgtaggagtgacagaaagatagatatgagtatgttgaatgtcagagatacctgaaagtttatctacctgaaccctagttctctccatagtttaaggtaaacaggagagtgcaggaaaatcatccatattctgattaggcagtggcttctgcaaaccacactaggcctggccggctgtgtcctggagttggctaagggaggagtcagggccagtggtgagaagtgcaggcccagataccagaactcactcatcccagacatgagctcttagatacacagagagcccatccatgtgtggatttatcttacatctgtaagtagagaacattgactcttacagaacataatttacacacataggtaaatctgaaataaggtgatcagtgtgaagattttatcacagcacagtttcataataagcacaatttctcaaatcccattgttgtcacccatcttcctcaggacactttcatctgccctgggtcctgctctttcttcaggtgtctcaccccagagcttgatatatagtaggagacatgcaaatagggccctcactctgctgaagaaaaccagccctgcagctctgggagaggagccccagccctgggattcccagctgtttctgcttgctgatcaggactgcacacagagaactcaccatggagtttgggctgagctgggttttccttgttgctattttaaaaggtgattcatggagaactggagatatggagtgtgaatggacatgagtgagataagcagtggatgtgtgtggcagtttctgaccagggtgtctctgtgtttgcaggtgtccagtgtgaggtgcagctggtggagtccgggggaggcttagttcagcctggggggtccctgagactctcctgtgcagcctctggattcaccttcagtagctactggatgcactgggtccgccaagctccagggaaggggctggtgtgggtctcacgtatt

SEQ ID NO: 13345 - DNA, 2300 bp, Homo sapien
ggtcaccctgacatgcggctgaaccctggggacgcggcccaagcagcctgcacagaacctcccaaggcccaggaaccccgcaccctaggcggggtgggcacagcggctgctccgctgcccgggttttcaaggaggcgccacttccacttccctccctggaaccccgaagtttgacatgggggctcctttctgccttgctccgcagctccccttcccccggagtggagccccctgtttccctggcgttccctcccacagctgcagtgttctccatcggtgtcatcaccttccagctctgctgccctgctctgcagactaaggctctgattccataagagaggggagctgcttcccagtagaaccttgctggggagctctgttcccatctcagttcctgaggggttaaaccagtgcatttaggatactggttttggtggtttgcccctgttgagtaatttcttagttctctagtgggtgtaagagacttggctctggaagcatttcagaagtgtgggctctgatacaccccagacagacactttgggaagggaagatttttgtgactattctcattataagggaaaggcattcaaaagaatagaaaaactctccagtatgtggttcctgagaatttctcactaaaaacatgcttatcacactcgactcaaaacagttcaatgtatattagtgtattttatcttgtactagcctttattgcatttggtgaactctgccccagttcagctcatactctagctttgattctccctacaaaaacttgtctctctctagatttcagatttgttgattgtcttaaaatttcaatgatctgaagtattaaagaaaatttgcaaaagtccattttctctgattaacagttattgttgattttattcttgttgtaaaaaaaagaaattctcatctatgtacatttcaaacctgaataacaaaatttttattaacaccaaaaataataaaagaatccaaatatttatcagctgcctaatagaaaaacaaatcatggtaacattgttcgctggaatattacccatcattcataataagggaatgtctgatacacaaaataagaagataaaattatcaagtatttaaattgagtaaaataagccaaacaaataagagtatgtatgattctatttttaaaaattctggaaaatgaaaactgatctaaagtaatataaagaagattagtagtttcctgggaatatgttggcagaagggaaggagaaaggataaggaaatagaaataggaagtagaaggacagaaaagaagttgagggaatttcacttgtccaccttccttataatggtaatagttatgccatgattatcagttttacactttaaatatgtaaagtttataatctgtcaatcaaatcttataaaatgtattatgaggaaacaagttgaaaattagacaatgtaggagtgacagaaagatagatatgagtatgttgaatgtcagagatacctgaaagtttatctacctgaaccctagttctctccatagtttaaggtaaacaggagagtgcaggaaaatcatccatattctgattaggcagtggcttctgcaaaccacactaggcctggccggctgtgtcctggagttggctaagggaggagtcagggccagtggtgagaagtgcaggcccagataccagaactcactcatcccagacatgagctcttagatacacagagagcccatccatgtgtggatttatcttacatctgtaagtagagaacattgactcttacagaacataatttacacacataggtaaatctgaaataaggtgatcagtgtgaagattttatcacagcacagtttcataataagcacaatttctcaaatcccattgttgtcacccatcttcctcaggacactttcatctgccctgggtcctgctctttcttcaggtgtctcaccccagagcttgatatatagtaggagacatgcaaatagggccctcactctgctgaagaaaaccagccctgcagctctgggagaggagccccagccctgggattcccagctgtttctgcttgctgatcaggactgcacacagagaactcaccatggagtttgggctgagctgggttttccttgttgctattttaaaaggtgattcatggagaactggagatatggagtgtgaatggacatgagtgagataagcagtggatgtgtgtggcagtttctgaccagggtgtctctgtgtttgcaggtgtccagtgtgaggtgcagctggtggagtccgggggaggcttagttcagc

SEQ ID NO: 13346 - DNA, 2300 bp, Homo sapien
gtgctcagggaggcccgggcagagctgatgacgaccccggcccgtagtcgggagtggcggcctccatggtcaccctgacatgcggctgaaccctggggacgcggcccaagcagcctgcacagaacctcccaaggcccaggaaccccgcaccctaggcggggtgggcacagcggctgctccgctgcccgggttttcaaggaggcgccacttccacttccctccctggaaccccgaagtttgacatgggggctcctttctgccttgctccgcagctccccttcccccggagtggagccccctgtttccctggcgttccctcccacagctgcagtgttctccatcggtgtcatcaccttccagctctgctgccctgctctgcagactaaggctctgattccataagagaggggagctgcttcccagtagaaccttgctggggagctctgttcccatctcagttcctgaggggttaaaccagtgcatttaggatactggttttggtggtttgcccctgttgagtaatttcttagttctctagtgggtgtaagagacttggctctggaagcatttcagaagtgtgggctctgatacaccccagacagacactttgggaagggaagatttttgtgactattctcattataagggaaaggcattcaaaagaatagaaaaactctccagtatgtggttcctgagaatttctcactaaaaacatgcttatcacactcgactcaaaacagttcaatgtatattagtgtattttatcttgtactagcctttattgcatttggtgaactctgccccagttcagctcatactctagctttgattctccctacaaaaacttgtctctctctagatttcagatttgttgattgtcttaaaatttcaatgatctgaagtattaaagaaaatttgcaaaagtccattttctctgattaacagttattgttgattttattcttgttgtaaaaaaaagaaattctcatctatgtacatttcaaacctgaataacaaaatttttattaacaccaaaaataataaaagaatccaaatatttatcagctgcctaatagaaaaacaaatcatggtaacattgttcgctggaatattacccatcattcataataagggaatgtctgatacacaaaataagaagataaaattatcaagtatttaaattgagtaaaataagccaaacaaataagagtatgtatgattctatttttaaaaattctggaaaatgaaaactgatctaaagtaatataaagaagattagtagtttcctgggaatatgttggcagaagggaaggagaaaggataaggaaatagaaataggaagtagaaggacagaaaagaagttgagggaatttcacttgtccaccttccttataatggtaatagttatgccatgattatcagttttacactttaaatatgtaaagtttataatctgtcaatcaaatcttataaaatgtattatgaggaaacaagttgaaaattagacaatgtaggagtgacagaaagatagatatgagtatgttgaatgtcagagatacctgaaagtttatctacctgaaccctagttctctccatagtttaaggtaaacaggagagtgcaggaaaatcatccatattctgattaggcagtggcttctgcaaaccacactaggcctggccggctgtgtcctggagttggctaagggaggagtcagggccagtggtgagaagtgcaggcccagataccagaactcactcatcccagacatgagctcttagatacacagagagcccatccatgtgtggatttatcttacatctgtaagtagagaacattgactcttacagaacataatttacacacataggtaaatctgaaataaggtgatcagtgtgaagattttatcacagcacagtttcataataagcacaatttctcaaatcccattgttgtcacccatcttcctcaggacactttcatctgccctgggtcctgctctttcttcaggtgtctcaccccagagcttgatatatagtaggagacatgcaaatagggccctcactctgctgaagaaaaccagccctgcagctctgggagaggagccccagccctgggattcccagctgtttctgcttgctgatcaggactgcacacagagaactcaccatggagtttgggctgagctgggttttccttgttgctattttaaaaggtgattcatggagaactggagatatggagtgtgaatggacatgagtgagataagcagtggatgtgtgtggcagtttctgaccagggt

SEQ ID NO: 13347 - DNA, 2300 bp, Homo sapien
agtctcagagagagctgaatgtgctgaaacaccatactattttatcttctcccattcttttctgattggaatcagacccaaccaggttatcaatgccaatctacctaagctagagccaactgattacggtatcaacagcaacaatagctttttattttctgcttggctttgtattgttaccttgttccatcctctagagtatctatttcagcccttcggataccggtttcagaggctttcccctaaagtgtaatttcttagttttgtagtggtgataagggaggaggtgggtctggatgtgttttagaagttcaggctgtcattctctcccagacagacactttagtacagaacgatttatgtggttgtcccatttctacaggaaagatattcaagagaataagaaagctcttcagtatttggtccctgagaattttacactagagcacattcaccactcttgactttaagcaacctaattaatgtatttgaagccttatcttgaaatagactatatttcatatggcagactctgcctcaggtaatctcataccctgactttgttactctctacaagaacttgtctctccctaaatttcagatttgttgtttgtcttaaaatttcgattatctgaagtatgaaagacaatttgccaagtttcttattttctgttcatctgttattgttgatgttgttgttgtaaaatacaaaaatatatatatttcttatctaagtacttctgcaagctgagtagcagatatttttggtaaaacccagaataacagaagagtccacatattaattagcttcttaataggaaaaatcattatagtaaatttgttcactggactgttacccatcatttataatgtacaaatatctgatacacacaacaaactaaaatatctaggtatttatgctgagtaaaataagccaaaaaaataagtatatatgctatattattccatttctataaattctggaaaatgaaaactaacctacaataatttaatgaagaacagttgttgcctgaggaaatggtagaagaagggaaagggataggaggaaatgtggaacaggagaaaaaattgaggcgaattcacttgtccactttcttgataatggtgatagttatgtcatgtttatcaatgtatactttaagtatatgaagtttattatctctcaattagaccttataaagtttattacaagcaaacaaataaaaaattagacaaaaagaactgatagaaaatgggtaacatatgttaaatgccagttacctgaaaatttatctgcgtgaaccttagttctctccataattttaggtgaacgctggagtgtaacagagtcacaatattttcattaaggcagtaagttctgcaagccacactagacatgtcccgctctgtcctggagttagttcagggaacacagtgatgaggaacacgggctcagataccggaactcactcatctcagacatgagcacttagacacatacataggcactctgtgtgtgggtttactttcacatccgtacatggagaaacattgagtctcacagacataatttacacacatatttaaaatataataaggtgtttgatgctgtttatcacagcacaatttcctcgtaaaagtgcaaatcttctaaataccataagttaccaaactcctgcaggacaccatcatcctctctcggcaatgccttctcctcacgtgtcccaccctagagttttttatgtagttggaaatatgcaaaggaccctccttctttggtgaaaaccagccctgccctcaccctacagttctgggatgggagacccagccctggaatttcaaggtttttccacatggtgattagcactgaacagagaactcaccatggggtttgtgctgacttgggatttacttgttactattttaaaagtagattcagggtgaactagagattttgagtgtgagtggataacagttaaggaaacactgaaaatatgtgccagtttctgaccaggatgcccctgtgtttttgggtgtccagtgtgaggcgcagttgttggagcctgggggagacttggtacagcctggcgcggtgggggtgggggtccctgagactgtcctgtgcagcctctggatttgccttcagtagccactggatgcactgggcctgccaggctccagggaacagactggagtgggtctcatgtattagtactgatgggagtagcatacgctatgcacattctgggaagttctgattccccatctccagaaacaatgccaagaacacactcttatct

SEQ ID NO: 13348 - DNA, 2300 bp, Homo sapien
cagggccttcccactggttcctttgctcattttaattcatattcatttgctataataaagctgcacccacgagaataacagcttgtcttgagtcctttatttgtactgattatggggcctgaggatggtcttgggacactcaacacaattacatcagaggtgtaaattgctagaaagaccctgactactgacacatgtctatagcatttataatatcaaaggatgagaaagtgtaggataaaagacattcagtgcctggatggctatagaatcacatggcatgagatgatgtgtgcactccaataaggagcaggaagtgaaagtaatccatggaatttagaaacgacggacacagctccctaggagttgttccctgaacaagaacaagtaaaaataatgaagaacaacctgagtatgcaactcatatctgtgatagctaaaataatagtaaaaagatgcacatccagccctgcagtgtgccctgtgagccaaggctgctagactcccattcactgccaaagggtacagttgtccagaaacaacacacaacacacaagagctacacagatggtagcccagggtttggactggggaggggaatccacttgacaactagaacagggaggatagtgtggaaagtggcatcattttgtgatatgaatgatatcattaatagatatcatcagatcgtgaacaacattagccaatggactaggagactgactgatgtagcagattctctttggcttcatgtgttgcataagggaggagcatgtttgggaagatgctggacccacagctcacaatagacacatcacagatggctctagctgatcccaacctcaagtaggatgcttctgatgggacagctttcctcaagcactggatcccgatcatgtaaagtttctctaccctgagaatgagactgccctttctctctttaaaatgcaaagtgggctctccagatgaggagcccaatgctgtatatggaagccatagtgctatgtgtttatgttgataccgacggtcattgcttagcatgcatcttatccaggtcctgctgctgtgtgtttctgttgatgctgctggacattgcttcgcatgcaccttacctaggtcatggcctgtgctgtgataaagagaagtccttttgcttctgcaccccaggtacaactcctgtgagcaatctggcaaatattttagaaactgtgtagtttgtattgccttgtcttttcatttgaatcttttagatgataaggaaatgagagtggttcacaagataatggggcagacacaggggatagttaagggcctcctccaagcaatgtggatatcataaaatgaatgttaaaaaatgaaagaactaaacaagaaggtgctggggttgacacaaaggacttaaaacagaactaccaggagttgggtgcagcaatggcaatcccttcagttccatcagcaattcagagacctaaacaaatattccctatttatgttgaattggcagactgtagaaatgtagaagacaaaatgaccagaaaaaatgtgtgatttggcatgggtgaaggtctggcaagttaatcaagttgaggactgttgaagccctagggtggtcctgcctttgctgggtgcccagaccataatggcactcatgggaaattgccagcaagtagaaactaggtgttttttttttttttgtagttcttattatcaggcatatgtgcatttgaattttgtcttcatagcatttcctggttctatttctcattttttaaaacacacgtgatttcatctagatttatcaccttcacagggtcacagagaagggtaggaagaagggaggccctggtttgggtcttgtaggaccatggacaagagtgcggagggacaacagggggttgtaagacattattaagaccttattctgcctctcccaagaggctcagttcagccgtttttctgcagttgcggttctgggttataaaccttgtagactcttcccttcaggccagggcggcaactatgcaaattcaagtgggggcctccccacttaaacccagggctctcctccacagtgagtctccttcaccacccagctgggatctcagtgctttcttttctgtcctcctccaggatggggtcaaccgtcatcctttccctcgtcctggctgttctccaaggtcagtcctgcccagggtttgaggtcacagagaagaatgggcagaagggagcccctgatgcaaattttgtgtctcccacacaggtgtctttgccgaggtgcagctgttgcagtctgcagcaga

SEQ ID NO: 13349 - DNA, 2300 bp, Homo sapien
gcgtcatttcctacagacctagttgaccatgtggagaagaggcttgaacaaatggggacgttctccaaccttccaaatcagccttcttcttaggcttgagtagtaatcatggttctgagggtgaccttccaaattttcctgtctgtacctcttccaccaggggtagagtgtcttcccaaccataatggtttctctccagtgtcctcagcttctcctcctttgtacttaccctgcagattaaggatttcttctagatggagtttcctgggaatcctctgttttcttttgtttctgttgactccaccacaccccataggtcacaggtttgattggatttcccctggagacagtggaggtggatccaggcgttcaacagtcctcgctgttcttcccttcctgtcagcaccacaggacagcagataagggagttgactgtggatttttcaaattcctgggaaaagcctgcaaggactagtagattcacactctaataccattagcacatgcatccaaaaaaaatcctcactaaatatttccaggttagcctgttcctctctcaatgccatccagtggcacctgccctgggttcactaacatgtgggccccagtcctctctgcaggcctctctctcctcacatttcagtcttcttgctttctctgtgaaactaactcacaaatgttacaggtttttcttcttcctttattcacagtttttcaggtttgttgttaatgaggacagaataagatcatagtttcctcatttttcacattcccacactgagtagatttctatataaaagccagaaactaagagaacaaatcaaatatccatatccattacaggtgaatgttaaacaatttgacataagattatgaagtaaagtacaatgcagcattagaatcaaggcatcctcattcacataaagtcatggctacattcacaaataactgcgctgagtggaagtagctaaagtattaacagtgcacttcataaacttctatttgtataaactgtagaaggtaaaactattctaaagtaacagagaagagaatttggtgagaattgggtgttgaaagtaatggggtgttgagatgaaattacagagaagtgacagaaagatttagaggttaacttaattgcacacgacttaattgaaaccctgattaaagggttgcacacatacattaacatattccaaattgtgcagtatatatttgaattaattatttgttaattttgtacttaaaaaagcagtaacaaagaaacaaatgaatgtgttggttgaggaggagcaaaaaatagatggctattaacacttgaaacatcgctgacttttgaaagtacacatgtatgaacactggttctctctatatatatttcagataaacaacagaatacactaaaagaaaacagagatatcctggcaggggtggaatcctgcaaacctcactaggcatgtcccacactgccctggagttgtctcaggggagcagtcttctctagtggtcagaggcacaggcatggataatgggactaattctgtccagctgtgtgatcttgaccatattgtacagccactctgttctgtgtgtaatgtaaattccttaaaatgtaacattgacacttgcattaaatgtattctgcaaatatgtagaaatgaaataagatgatgactgctaaatagttatcaaggcatgatcacataatataaaatgatattttcctgagtgataagatgactaccaatctcccccaaggcactttgtctgctctgacccctgcccctcctcaggattcccatcccagagcttgctatacagtaggagacatgcaaacaggtttctccctttgttgatgaaaaccagcccagtcctgaccccgtaggtttgggagagaagccccagccctgggattcccaggggtttccgttttgtgatcaggactaaagacagaggacccatcatggagtctgggctgagctgggtttcacagttgttattttaaaaggtaaaccagagaaatagagtgtgagtgaatatatttgagagaaacagtggatatgtcaggcagtttctcaccaggatctctacgagtttacgggtgtccagtgtgaggtacagctggtggagtctggagaggacccaagacaacctgggttccctgagactctcctgtgcagcctctggattaaccttcagtagctactgaatgagctcggtttcccaggctccagggaaggggctggagtgagtagtagatatacagtgtgatggaagtcagatatgttatgcacaatctg

SEQ ID NO: 13350 - DNA, 2300 bp, Homo sapien
cctagagcacagctcctcaccatggactggacctggagcatcctcttcttggtggcagcagcaacaggtaaggggctccccagtctcggggttgaggcagaaaccaggccactcaagtgaggctttacccacccctgtgtcctctccacaggtacctactcccaggtgcagctggtgcagtctggccatgaggtgaagcagcctggggcctcagtgaaggtctcctgcaaggcttctggttacagtttcaccacctatggtatgaattgggtgccacaggcccctggacaagggcttgagtggatgggatggttcaacacctacactgggaacccaacatatgcccagggcttcacaggacggtttgtcttctccatggacacctctgccagcacagcatacctgcagatcagcagcctaaaggctgaggacatggccatgtattactgtgcgagatacaccatgtggaaacccacatcctgagagtgtcagaaatcctgatgtgggaggcagctgtgctgagctgaggcagtgatgcagcagtttccttaacttccatcttatctcattttgcatcgacatccacctttatattagccaagaatgtggaatagacgggtgctcataagagatccttaacttgcccattttaatgggttttccagaagatgtgagaagccactttgttagcaaagcatgccaaagccatgccctgctccagacacatgtgagcccatttcctgctctttgcttaactgacaagctctcatcagtgcacctgggctaatttcacatcaggtacaggaatatgttctaaaggaaagctaattttataatagcaattcctgcttaataaccttcagcttcattgtttttgtgtaatctatcaacaaattatgttagttcaaggttctcaatgggagtttctaataaatagaagggatgtatagaagttcccctaattaaaacaattgtgaacacaatcttggtattcagctgtgtctccacccttcttaccattcaccacaaagtaattctcacttctggaagctgggttcattttcaaattagttttttttttcattttaatatctcaaggttattgtatgtgactattttagcagaaattgaattttgggaaattgaactaaccaactgaaaataaattcacaactaaataacaagatgccagaatataattggctccaggctttgttaattcagcagtttatctacctaggcattatatttacacatcttcatgctatttttacagtcaactcccattatgtaagaaatggtcatacaccatttcttacatatggtaagatatctacgatggatattcagaactacgataaacattggatgcatccaggtttgtctgaactcactgagattattacactcagctgctgtttcaatgtgtctgaaggtataaatgacaattcgaatgacttgggtgtgtggatggttttacatgagtctttaagtgtagaacaatattgaccctgttccaaaatctgtccttgatccatgatcacactcatctcccagaacagctccttcaacacatttcctatctggatgaagaggactctgtgcttggtgaggggaggccacaggtagagaactgagttctcagagggcacagccagcatcctcctcccagggtgaacccgaaagactgcggcctccctcatcccttttcatctctccatacaaaggcaccacccacatgcaaatcctcacttaagcgcccacagggaaaccaccacacatttccttaaattcggcgttctgcttacacgggaaatgctttctgagagtcatggacctcgtgtgaaaagaacatgaaaaacctgtggttcttcctccccctggtggcagctcccagaagtgagtgtctccaggatgcagatatgaagatatgggaggctgcatctgagcccagggctcacagtgggtctctgtgttcacaggggtcctgtcccagtgcagctgcaggagtggggcccaggactggtgaagcttcggagaccctgtccctcacatgcgctgtctctggtgactccatcagcagtggtaactggtggagctggtccgccagtccccagggaaggggctggaatggattggatacatctattatagtgggaggagctactacaccccgtccctcaggagttgagtcaccatgtcaatagaaacgtccaagaaccagttttccctgaagctgagctctgtgaccgcagggaggcggagggggcgggcgcaggtgccgctcaggaccagcaggg

SEQ ID NO: 13351 - DNA, 2300 bp, Homo sapien
tccttcatgaatatgcaaataactgaggggaatatagtatctctgtaccctgaaagcatcacccaacaacaacatccctccttgggagaatcccctagagcacagctcctcaccatggactggacctggagcatcctcttcttggtggcagcagcaacaggtaaggggctccccagtctcggggttgaggcagaaaccaggccactcaagtgaggctttacccacccctgtgtcctctccacaggtacctactcccaggtgcagctggtgcagtctggccatgaggtgaagcagcctggggcctcagtgaaggtctcctgcaaggcttctggttacagtttcaccacctatggtatgaattgggtgccacaggcccctggacaagggcttgagtggatgggatggttcaacacctacactgggaacccaacatatgcccagggcttcacaggacggtttgtcttctccatggacacctctgccagcacagcatacctgcagatcagcagcctaaaggctgaggacatggccatgtattactgtgcgagatacaccatgtggaaacccacatcctgagagtgtcagaaatcctgatgtgggaggcagctgtgctgagctgaggcagtgatgcagcagtttccttaacttccatcttatctcattttgcatcgacatccacctttatattagccaagaatgtggaatagacgggtgctcataagagatccttaacttgcccattttaatgggttttccagaagatgtgagaagccactttgttagcaaagcatgccaaagccatgccctgctccagacacatgtgagcccatttcctgctctttgcttaactgacaagctctcatcagtgcacctgggctaatttcacatcaggtacaggaatatgttctaaaggaaagctaattttataatagcaattcctgcttaataaccttcagcttcattgtttttgtgtaatctatcaacaaattatgttagttcaaggttctcaatgggagtttctaataaatagaagggatgtatagaagttcccctaattaaaacaattgtgaacacaatcttggtattcagctgtgtctccacccttcttaccattcaccacaaagtaattctcacttctggaagctgggttcattttcaaattagttttttttttcattttaatatctcaaggttattgtatgtgactattttagcagaaattgaattttgggaaattgaactaaccaactgaaaataaattcacaactaaataacaagatgccagaatataattggctccaggctttgttaattcagcagtttatctacctaggcattatatttacacatcttcatgctatttttacagtcaactcccattatgtaagaaatggtcatacaccatttcttacatatggtaagatatctacgatggatattcagaactacgataaacattggatgcatccaggtttgtctgaactcactgagattattacactcagctgctgtttcaatgtgtctgaaggtataaatgacaattcgaatgacttgggtgtgtggatggttttacatgagtctttaagtgtagaacaatattgaccctgttccaaaatctgtccttgatccatgatcacactcatctcccagaacagctccttcaacacatttcctatctggatgaagaggactctgtgcttggtgaggggaggccacaggtagagaactgagttctcagagggcacagccagcatcctcctcccagggtgaacccgaaagactgcggcctccctcatcccttttcatctctccatacaaaggcaccacccacatgcaaatcctcacttaagcgcccacagggaaaccaccacacatttccttaaattcggcgttctgcttacacgggaaatgctttctgagagtcatggacctcgtgtgaaaagaacatgaaaaacctgtggttcttcctccccctggtggcagctcccagaagtgagtgtctccaggatgcagatatgaagatatgggaggctgcatctgagcccagggctcacagtgggtctctgtgttcacaggggtcctgtcccagtgcagctgcaggagtggggcccaggactggtgaagcttcggagaccctgtccctcacatgcgctgtctctggtgactccatcagcagtggtaactggtggagctggtccgccagtccccagggaaggggctggaatggattggatacatctattatagtgggaggagctactacaccccgtccctcaggagttgagtcaccatgtcaatag

SEQ ID NO: 13352 - DNA, 2300 bp, Homo sapien
tattaaatagcatccttcatgaatatgcaaataactgaggggaatatagtatctctgtaccctgaaagcatcacccaacaacaacatccctccttgggagaatcccctagagcacagctcctcaccatggactggacctggagcatcctcttcttggtggcagcagcaacaggtaaggggctccccagtctcggggttgaggcagaaaccaggccactcaagtgaggctttacccacccctgtgtcctctccacaggtacctactcccaggtgcagctggtgcagtctggccatgaggtgaagcagcctggggcctcagtgaaggtctcctgcaaggcttctggttacagtttcaccacctatggtatgaattgggtgccacaggcccctggacaagggcttgagtggatgggatggttcaacacctacactgggaacccaacatatgcccagggcttcacaggacggtttgtcttctccatggacacctctgccagcacagcatacctgcagatcagcagcctaaaggctgaggacatggccatgtattactgtgcgagatacaccatgtggaaacccacatcctgagagtgtcagaaatcctgatgtgggaggcagctgtgctgagctgaggcagtgatgcagcagtttccttaacttccatcttatctcattttgcatcgacatccacctttatattagccaagaatgtggaatagacgggtgctcataagagatccttaacttgcccattttaatgggttttccagaagatgtgagaagccactttgttagcaaagcatgccaaagccatgccctgctccagacacatgtgagcccatttcctgctctttgcttaactgacaagctctcatcagtgcacctgggctaatttcacatcaggtacaggaatatgttctaaaggaaagctaattttataatagcaattcctgcttaataaccttcagcttcattgtttttgtgtaatctatcaacaaattatgttagttcaaggttctcaatgggagtttctaataaatagaagggatgtatagaagttcccctaattaaaacaattgtgaacacaatcttggtattcagctgtgtctccacccttcttaccattcaccacaaagtaattctcacttctggaagctgggttcattttcaaattagttttttttttcattttaatatctcaaggttattgtatgtgactattttagcagaaattgaattttgggaaattgaactaaccaactgaaaataaattcacaactaaataacaagatgccagaatataattggctccaggctttgttaattcagcagtttatctacctaggcattatatttacacatcttcatgctatttttacagtcaactcccattatgtaagaaatggtcatacaccatttcttacatatggtaagatatctacgatggatattcagaactacgataaacattggatgcatccaggtttgtctgaactcactgagattattacactcagctgctgtttcaatgtgtctgaaggtataaatgacaattcgaatgacttgggtgtgtggatggttttacatgagtctttaagtgtagaacaatattgaccctgttccaaaatctgtccttgatccatgatcacactcatctcccagaacagctccttcaacacatttcctatctggatgaagaggactctgtgcttggtgaggggaggccacaggtagagaactgagttctcagagggcacagccagcatcctcctcccagggtgaacccgaaagactgcggcctccctcatcccttttcatctctccatacaaaggcaccacccacatgcaaatcctcacttaagcgcccacagggaaaccaccacacatttccttaaattcggcgttctgcttacacgggaaatgctttctgagagtcatggacctcgtgtgaaaagaacatgaaaaacctgtggttcttcctccccctggtggcagctcccagaagtgagtgtctccaggatgcagatatgaagatatgggaggctgcatctgagcccagggctcacagtgggtctctgtgttcacaggggtcctgtcccagtgcagctgcaggagtggggcccaggactggtgaagcttcggagaccctgtccctcacatgcgctgtctctggtgactccatcagcagtggtaactggtggagctggtccgccagtccccagggaaggggctggaatggattggatacatctattatagtgggaggagctactacaccccgtccctcaggagttgagtca

SEQ ID NO: 13353 - DNA, 2300 bp, Homo sapien
catgttttgcgacttgagtttatctttctagtgaccttgcagctacactgctagggaatcagggtcttcaaaatgcctgagaagggaggagaggtaaggctcattagccacagaaaaacaggcagttagtattttaaaggactccagctctttctctttttcagggagaattgggttttcttacatacaactgagtttctgcttacacattctttaatttcttttaattcctgtttcaatacttgacaagaatggcatttacatacagttttaccaaaacatgtatttaaatatatttgtctttttaatattggaataggcagacatacacgtagatcagcattattttgtactaaaatctcaaactgcaaacacaatttaaattcaattaaataattagaataatatgaaacaaatgggtgtgttgttttggtgtttacgtatgcattcacttttgcatgggcacatgtatgagtctttgctgggctgttgtgcacgtatgtgtgtttgtatgaccaggaggttttcaaatacatcattaaattacatagttatattaatcttggcaaggcacttgtattctgttttctttaattctgtttgcagaaagtagacacatattcagtcttagttccagtgtagggagtgcttttcatgagaaaaataccagaaaaaagggcaaacatggggcccactaatgtaaaaattagccacaatgtgtatgtgtgtgtgtgtgtgtgtgtgtgtgtgtctgagttgaatagtagagttggagtgggcttctatccacatgcacctgcgcctacaggtattatcaggtacaataatcaactgcagaaccctaaaggaaataagagtccccccaaacccctgaagagtgtttgggttcaccatgtgtccaatgattcagtgcctctcgagctccaggaaacggctccctggtgatgcgtgagatcttttcttggggtgtccctgcagagttcgctgggtttcctaaggctgattcactatttcaaaagatggtgtgagaagcatatggtgtaaataaagcagaattctgagccagggcacagccactttatactgggctagagacactggtaggaatatactctgtcagctcagatagaaacctccctgcagggtgggggcagggctgcagggggcgctcaggacacatcgagcacagtcttctgccccagagcaggtgcacatgaggctggggagaggttcctctcagggcctgggacttcctttaaaaatatctaaaataagtatttcacaaggactgctgatgtttgtataaatatcctattcaattgtgagcatttatcaaactggatgttgtaatgagaaccacttttataatggcgatttcaaactctgctagttatcttaataatagcagctggaggtcaggaagagattattacttataaataagtgcaatttttggagagacacactcattcccaaaataacacattcacatattaaggtctagaaatggttcacgttgcccctgagacattcaaatgtgggttcaaagtgaggtgctgtcctcggggagttgttccccagtggaggaagcgctatcaacacagagttcagggatgggtaggggatgcgtggcctctaacaggattacgactcgaaccctcagctcctataattgtgtcgtccgtgtgtcatggatttctctttctcatactgggtcaggaattggtctattaaatagcatccttcatgaatatgcaaataactgaggggaatatagtatctctgtaccctgaaagcatcacccaacaacaacatccctccttgggagaatcccctagagcacagctcctcaccatggactggacctggagcatcctcttcttggtggcagcagcaacaggtaaggggctccccagtctcggggttgaggcagaaaccaggccactcaagtgaggctttacccacccctgtgtcctctccacaggtacctactcccaggtgcagctggtgcagtctggccatgaggtgaagcagcctggggcctcagtgaaggtctcctgcaaggcttctggttacagtttcaccacctatggtatgaattgggtgccacaggcccctggacaagggcttgagtggatgggatggttcaacacctacactgggaacccaacatatgcccagggcttcacaggacggtttgtcttctccatggacacctctgccagcacagcatacctgcagatcagcagcctaaaggctgaggacatggccatgtattactgtgcgagatacaccatgtg

SEQ ID NO: 13354 - DNA, 2300 bp, Homo sapien
ccatactgttctgggattttttaaggaatcagagagaccgactctgttcaggaggatatttattatttaggttcaggaggatatttattatttaggtgcaccggccaagtcgaattaacatccaaaggactgagcccagaacagagttcagttaccttttaagcattttgtggggtgggagaggggacatctgtgcagggtgaagcatactacagaagtgagaaacaaagacagttattcaattgaaacatgtattacatcatttcttccttttcaaggaaaaacatgttttgcgacttgagtttatctttctagtgaccttgcagctacactgctagggaatcagggtcttcaaaatgcctgagaagggaggagaggtaaggctcattagccacagaaaaacaggcagttagtattttaaaggactccagctctttctctttttcagggagaattgggttttcttacatacaactgagtttctgcttacacattctttaatttcttttaattcctgtttcaatacttgacaagaatggcatttacatacagttttaccaaaacatgtatttaaatatatttgtctttttaatattggaataggcagacatacacgtagatcagcattattttgtactaaaatctcaaactgcaaacacaatttaaattcaattaaataattagaataatatgaaacaaatgggtgtgttgttttggtgtttacgtatgcattcacttttgcatgggcacatgtatgagtctttgctgggctgttgtgcacgtatgtgtgtttgtatgaccaggaggttttcaaatacatcattaaattacatagttatattaatcttggcaaggcacttgtattctgttttctttaattctgtttgcagaaagtagacacatattcagtcttagttccagtgtagggagtgcttttcatgagaaaaataccagaaaaaagggcaaacatggggcccactaatgtaaaaattagccacaatgtgtatgtgtgtgtgtgtgtgtgtgtgtgtgtgtctgagttgaatagtagagttggagtgggcttctatccacatgcacctgcgcctacaggtattatcaggtacaataatcaactgcagaaccctaaaggaaataagagtccccccaaacccctgaagagtgtttgggttcaccatgtgtccaatgattcagtgcctctcgagctccaggaaacggctccctggtgatgcgtgagatcttttcttggggtgtccctgcagagttcgctgggtttcctaaggctgattcactatttcaaaagatggtgtgagaagcatatggtgtaaataaagcagaattctgagccagggcacagccactttatactgggctagagacactggtaggaatatactctgtcagctcagatagaaacctccctgcagggtgggggcagggctgcagggggcgctcaggacacatcgagcacagtcttctgccccagagcaggtgcacatgaggctggggagaggttcctctcagggcctgggacttcctttaaaaatatctaaaataagtatttcacaaggactgctgatgtttgtataaatatcctattcaattgtgagcatttatcaaactggatgttgtaatgagaaccacttttataatggcgatttcaaactctgctagttatcttaataatagcagctggaggtcaggaagagattattacttataaataagtgcaatttttggagagacacactcattcccaaaataacacattcacatattaaggtctagaaatggttcacgttgcccctgagacattcaaatgtgggttcaaagtgaggtgctgtcctcggggagttgttccccagtggaggaagcgctatcaacacagagttcagggatgggtaggggatgcgtggcctctaacaggattacgactcgaaccctcagctcctataattgtgtcgtccgtgtgtcatggatttctctttctcatactgggtcaggaattggtctattaaatagcatccttcatgaatatgcaaataactgaggggaatatagtatctctgtaccctgaaagcatcacccaacaacaacatccctccttgggagaatcccctagagcacagctcctcaccatggactggacctggagcatcctcttcttggtggcagcagcaacaggtaaggggctccccagtctcggggttgaggcagaaaccaggccactcaagtgaggctttacccacccctgtgtcctctccacaggtacctactcccaggtgcagctggtgcagtct

SEQ ID NO: 13355 - DNA, 2300 bp, Homo sapien
agggtgagagatcttgggaaccccacccccatactcttatcgccctttcctccaggaacctccaagttctcagggtgagaatccacatagatcccttcatggctctatttccaggaaaccaaatctctaataaatacacccagactttcttcagacccacaaaccatgggaaaggcatttttagatcctcatctatgtggggaaaggtaatccatccccattacaagcccatactagcagccttcctttatcatgaaaatgggtaaaattagccaatagatgtaaatttaaggaaaatttcctgtgatgttccagccagaaaagagcaaaaatcagcttcacctctggagacttcctgtatagggcacagcccagaggaagaagaccaccacagcattaagattcaactgtaagaacatgtaatgcttccgtgttccacacattacgtctcaccagtttagtcaacatggattaaatacgagagtgtggcaatgcacaaactctgaggaggaaataggagaaatatgttaaggaaaatagaagaattcgaagcctctgataccaggaacttcagcacaaaggaaatgatttcaccctcattggcctcaaatttacttttcctgtggcatctgcatggttccaaagtgaaaaaaattaattcaatgcgcatgtacttccgaagtgtccacttgcattctgatatctttacttctatttgcagaaagtagacacatatgcagccttagtgccagtgtagggagtgctttccttaacacggataccagaaaaatagggtaaacatagggcccattaatgtgaaaattagccattgtgtgtgtgtgtgtgtgtgtgcgcgcgtgtgagttgaatagtagagttggagtgggcttctatcaacctgcacctgccagtgttctcaggtgcaataatcaacttcaggaccctaaaggaaataagagcccccccaaacccctgaagactttttggattcaccgtgtgtccaatgattcagtgcctcttgagctccaggaaaggtctccctggtgatgcatgagatcttacttggggtctctctgcaaagttctctgggtttcctaaggccaattcactatttcaaaaaatggtgtgagaagcacaggctgtcactaaaggagaattctgagccagggcacagccactttatacttggctggagacactggtaggaatatactctgtgagctcagacaggaacctccctgcaggggcggggcggggctgcagggggcgctcaggacacaccgagcacaggcttccgccccagagcaggagcgcaggaggctggggagaggttcctcttagggcctgggacttcctttaaaaaatctaaaataagtatttcagaaagactgctgatgttcacataaataccctatttaattgtcagcatttatgaaactcgatgttgtaatgagaaccacttttacaatgaggatttcaaactcccctagacatcttaatagtaagcagctggaggtctggaggagatcctttcttataaataagtgcaatttttggagaaacacactcattcccaaaatagcacattcacatattaaggtctagaaatgattcaagttgcccatgagacagtcaaatgtgggttcaaagtgaggtgcgtgtcctgggggagcttgttctccagtgggggaatctctgtcaacacagagttcagggatgtgtaggggtcgcatcgcctctaacaggattacggcttgaaccctcagcttctacaattgtgtcgtccatgtgtcatgtatttgctctttctcatcctggggcaggaattgggctattaaatagcatccttcatgaatatgcaaataactgaggtgaatatagatatctctgtgccctgagagcatcacacaacaaccacacccctccttgggagaatcccctagatcacagctcctcaccatggactggacctggagcatccttttcttggtggcagcagcaacaggtaagggactccccagtcccagggctgagggagaaaccaggccagtcatgtgagacttcacccactcctgtgtcttctccacaggtgcccactcccaggtgcagctggtgcagtctggagctgaggtgaagaagcctagagcctcagtgaaggtctcctgcaaggcttctggttacacctttaccagctactatatgcactgggtgtgacaggcccctgaacaagggcttgagtggatgggatggatcaacacttacaatggtaacacaaactacccacagaagctccagggcag

SEQ ID NO: 13356 - DNA, 2300 bp, Homo sapien
ctcccgggttcacgccattctcctgcctcagcctcccgagtacctggggactacaggcacctgccaccacacccggctaattttttgtatttttagtagagctggtgtttcaccgtgttagccaggatggtctcgatctcctgacctcctgatccgcccgccttggcctcccaaagtgctgggattacagacgtgagccaccgcacatgtatttttaagcaaaaaacagtgaggggacatcagtgtgagcccacacacaaacctccctgtgggggttcacaggacagctgagggtgctgaggacagaagcaagtactcaggaaccagcagggagaaccagggggcacttggcgccgcatgggggctcaggagcattgtggggctcagtggtcaggcaggctcaaggctcagcatcagggcaggtacagcaggtggggaaaggccctggagatggggttttgtgccacattctcattgcaccactagacaccctccactatatctagtctcatgtgtatgagtgtttatatgtttagagaataatatttatattataaatatatagccatatgttagactcttcagcttcaacttatgtggaccccattcattaggaataagtccttgtatttgaagacttcataaattaaaatttttgtggaatcactttctttttcagtctcctttcctccctttttctttctttctctcacatacactgacaaacacacggggtgctataactttaattacctgatacattaaagcaaattgattcatttgcaacttgaccagtttagcagttgttcatgttgttgtaagattaagaacatgtttctcagctgtgtacttctctgagctgagcagcagctttatttgaaatacacagaaactgaaaattcaaatattaatcagcagctttatcaataaacaaattgtggaaaagtcatttattggaatagtacccattactacaatcaattaatgttggatatgatcaacagtgtggttcaattcacaagtacacatgataagtataatgagtcaaagcacatacatatgactccagtttataaaatgtacaaagcgaatactcattgcaagttacataatgaagatacctaactgacttctacatggtaagaggaggaaaggtgtagaaagggaaatttcaggagaaaaagagaaaattgtgaggctaattgatttgttttatctgtgagtggtgatgattatgtcaatatttgtcaaactgagaagatattaggtgaagactacaatttttcagtattatctcataaaaaataaaagtgtataatttggtagaaaaagataaagagagagataaaaatagtacaagaaaagccttagacttctgaatacacatgcgaatgaatcctcagtttttctatattatttagaaaaacactaagatacagccaaataatatgatatcattatattaagaggattttgtaaacctcactcagaatttcttgctctgtcctagagttaatttaggaagcagttggatccagtcctgagaaacacaggccagacagtgagactggctcttaccagatgtgagctcgtagacacgtcacatggcccctccatgcttgggagtttatgttcacatttgtaaatgaaggaaaacttgactctcacggagcataattcatgtgcatctaaaagtagacatgctaatgataattaattatttatgacatataatcgctcatatccactctgggacacagcccactctgaggcatcccttccagaactcgctatatagtaggagacatgcaaatgggccccttccattgctgatgaaaaccagcccagccctgaccctgcagctctgggagaggagccccagccatgagattcccaggtgtttccattcagagatcagcactgaacacagagggctcaccatggagtttgggctgagctgggttttccttgttgctattttaaaaggtgattcatggagaaatagagagattgagtgtgaggggacatgagtgagagaaacagtggatttgtgtggcagtttctgaccagggtgtctctgtgtttgcaggtgtccagtgtgaggtgcagctggtggagtctgggggaggcttggtccagcctgggggttctctgagactctcatgtgcagcctctggattcaccttcagtgaccactacatgagctgggtccgccaggctcaagggaaagggctagagttggtaggtttaataagaaacaaagctaacagttacacgacagaatatgctgcgtctgtgaa

SEQ ID NO: 13357 - DNA, 2300 bp, Homo sapien
catggccacaggctttctgaggctggcccccagggagagttcaatcccactatcccaattcctgccctggccttacctctcagtctcaccgagccgcttcatggtcccaaaccaggacccaaagtgctgcttgggctcaaggttgtaattatatgcagccaactggagcagcggacctccttgcttactttgaattcctgggtccagagggaaaaactgggtggtgacagggactggacagggatgccacaggggccctgtgggggtgttagattgggtggtggccagtctttgctcataggggacacccttctcctctccagtcctgtccccacctgttctcagagctggctcaaacagcagctcctccaggaaggtgtccttggtttcaacctggtactcccacctgcaggtcttcctggagtgtctcctctttctctctgtctccccataaatctaagatgagggggatggatttgcccaccgctactcaccgtatgactcttgtgaggttgatcagtctcccctggaaggccaacagctgaagtccatcagaaagggtcctctggcccagagccagaccctgcccacccctgtcatgctgcacccagggtgcaagccccagatcaggtctgggtgacaggaggggtatagaggggctgaggctcaggggccttctagcctaacttgtctggagacagttggggaaactgagaccccaagcagggaggtatggctccgagagattattctcgttaacctggaacatttttgcaagctgttaggtataggaagtctgtcacaggtaagagaaatgctttttgagagcatgagagacagcagggctgtgacaatattgaaacactgccgtgcagattcaccaattgccaccaccgggagccccctgagagtcattgcagatgcacagccctcccctgcaacccctggacctccccatggtctggcatctaaagggttatgcctcatggcaggaatcagggccctcaggatgccctgcccactccaaggtctgcctctgctctgattggtcactgacattcagattgtcacccaaatataaggacgttagcagaaagactcattcaatacaagtggactcagacatagataggaattgagttgcaaaaagccccttttgtttcttttattttggaaaaaacttttattgtgaaattcacatatatatatatggaaaaaaaactgaatcaatgcaaaaggatagacaatgaacaaatgaattccccttccactccagatccccaactcagatccagacctcctgagcccacttcccccatctcatcacagattcagacctcctgagcccactttccccatctcatcacagatccagacctcctgagcccactttccccatctcatcacagatccagacctcccccactttccccatctcatcacagatccagacctcctgagcccacttccccatctcatcaccagtgatttcttgggctctgcattagttttctattgctgctgcagcaaacagctacagactcagtggcttccatttccgtcttatagttctggttgccaaaagtcctaagaggatctcactgggctaaagtcaaggtgctggtggggctatgtcccttctggaggctcaagggatgaatcaggtccctgcgttttctagcttctaggggctccagcttctgggtttgtggcctccttcctccatcctcaaagccagcaacagcaggtgaagtcctcgcccatcgtgcatcactctcccttctgcctccttcaacttttttttttatatttagggggaacgagtataggattcttacatagtcaaaaagctccttatagagaagctcagaactttcaatacagctttgccttttttgccatttaaattttccatttaatttaaatgtattctctcatttgaccttcatactctgtggagaaatattcctgttttggcttgtattgacaagttgttttcacacagcccccacatcacccaaccaaccagcagagatcctccttcccaagaaacagataaagaaactgaggcccaggaaggctaagagtcctgccaggattattcacctttcaaggtaaggagccagttccagaccggggtttgtgcagctccaagctcccccgtctttctacaatgctagatttagactaaagcaatctagcaagtgtggccacacaatggtcaagttggatttagatgatgttctttataaatccattctcctctcccgtgtaagcaaggcaaagtactccaggccatg

SEQ ID NO: 13358 - DNA, 2300 bp, Homo sapien
ggaggggacatggaatggtctgtcagctatgagtttgtggaaggcagagtcagtgactttcagctgacctgcctcggtctggaagattccagtagagaaagggagggccaggggcctggaggctggttccaggtctgggtgctgggcctgagagcatttccaaagcactgagcctgggactgaaggtaattcaccatgagggttcagctggggaggactgtctgtgtgcttcccccacctcccagtccctcaactcacccccagtccccctacctgccttaactcaggaaaaaggcctccctcgtgagcactggcagctgcctttggaggcatgtcacggtcacaccccaggacacaacgcagaatctcaggctggcaggggacatttgagatcagccagcccagcctctcattttacagctgggaatgggtgcacaacggccatggctgcccaaggtcacagagcccgggagggagcagcaggcacagtggaaaaagtaaggtcacgtgagccaggtctgggcaccgggtccaggcctgccactcccccgcatgtggctcaggtcgatggctcagactctcagcctcaggtccacagctgaagcagtagaggaacagctgttcgaggggctgcctggggaggagcggggctgggtgccctgtgcgcacagcagacacttcatcagccactcaagtaggcagccgagccaggagggccctctgggcacctgggcctctccgtaggaaaaggagcagggacccactatcctttgggtcaacaacggccttaagcaatgggctcgaaaatccctggttagtgaccaccttctgttgctaggcaagatggggacaaagatggggtccagttctccagttgttaaacatctgtctcatcaagaagatgggacagcacatggaaaataaatttctatggttataataactgtcccagattctctgtgcagtaatggcagacccgctttccctctgaaaacaagcaagaattttggataagacaataacaaaattacgttaaaagcatcaaagggctgctaagctagtgggaaacctccaggccaagtttcaggggaaaaccaagaacctagagaggagcgctggggccactgttgcttgtgagcatttgccaacctgacaagttgggcttcgaccttggagggagtaggggggtagacagaggtcaaggtatgaggaggctgataggggattcacccccatatcaagctgggagcctgaaaggcctcacctgggtgaagacagaagcagagataaccctggtccctgccccaaaacaaggaattcattagcattaaaaggagtgggaggaaaaaaggaaaggaaactcacagattcaaccacaaagagccttggatctccggcggacttggacccctcacccatcacacctgggaggcccagggatggtggggcttctgtgcacttggttccaggtggtctgggctgtccatgtgaaagcaaacaccatccttgtgagaaggaacctctgtctttggcctcacggaaaccccacagacacccttccaagggccccaagaagcacacaaagatatccaagtctgaaagggaagaaggcaccatgagtaagaaccagcagacaagctagcagacacccgcacagtctccccatatttttatacaattaccaaacaagacactatggtacatttcaaaccataataggagagatggcccatgttcggtggccaagcatagcacagagctcctcactcctccaggaattccactgaagggtggcaagttctggagttcaagccactggggaggcaacaggagtgcaagtggccacggttcaggcgctgatgggcagaggtggggagggggcgctcccaaggagtccactgggagatgcaggcagggggcttcccaggcagcctcaccagcttcccttcacactgatcccctgtaaacgtgtgtccggcctcgacgtaggaggaacagggagaaactgattttctattcataaaatgtgcgcctctctgcgcctgcgctggcgctgtgcgcctttgcgagggcggagctgcgttctcctcaacacagacccggattgcatcgtgagggcgagctgagttctcctctgcacagacttcagagatacagcgaaggcggagcagtgttctcctcagcacagacccgggcggacgggtgggccgggggcaccgcaagggcggagctgcgttctgctcagcacagacccgggggacacagcgaaggcagagcagcgttctcctcagcacagacct

SEQ ID NO: 13359 - DNA, 2300 bp, Homo sapien
catggccacaggctttctgaggctggcccccagggagagttcaatcccactatcccaattcctgtcctggccttacctctcagtctcaccaagctgcttcatggtcccaaaccatgacccaaagtgctgcttgggctcaaggttgtaattatttgcagccaactggagcagcagacctccttgcttactttgaattcctgggtccagaggggaaaactgggtggtgacagggactggacagggatgccacaggggccctgtgggggtgttagatcgggtggtggccagtctttgctcataggggacccccttctcctctccagtcctgtccccacctgttctcagagctggctcaaacagcagctcctccaggaaggtgtccttggtttcaacctggtactcccacctgcaggtcttcctggagtgtctcctctttctctctgtctccccataaatctaagacgagggggatggatttgcccaccgctactcaccgtatgactcttgtgaggttgatcagtctcccctggaaggccaacagctgaagtccatcagaaagggtcctctggcccagagccagcccctgcccacccctgtcatgctgcacccagggtgcaagccccagatcaggtctgggtgacaggaggggtatagaggggctgaggctcaggggccttctagcctaacttgtctggagacagttggggaaactgagaccccaagtagggaggtatggctccgagagattattctcattaacctggaacatttttgcaagctgttaggtataggaagtctgtcacaggtaagagaaatgctttttgagagcatgagagacagcagggttgtgacaatattgaaacactgccgtgcagattcaccaattgccaccaccgggagccccctgagagtcattgcagatgcacagccctcccctgcaacccctggacctccccatggtctggcatctaaagggttatgcctcatggcaggaatcagggccctcaggatgccctgcccactccaaggtctgcctctgctctgattggtcactgacattcagattgtcacccaaatataaggatgttagcagaaagactcattcaatacaagtggactcagacatagataggaattgagttgcaaaaagccccttttgtttcttttattttggaaaaaacttttattgtgaaattcacatatatatatatatggaaaaaactgaatcaatgcaaaaggatagacaatgaacaaatgaattccccttccactccagatccccaactcagatccagacctcctgagcccactttccccatctcatcacagatccagacctcctgagcccactttccccatctcatcacagatccagacctcctgagcccactttccccatctcatcacagatccagacctcccccactttccccatctcatcacagatccagacctcctgagcccacttccccatctcatcaccagtgatttcttgggctctgcattagttttctattgctgctgcaacaaacagctacagactcagtggcttccatttctgtcttatagttctggttgccaaaagtcctaagaggatctcactgggctaaagtcaaggtgctggtggggctatgtcccttctggaggctcaagggatgaatcaggtccctgcgttttctagcttctaggggctccagcttctgggtttgtggcctccttcctccatcctcaaagcctgcaacagcaggtgaagtcctcgcccatcgtgcatcactctcccttctgcctccttcaacttttttttttatatttagggggaacgagtataggattcttacatagtcaaaaagctccttatagagaagctcagaactttcaatacagctttgccttttttgccatttaaattttccatttaatttaaatgtattctctcatttgaccttcatactctgtggagaaatattcctattttggcttgtattgacaagttgttttcacacagcccccacatcacccaaccaaccagcagagatcctccttcccaagaaacagataaagaaactgaggcccaggaaggctaagagtcctgccaggattattcacctttcaaggtaaggagccagttccagacctgggtttgtgcagctccaagctcccccgtctttctacaatgctagatttagactaaagcaatctagcaagtgtggccacacaatggtcaagttggatttagatgatgttctctataaatccattctcctctcccgtgtaagcaaggcaaagtactccaggccatg

SEQ ID NO: 13360 - DNA, 2300 bp, Homo sapien
tattcctgttgctgtgtcagggatccccgagccttctctcaggcttgatgattcactaaaaggactcagaagagctgttatagtcacagctgtgtttttactgcaaaaaggatacagattaaaattagcagagggaagggtgcatggagggaagtccagaggaaactaggcacacgctttggtgtctctccccagtggcatcacgtggatgtgcttagctctcccagcaatagtgtcacatcatgtgtgaagaattgttaaccaggccagcgcacctgagcctcgagtctagagattttgttgggggccagtcacatacgcaggcagtgcccctgtgactgacctcactcaggctccagtgccccagtgcaaaaacaagtggtccctcgcaagtcccatcattagcataaactacctggccagaccactgccacaaggtcctgggtgtcaggtataccaaaaaacttctcaggcaggatgttccaagggctcagagctcagctcctagaagaaggaccaatcctgaagggacagaccttccttgggaatttgcagggtttgagcaaccccggcctgctatgttagctctttactgcccagatgtattatcatgttgcttattttttatattatatgctgaggagacttagaccaaaaattttaaaagagataaagtatagggaggagattccacatatcacagtgaattcagttgattcagttacacagtaacagaaccactgaactggaccagggtggacaagccaggaactatgggccaaattctacctcttgctggctttgggttgcccatggactaagacctttttttttttttccagtttgaaattgttatttaaaaattaaaagaagtatattattttggcacatgaaaattacatgaagctaaaattgtagcaccataaataaagttttacaggagcacagccacacctgttgctttatctgtggttactttttgtgctacagcagcagagttgagtatttgcgacagacagcatggcctgaaagactcaaatgttcactctctggcacttgaggaagagcttgctggctgccgggcttcccctgcttcggggcttctcccctcgtcgcactctcactttgtctttttgttctgccagggtgatcatttcactcttgttgttgagcattgcaatttataatgttgttcagatgtttatttgaatgaaatatttgtccttcatgtaaatctaaatatgtcttaatttaaaattaatatttaagtgtatgatttttatagtgaatgatgttttaaaacacagttcctaagaagccagaatctacggatgatgaagaaaaaattggaaacgaagagagtgatttagaagaagcttgcattttgcctcatagtccaataaatgtggacaagagacccattgcaattaaatcacccaaggtgcggtattttctgtgattctgaggttggctgaatagaatcgtagcatgtagcacaggaatccacagtcttgtacctctgtacctgagcatctggagggagggacgggcggttgttagaaatacggccccagtgatgcttcatgaacttgacttatgatgtcctggtcagagctgtagctggagaagggtttccttttatttttggtattagattgtatcattaattattcaccattcattccttaaatatattctttgttccagaaacagtgctgggccctgtggctgttaatatgaaccataacttaacttagtatgccaagctagcctgttccaacatatagtatagagattataaattcacttatatttatagcatagttttaaaaacatgtattactaaatttaacgtattttaaccaatttaaacccataagcattatttatattttacttgaataacttttagagcacagtttattattaaatagggtagactaatgatgaaaattgttttcctttgttaggacaaatggcagccgctgttgagtactgttacaggtgttcacaaatacaagtggttgaagcagaatgtgcagggtctttatccgcagtctccactcctcagtacaattgctgaatttgcccttaaagaagagccagtggatgtggaaaagagaaagtgcctactaaaacaggtaacatttgatgagaaatgcttctctgcattgggtaatatacataacacttaactgtatgcattgatattttgcagttggagagagcagaggttcgcctggaagggatagatacaattttaaaattgtatctggtgagcaagaatttcttacttccat

SEQ ID NO: 13361 - DNA, 2300 bp, Homo sapien
ggattgcaggcctgagctaccatgcccagccctgctttaatttaaagtgtattacatttgatattagtacagccccttcagctcttttttggttactattttaattgtatctttgtatccctttactttcaatctgtttctgtatttaaaatgtttatcttgtagatagcacattggtggatcatattttgttcttcaatcctttcagccagtctgcttttctttctttctttttgagacagagttttccttttgtcacccaggctggagcgctatggtgcgatctcagctcactgcaacctctgcctcctgggttcaagcgattctccagcctcagcctcctgagtagctgggattacaggtgcgtgccaccaggcctgactaatttttgtatttttagtagagacaggggtttcttcatgtcggtcaggctggtcttgaactcctcacctcaggtgatccaccgcctcagcctcccaaagtgcaggcattacacgcgtaaaccactgcgcccggccaaagtggtggattttttttctcagaaaatctattccattctttttccagaaaccaaatttgtacaagttaactaaaataaatatttatactctaatttttttgttctgaggtctgagtttttagaattttatctttacatgtttagaaaaattagaaaatatagatagaacataaccaagaaaataataacaactttccttctgttcaaagttcattactattagccgagtgcagtgactcacacctgtaatcctagcactttgggagactgaggcgggcggatcacttgagcccaggagttcgagaccagcctgggcaacatggcaaaatcccgtctacaaaaactacaaaaattagccaggtgtggttccatgtgcctgcagtcccagctagtggcaaggctgaggtggagaaccacctgaacccggtaagtcaaggctgcagtggtgcagcctctgtcccccaggctggagtgcagtggtgcaatgtcggctcactgcaacctccgcctcccgggttcaagcgattctcctgcctcggcctcccgagtagctgggattacagtcacgtgccaccacacctggctaatctttgtattttcagtagagaaggggtctcatcatgttggccaggctggttttgaactcctgacctcaaatgatccacctgctctggcctcccaaagtgctgggattacaggcctgagccaccacgcccggccgttatttttctttcttagaggcaggatctcactctgtcgcccaggctggagtgcagtggcacgatctaagctcactgtagcattgatctcccaggctcaggcgattctcctgtctcagcctcccgagcagctgggatcacaggtgtgtgccaccacacctgactaattgttaaatttttttatttttattttttagagatggggtcttgctatgttgcccagtctggcaacatgggatcctccaactcctggcttcgagggatcctcccgcttcggcctcccaaagcgctgagaattacatacgtgagccaccacgcccggcctatattgttttatagttcttcaattttgttttgtggtcgctggaggtgtttccttcttcgattccctgcacagtgcttccacagctgctccatggaatctgcccaagacttttgctgcgttcagttgaacacacaggaggaagctcttcaggccccagccagccgaccgcacaaagatgcgttctcatacccaggggagctggtctcgccactcgacccgcgccctggatagctatagttagtgtgagcgccaccacccgccgcggcgctccgggccaagcagtctcccgtgggagtgcgggagtgcgtgcgtgcggcggaaatcccgccttccggcgcccgctgttggccttggccgcagccagggcgctccaagtaggaagataagcgggattgctggaagcgggagagtcgggaggagcggcgaagggctcctcttccccattggctgcgcccacggagcagcctcgttgcgattggccgtacgcggggggcggcagtcccgcgtcggcccgcccctcgggccgcgagaggcgccgggatcgcgggcgccggctgagccagcggctcttgggaggctgcgtccgcgcgccggcggggcggggcggccgggccctgcgcgtcaggtcctggcctggggcacctgggcggccggtggcgggggcggtacgggcgcggggctggcgggcggccgagcccgggaggcgggcgtgggcgcggcggccgcaccggggcct

SEQ ID NO: 13362 - DNA, 2300 bp, Homo sapien
taatggacgcaaggcttaaaaaacttgatctgtttattttatgtttgtcctggaagtcagcctcggcatgcaggaagagtgtatatggattgtgttatttttgctataatcattagtttgttggtattcttactgttttactgttgttgcgtgtggagaaatgactgggtgagatcacaggtgatggagagagacagcgctcagctgagagaccagtgctggcctgtctctcctctgtcctgtgaaaaccctgctccaggagggtccagtcttttggtttccctgggccacactggaagaagaattgtcttgggctacacataaaatacacttatgatagctgatgagcttaaaaaaagaatcccaaaaatatctcatgatgttttaagaaattttactttgggccacattcaaagctgccctgggccacatgctgccctcgggccgtgggttgaacaagcttgatctactcagtaagctcggctcccaaagcaataccttcctttcctcaccatgaaggctgtggttagggtcaaaataaaagctacaaaagccttcctccctagcaaaactaaagctgaagtgtttgatcatcatcttttgtctttgtaataaaaccctctaacttaatgacaagaaccacggttttctcgacatagtaatttttcccttttattacagtggtttcttgtaacaacccgtcatgtccctcttccagcccctcccctttttgccctgcttctagaatgtacagaactgagtgtagtgtttagttgcagtaatgaactgagcagaggtctggagcatgcttctcctctagtcctctgtagcactcatttatcaccatatctgtggcatcctggcgtttgcgtggttgcgccccaggtgtttgctgcccctcctggtttgcggtgatgtgtctgttctggtcagtgctgtggggcgtggccttgcgtatgtcttaggctgtcgaggtgtcccagcgtatggttttgcatttgcctctccggggtcctgagggttctgtaggtttcacagactccaggtgagtttcggtggtcatttcctgacctgtgatatctatacctagatgagtggtgtgcttttgatttcacttctacttacagggcaaggccgggtctctgatttctcatggggcctcttgctacccagagcctgggacgggcagtgtgttgccccctggctgcggttggctggcaggcaggtgatcctgagtggctcccagccttctgcaggaagctcgggttcagtgggtccttgtgtgcattcccgtgtgggaggttgtgctgaagcctggcggcttggctctgctttcagagcccggaacctcttgactcctgctgtgtgtgcccacgtgaattttggttttgcacttgaggagtttccctgtgtactctcagctccgcagtctaatttttagcagctcttttttttttttagacagggtgtcactttgtcacccaggctggaatgcagtggtacagtcttggcctgccaggttcaagtgattctcctgcctcagcctcccaagtagctgggactacaggtgtgtaccatcacacccggctgatttttttatagagatggggtttcatcatgttggccaggctgatcttgaactcctgatctcaagtgagctttccacgtcggcctcccaaagtgctgggattacaggcatgagccaccgcctgtggcagcttttgtggttacattgtagccattatttctgtgtttggtgcagattgttggggcggggtggaggttgctgttgctagttgtttagctcttctgctcatcttgagcttttccatatatgtgttcatagtggggttaaaaaaaattcctctagaaaatacttcaactattgtgggtaagagttttttttagtccagtttttaaaaatacgtgaactgagaagttattttgtctatttagataatacttcaaattgacttttattcagtgtttaataagactttgaaattcactcatttttaggggttctaagtgaaaattgtttttctcctttcagttgcatgctgccattagtcaccaggttgacctggaattccttggtttaggtctgggcagcgtcttcctgaacagcctgaagcagaaggtggtgaccctggcaagcagcgcagacgtgctgagcaccgtgcagtcggcctcccaggccatgctgcagagcggctggtccatgctgttgcccaccgctgagaagcaggcccgggcactctgctctcctgtcctgcggaggtgggctcggggaaggaaca

SEQ ID NO: 13363 - DNA, 2300 bp, Homo sapien
tcaatcaccaaagtggtcttttatgttcttcattcattcctttctctactgcctctggccatagcataactgatgaggagctgaaggagaaaaatgccaaactacaagaaaaacttcaacttgtagaatctgaaaagtctgagatccagctcaacgtaaaggagctaaaaaggaaactggagagggccaagctcctgctgccacaggtgagcagctgcagccccgggggttgtgggagacccatccagctgggaccatggtctagggatcatgcagggtatggggaggctccagccaagagctggaaaatttgggtccttgttctggtcccgccatagaatcctctagagtgtactaaaaatgtacaaattggggccctgcctggggaatcagaatctcaagagttagggcttaaaaatatttttttaaaggatcatggatgaaaaccattattttatagattacatttatttatttatttatttatttatttatttatttgagaagtagtctcactctgtcacccaggccagagtgcagtggcgcaatctcggctcactgcaagctccaccccccggcttcacgccattctcctgcctcagcctcccaagtagctgggactacaggtgcccaccaccacacccagctaattttttgtatttttagtagagacggggtttcactgtgttaaccaggatggtctcgatctcctgacctcgtgatccgcccacctcggcctcccaaagtgctgggattacaggcgtgagccaccgcgcccagcctatagattacatttatgtggctagctcatgattctgcttccttctgaggttcaaaaaaacactttcactattccagcagcagctgcaggcggaggctgaccacctgggtaaggagctgcagagtgtgtcagcaaagctccaagcccaggtggaagagaacgagttgtggaaccgcctgaaccagcaacaggaggagaagatgtggaggcaggaggagaagatacaggagtgggaggagaagatacaggagcaggaggagaagatacgggagcaggaggagaagatacgggagcaggaggagaagatgcggaggcaggaggagatgatgtgggagaaggaggagaagatgcggaggcaggaggagatgatgtgggagaaggaggagaagatgcggaggcaggaggagatgatgtgggagaaggaggagaagatgcggaggcaggaggagatgatgtgggagaaggaggagaagatacgggagctggaagagaagatgcacgagcaggagaagatacgggagcaggaagagaagaggcaggaggaggagaagatacgcgagcaggagaagaggcaggagcaggaggcgaagatgtggaggcaggaggagaagatacgggagcaggaagagaagatacgggagcaggagaaaaagatgtggaggcaggaggagaagattcacgagcaggagaagatacgggaggaggagaagaggcaggagcaggaggagatgtggaggcaggaggagaagattcacgagcaggaggagatatggaggcaaaaggagaagatgcacgagcaggaggagaagatacggaagcaggaggagaaggtgtggaggcaggaggagaagatacgggagcaggaggagaagatacgggagcaggaggagaagatgtggaggcaggaggagaagatacgggagcaggaggagatgtggagggaggaagagaagatgcatgagcaggagaagatatgggaggaggagaagaggcaggagcaggaggataagatgtggaggcaggaggagaagatacgggagcaggaggagaaggtgtggaggcaggaggagaagatacgggagcaggaggaaaagaggcaggagcaggaggagaagatgtggaagcaggaggagaagataagggagcaggaggagaagatacaggagcaggaggagaagatacgggagcaggaggagaagatacgagagcaggaggagatgacgcaggaacaggaagagaagatgggggagcaggaggagaagatgtgtgagcaggaagagaagatgcaagaacaggaggagacgatgtggaggcaggaggagaagataagggagcaggagaagaagatacgggagcaggaggagaagatacgagagcaggaggagatgatgcaggaacaggaagagaagatgtgggagcaggaggagaagatgtgtgagcaggaagagaagatgcaagaacaggaggagaagatgcggaggcaggaggagaagatgtgggagcaggaagtgaggctgcg

SEQ ID NO: 13364 - DNA, 2300 bp, Homo sapien
acgggcgtgaactactgctcccagccaagagcttactttggtttgctagcaaggttcttggtatctttttatatttgaggctttcgtgctagtgctgaagtattacactcaccatctgaggtttacaggacttttgttttaatattgaaccgagggaactgtttagttttgcatctttgcaggtatacaaaatgtgcctaccaggactctgctttatatccattgaaaagcaagaagtaatacagtaaaagtttgcctggctacaggctttggaagaatggagtattctggtttaattctattaacttggaaggatgaaggtggaaaaaattcaaaactttaatttcctgttgaatgcaatttgaaaatatagccaatgagtccacttttcttctctagtaagtttggacattcagatctacttggtcttttatcatagaactcctagtgcgcctgagtcttacgttgtgaaaatccttttctaaaactttagatgtaagaggatagaaatgatattggatgagatcaggctggatgagaactgatacctgtagatatattttttagatgaaatctctgattgccacacgttttcttattgaactcataaaaataaaacacactggctggagggtggaagtaggaaggagatttatgtcttttaattgcatgtcattgtttcatatcgagacagaacatatagtatccctggctttggacctacagaaggaaacacatttttctacctgctgtatggcagaggttcctgagcacctggagggattattgcagcacggattgctgggccctactgcagagtttctgattcattcatgtctagggtggggcctgagaatttacatttataagaagttcccaggtgctcctggtccggagactacatgtttgagagccacccttacatactaactgtaaattgtagaactctagaaaaaagcatagtttggactgggagaagaagcacacaggtaatggagcaaatcatgaaaaagtcaacccttgatcccaggtaacaagcaatacacagtgacataacacaattcttggttttcatgattgcaagtcatagccaagtatcgagtgagaaattcagtttcattttcagggcttagaggccaggtgattctagaaaaatcggatttagtgattaactcatgagagtaggagttatttatgtcctttttctctcccccatcacttagcatttagtcttactttagaagggtcctgtatttgctttaaccttgtaaagaactttgagtgcttattaaatggaaagccgtgtgtgtgtgtgtgtgtgtgtgtgtgtgtgtgtgtgtctgtgcgtgtgtgtgtgtgtgtgtctgtgcgtgtgtgtgtgtgtgtgtgtatttagagacagagtcacgttctgtagcagcccaggctgaagtgcagtggcatgattttggctcactgcaacctctgcctcacaggttcaagggattctcctgcctcagcctcccaagtagctaggattacaggcacctgccaccatgcccagctacttttgtatttttagtagagacaggatttcatcatgttggccaggctggtcttgaactcctgaattcgggtgatccacccgccccagcctcccaaagtgctgggattacaggcatgagccatcacgcctggctcaaagctttgtatttttaaagatattagacatgtttcttgtttgtttgttttttttaaaaaaactaaacgctaatgtaggagaataagagaaagtttttccaaaaaagagaaaacattgtgattatcttattggaatgttggataataaagtctgctttatcaatcatcaagcacactataaaatttccattttaataggacttgtacctcaattgaggtaataaagttttaaagtttttaaagtgaaagccagccccgcccctctcctggagtgggcggggacagcggttgcataggcagctttccttgtgacaacacaggtccttcatgacacgctgctgtctggccacacctccttttcctttcatctttctcattgaccaatgggcttcaagcatgaaggccacacccctattctgcattctagtgcagccctggttacgcctcctctggctcagtcacacagcgacgtagaggtgactggaggtatatacttgtcctcacctggatcatgctgatgtggccccaaccccacctccctacccatccccacctccctacccatccccacctccctacccatccccacctccctacccatccccacctccctacccatc

SEQ ID NO: 13365 - DNA, 2300 bp, Homo sapien
ttttatataagtcccctgattcttagaacatgaaggtgtagtattcaagtttggtcccttgaaaccacaatttttgttaaaaaaatttaagaaaattgtatgatttcctcagcaaatacatattgatcatctgttatacagccatgagaagtggttctgttgaacacgtttattttatcagatcccaattctaaaccaggcatagaatggaaaccatgaaggtaggatgaaataacttctgaatgtttgaaaatagtgtacttaaaaataaataccaggtgtttttgttttgttttttgttttttgtttttgagacagggtctcactctgtcacccaggctggagtgtggtggtgccatctcacctcattgcagccttgacctcccaggctcgggtgatctcccacctcagcctcccaagtagctgggactacaggcacatgccaccatgcccagctaattttttgtattttttgtagagacagggtttcaccatgttgcccaggctggtctagaactcctgggcttaagcgatcttcccacctcagcctcccaaagtgccaggattacaggcatgagccaccatgcctggctgaaaataccaggtttttaagtatcagcactgcctcttcaatcttttctattactatgttgtgctcagtggtattttttattgaattagagcagtgctgttcaatggaaccttctttgaggatggaaatcttttatgtctctgctgtgtgggtatggtattagctgggtatggggcacctgcctatagtcccagctactcaagaggctgaggtgggaggatcacttgagcccaggaggccgagtctgcaggttcgtaccactgcaattcagcctgtgtgacagaatgagactcagtctcagaataaaatgaaataaggaaataaaaatgtaattgttgaaataagaaactagtggatggattagacacgagaagaaagaattaattgtttagacgattctctccaaaaagtaagtcagcatgtcacacagagagacatgaggatagatgatagggcagaagttggtgggcttggaggggagaggaagatcagaatgaggtccaaaatgtgtcttagtgaaatcccaggaggagatattaaaattatattagaaagtgaaagaaatagaagttttatttatttatttatttatttatttatttattttgagaaggagtctcgctctgtagcccaggctcgagtgcagtggcacgatctgagctcactgcaagctccacctcctgggttcacgccattctcctgcctcagcttcccaagtagctgggactacaggcacccaccaccacgcctggctaattttttgtatttttagtagagatgtggtttcacctttttagtcaggatggtctcaatctcctgacctcatgatccaccagcctcaggctcctaaagtgctggaattatacgcataagccactgcacccggcccaaaagctttgtgtttttacaaatattacacatgtttcttgtttaagaaaaaaagtcttcacaataacgtaggagaataagagaaacatttttccaaaaaagagaagtcattgtgattattttatcttattggaatgttggataatatagtctgcttcagtaatcatcaagcatgctatggattttccattttcataggatctgtatctcggttaaggtaatactggtaatttttgtactctatgaaaaatataggccaaaatcatagaccttgcatagaagctggatcatgaagacagctctggaggaacacacaggtacacacacacagacacacatatatataaagtatacacatatatattttttaaaagcttttaaagcaaaagccggccctgcccctctcccagagttggcggcctctcccctctcttagagtgggtggggacagtggttgcatgggcagctttcctcgtgagccaaaggtccctctggacacttgatgcctggccacgccccctttccctttcatctttctcattaaccaatgggcttggagcattaaggccacgcccctattctgccttctactgcatccctggttacgcctcctctggctcagtcgcacagctacctggtaggtgactggaggtgttgatcagtgcttggtgggattttgctgatgtggccccaagcccgcctccctccccaccctgcgatggcagaagaaactcgacaaagtaaattggcagcagccaagagaaaggtaaaaacacaccaggtcacggacccccaacccagccatagatcctctccaacg

SEQ ID NO: 13366 - DNA, 2300 bp, Homo sapien
acaaaatacttttcaagatctttattctatgtgagaggaagggattcttttccatcccagacagcttcatcttagccttcccgtgtcatgaaaaggggtataattaataaacaactggggtcagattcaagaaaataatctgtggatgctgcagccaggaggggaagtggaggatggaggaaaatccgctgtaccactggagactccttgtaaagggtgcagcctagagaaaacacagcaagaaaacattggaagtcaatttccagaacatatactgctcccctgtccactgcatcacctcccctcctcaccaataggattaatctggattaaagagaaaagtgtgataatgcacagactctgtccaaacactacaacttagggaaaccaaaggcagtgggagagaacaagtcaaggacagtgaagtgattcaaagcctctgagaacaacagcttcaggaacaaggtcacagcctctccctcaatggccttagatttacttctcatggggcatctgcagggttcccaggtgagaactggcaaagagaacatgaaggtactttccaaatctccagtaatactgagcttgctttagctctgtctggaaaaaataacaacaacaaacacaagcaggactatggccagtgttggaagcacttttcattgacaagacacttggaaggagggcaaatctgagtctcgttactgtgcaaatgtgccactgtgagtgtatgtgtgtgtgtggggggggtgctttgagacatagggtctttgtgtaaagttacaatctgatgtgatcgtcaaccacagaatcctaaaaaaaaatagaggctgccccaaagttcccatcggttcctagacttgccatgtgtccggaccctatcagtgcacctagaactccagggaaggggctccctggtggctttagtgattccttgttgctgtgctgaggtctcccggtagattatgtcgggtgttctaaggcctatttgctactgtaagagatggtgggagaagcaattgctgccattgaaagagcattctgagtcagggcaaggccacttcatactgtgcttgagacgctgggaggagaattctctatgagcccagacaggaactttcctgcagggcaggagctgagctgcagggggcgctcagggcgcacccagcacaggatccagccctggagcaggttcacaggaggctggggaggggttttctctcaggaattgaatgttctttgtttcaaagcaataataacctaaaatctaaataagaatgtagtaagtactgatgtgtctttaagtattctattatatatgtagcctatacctaaccaaataattgaatgcaaacagcatttaaaaggagaaatgtctagtcttttcaaatgtatttatagttaggaattgaagagtggttttattaattcaatgggtgttactgtcggaagatacactcatcccagaatttagatgtgcagaggtcaaggcccaggaaaagttcaggttgtcagggtgccatatgaacaagaaatgacattgaggacaatgtcctgggagattctggttttctgtaaaacgagttctgtcttcatggacttctgagcataacagagggcaaatatcattaaacaaagttcagggcagggagctctgcatcccactgtggcgtggtccgtgtgtcacctatcttcttcctcaggttgaggtgccttgagctatgaaatacctgcctcgtgaatatgcaaatgcactgctgtctaccgaggtacatacagatctgtccttgcccagagagcatcacacaacaaccacatccctcccctacagaagcccccagagcacggcacctcaccatggactggaccgggaggatcctcctcttggtggcagcagccacagggaagagaatcctaagttccagggctgatgaggggactgggtccagttaagtggagtctcaaccacttctctgtcctctccacaggtgcccattcccaggtccaatcggtgcagtctggggctgaggtgaggaaacctgggtcctcagtgaaggtgattccagatacaccttcaccttccactacatacactgggggcgacaggcccctggaaaagggcttgagtggatggaacgtgttgatcctgaagatggtgaaacaatatatgcacagaattccagggcagagtcaccacgacctgggacacgtctacagacacagcctacatggagctgagcagcctgagatctgaggacacagccgtatattaatgtgcaagacacgcagtgtgaaaaccc

SEQ ID NO: 13367 - DNA, 2300 bp, Homo sapien
tttgccatagtatctctccctgttcattattggtatgagccatatcactgcacccagccagcactgcacattttaagtgtatgttctatgagttttgagaaaggtatacatgcatgtaaccaccttgctaatcaggatatagactatttccatcaccctcaaggagttcccttttgcattttgcagtccatcaatcttcctctaccccttagctcagacaaccatgaatctactttttgccattatagattagattttcctgttataaatttttatgcaaataaaataatatacaaaatacttatttgtgtctggcttcattaacataggataatgattttgagattattgatgtcaatcagtgttatcgttcattatttatttcattgttggatggtatcccattaaattgatataccacaatttgctcatcaatttacttttctgtttttgagttgtttccagtttttagctatgatgaataaggctacggtgaacattcatgtacaagtctttgtgtagacaattgttttctcttggtaaatacttagtggtattattgggtagtatggtaaatatatgtttagctttacaaagtgctgcaccattttaatctcccactggcaatgtatgagtgttccagctgctccacatttttcccaatatttaatactgacaactttaaaatattagacaatccagtggatatatagtgatatctcatttagattttaatttgcaattcactgatgatatactattgagcatcacatctttcataatgtactttattttgcgaagacacatacccagcatatggaagaccctcaataaatatttgttgaacttacacaaattgaatacagaaaatgcagctcatcaaaggatttgagttaatttcctggcatttatgaaataccgagcaagttatcaaatgatagcacttaagctaattctcaagtatttaaaagaaagtgtacatcctcatctgtctaccaaatatggcccccaggcagtttgctcaaggtcaaatactggtggaacaatgattagaaacattttatcatcctcaatttaattctctttatatttgactcaggataaatgtcattgatttttcatatcattttattgaatttatgttttattcaattactgttttgccatagtatctctccctgttcgttattaaaaacttcagctcttgataaaaacctaatcatcacctaaaatttatttcctttcataaaaatgtatttcaacttccagatacttgattaacaaatgaacctttaaataagtgtttatttggggaaactaacatattgggtagcaactttgtttcccatcttattattttatcaacaattaaaggttaaccaattcaaaggtgaattgccttaaataagaagtgatctatatattagctctgaggcctgtaattgcatttagctgtaactcaaatgagttgtatgtgtgctatgtgcaactaactgaaagtctgggatgctccgttgctcaagccagggcatcagtatcatttaaatgctttgttaagatcaaatagccagccagaaacaattcaataaatgtccctggtttctacaaacagaagttcagataaaaaattacctcaagcaaaattctatttaggtgaggaaacagaaaatagagcattataatatgactctgatgtcaaaaacagggaacttctgaaagcgtcattgatttagcaattttcattaattttttttagtcctctacgacgggcagctagcaactcgacaggaaaatacaggaacctgaataaacctgacctgtcttcagcatcatttatatactgcggttatgcccacggaggttcctggactgcatgttttgattggatgagaaaaaacctccaggcttactctgattggactttattatcatgttctgattggttgagagtaagtcttaacacaaccaatcacagcatgaaaacaaagtccaatcagagtaggcctagaggttttttctctcatccaatcagaacatgtagtccaggaaacgcatttgcataacctcggtatataaagcatgctgaggtcgtatcaggtcatttcaagctcttctgtgtctagaggaagagctaccccgtgaccggcttagagaactggaagaggccgcaacctttctcctgcttgaagctggaggatggatggagtctggagccctggagcgtgggacactgtttcgctgtggttggtggtggcgacagagcagtaggagagcgcccggcagcgggagcttctcctgct

SEQ ID NO: 13368 - DNA, 2300 bp, Homo sapien
accagctgcataagagttatcaaaaagcaggaagcgcactggtttttctggtagtaaagcaagggctttccaagaatttacctctaaagtaatttctttcattctttcttttttctcgctctgacacccagttggagtgcagtggcacaatcagggctcactacaacgtctgcctcccaggctcaagccatcctcctacctcagcctctcaaatagctgggactacaggcacgcaccaccatgcctggccagttttttggtattttttgtaaaggtgggatttcaccatgttgcctaggctggtctggaactcctgagctcaagcaatccacctgccttggcctcctaaagtgctgggatttccggcatgagacactgtgcccggcctaaagtaatttcttacttgagattttatttcaggctattgtgtcatgcactgggcagtacagcctggtgggtgagagtacagtggttttttgtgtgtttgtgtgtttgtttgtttgttgtctgctgggtttgggtttgaattttgttttaatacatgcaatttattctgtgcttcactttcttcatctgtaacatggagataacggcgtctacctattaaagttgtgaagattcaattagatgagttgtatgaataaatgttagccattttttttttttttttttttttttgagatggagtctcgctctgtcacccaggctggagtgcagtgacgcaatcttggctcatggcaacctctgcctcccaggttcaagctattctcctgcctcagcctcccaattagctgcgattacaggcacccgccaccatgcacggctaatttttgcatttttagtagatccgcgttttcaccatgctggccaggctggtctcgaacacctgacctcaggtgttccacccgcctcagcctctcaaagtgctgggattacagccgtgagccaccgcgcccagccagctatcaagaaattcgactgcctactacttagcctgcacagttctaggtgctggggaaatagtgatgaacaagacaaacaagatccttatcttcaagtagcttttaccttctaagtggagtgaaaaaacaataaacattgaaaataaatttcagaaagtgctgtggaaaaactttacaacagacgcaggaatagatttcatttgactagctctcccagacagtttccagaaaagtcaagggtagaatgttaaaaggcaactcagaggaggtgaatctgttagggcctgcggtaatgcaatcctggtttgtggaattctgcaggctaatgtgggtaggttacaattttggggggaggggtttattttgtttgaaaattcacttcttcccgctaagcttttgattaggagctgaagttgaatcagcttgaaattgtattctggaccgggtgcggcggtccatgcctttaatcccagcgctttgggaggccgaggtgggtggattgcttgagcccaggagttcgagaccagcctggacaaaatggcagaaactccgtgtctacaaaaaatacaaaaattggcggggcatgatgttctgcgcctgtagtcccagctactcaggaggctgaggtgggaggatcacttgagcccgggaggcggagtttgcagtgagctgagatgtcactgcattccagcctgggcgacagaaaaaaaaaaagaaacgaaaaaaagaaattgtatcctgaatacatcttctaaaacactacatttacttgcactatattaaactggttttatcctgaccacaattgcaggtgaaagataaccactgttgttctatttttctggtaagtagagtgagccatgtcttgcccagggaaagacgcctcctaaaaatttgtaggaccacctttggttatcttccagatttttttttgtcatcgcttttcctgcgcccaattcccatctgtctagcccttctgcctccgctggtctttttcgcgagcctctccccagccgctggtattcgtctgggctgcagccccgcctatctcctggggcgtgaccacctgtccaggccccgcccccgtccaacaggcggagacccgccccctttcccggagacccgccccctttcccggacaccggcttcagcgcccgagcgtgcgcgcgcgtctccgctcgtcgcccggctcggcgtcgggagtgcactctgtgtggccgctgctgcagtgttgttgtggttgtgagaaggcggcggcggcggcggagtagcagccggaccagacgccctagtagctcagtcgctgccctgcgccgggcctggcagggagcctggtga

SEQ ID NO: 13369 - DNA, 2300 bp, Homo sapien
ccaggagtgtgtgtgtgctgtgaccagcagacctatggcatgtgccctcttcctccctctgtggtgtgaaatcagttcctctgatggtgtcatgtgaggtctttgtcctgatgggtagaactttctataaaccatcccatggccccggggaaaggcaagctcatcccttcaggtttagctgtttctgttaaatgcaaccctgtccttcccagggcatcagggccccgtgcagttgtcccagcctggcaggaagtccccttgaggattgtgtggagggcgcagcctgggcctgactcgtgaccctggcaaagagcaggtgagccctggggctgaccacctgcacttcctgtttggtggtgggagatgtggggcaatatttcttgcatttcctttagagagcatctcccagcctgcccagacaaccagacccctaaacatgtgacttgtaggcagggcctggctctctgtggtgcttttctgtctcctccaagcacctgtgactcccaggcttccagccctgccagcttcccccatctgagctcctgatgcagggtgaggactgtattgtggcagacagcatgccggtttacacagttctgggacgaaactgtaggtatacattattttatgtcccgagtaaatgaatcctatttatggatactttttttgacacagagggaagaaaggcattggtgagatccacgggccagagctcagcctgtgctcaggctctggcagcagctgtgcagctctggagctgttgcagagtggggaggtgctgtgtctttgctccctgtgttaaaggcttcatttgtgtctttgttcagtttgttttctttgacccctgttcagcaatactgaaaatcaagcattcctaagaggtggagactttgctttggagcaggggcgggggcattgggtggaaatggggaatagcttgatagtgggaatttcattttctggagctcacgtgcagcctcttgatggcctcgtcacaagttcacctgatgacctgagtggccactgtccttctcctgagtgagttatgtgcttgccaggcacatgagcagtgcatgctcacatttttcaaatgaaggaactgagaagggtttgtcagcagattgtaagcctgaagctgccagtgtttggtccacagtaaaccacatgtggagagcttaaaaaaattgccctcaaatctggcaagaaaatgacagtaataaattaaattattactgtgatacacatgtttctttcattacaattagatatattacacatatcccaattttgcagaagtttatcatctatcagtatttatttatttttttttgcataagtttccaaggaatcctaatgatggggactgtctcttttaaaattaaattgtgtaaataactcccagagccatgctggtaagaaacaaaacaaaacaaaaagaactagaaacatgaacaaacattggatttctgctgtaaagaggatgcaaagcaggcctgcctgctgcacctccccagagctaatccttgagccaaaagagcttcctggtgaagcctcgcactctctgtaacagggcgtggggggaccaagacatgcgggctccagattagaccatctttacctagttatgggatttcagtcatgtcttttaaattctttgagctgcagttttcacatatgtaaagtgaaagtatttttaaaattttaatttgtgttatgaccttgtataaagttaaaatagtacatttgaaagcattgtagctgaagtcaaacgttcacgtgtgtgcatgcaatggcttcttaattattttagggcttaacctggttttactggtactgttactagcactgctacttctccatgtctctgaagactatgaaatacttagaacttaagcaacaagaagcacctgtcaaagcgttctatggccgatgacagatttgacacagctggatatagtaatatgttcgatggtgcccagatcattgctaagcagagacttcatgctattctaagtcgaaagtgtccctagaattctgaacctgctgaagcagccttcagaactgaagttgagaaaagtacattttctttttttttttattattattatactttaagttttagggtacatgtgcacaatgtgcaggttagttacatatgtatacatgtgccatgctggtgcgctgcacccactaacccgtcatctagcattaggtatatctcccaatgctaaccctccaccctccccccaccccacaacagtccccagagtgtgatgttccccttcctgtgtccatgtgtt

SEQ ID NO: 13370 - DNA, 2300 bp, Homo sapien
aagcagccacctctgcaagcatgctcctggtgcagttggaccagcctttaatctcacccactcaaagaagcatggatggccaggttccaacagcctgaatggctgccacctgatggctgatggagcagagtcctgaggaaaagcagatggcactgctttgtaatgccctttgtctcttttgatcttttccatttaaagtctgttttatcggagactaggattgcaagccctgcttttttttttttttttttttttttttttttttttttttgcttttcatttgcttggtaaatattcctccgtccctttattttgagcctgtgtgtgtctttgcatgtgagatgagtctcctgaatacagcacaccaatgggtcttgagtctttttccaacttgccagtctgtgtctttttactggggcatttagcccagttacatttaaggttaatattgttacatgtgaaatttatcctgtcatgatgttgttagctgtttattttttcccattagttaatgcagtttctttatagtgtcgatggtcgttacaatttggtatgttttcccagtggctcatactgtttgtccctttccatgtttagtgcttccttcaggagctcttgtaaggcaagaatgtggatttatttcttgtaaggcaaatatgtggatttatatctgggtgctgtattctatggcctctaccccaagagtcattacttttaaaaatgcaattcaaattagcataaaacatttacagcctagggaaaggcttatggcattagaatccttatttataggattattttgtgtttttttgagatatggtctctgtctgtcatccaggcagaagtggagtggcttggtcataattcactgcagccatgaactctgagtccaagccatccttgtgccttagtctcccaactagttggatctacaagcataaatcaccatgcctggttaattttaaataaaattttttgtcgagattatgttatcactatgttgctctggctggtttcaaattcctggcctcaagtaatctttctgccacagcctcctatagtgctgggattacaggcatgagccaccatgcctagcatagagtattacattattttcaaagtcttattctaagagccatttattgactttggcctaaataactcaatattatatctctgaaactttttttgacaaattttggggcacgatgatgagagaaaggggtttgaaactttctaataagagttaacatagagccatttaaggaggaaaaaacacaaattatcagaaaagtaaaagaaagatcaagtgcaaaagttctgtggcaaagatgatagtaaagaatatatgtgacttatggtggcttttactttgttcttgaatttctgagtaatttaagggttaacatttaaagaatctacattatagataacattttattgcaagtaaatgtatttcaaaatttgttactggttttgtatgagattattctcagcctacttcattttcaagttatattattttattaatgtagtttggtgatcttacagcagagctggaagctgtatcttcaaaatatgtctgtttgactcaaaacaatcaaggtattcaacaggagttattatgtatgaaaaaatacaacaggaatgtaaaaatcttgaggaggctaaaaagatgttggaaaaagtaatattaaatcttaaaaaacgtatggaaagtacacattggtgaagacacattggtgaagtacaaaaatataaattggatctagaagaaagggcaatgcaggcaatggaaaaattagtacaaatccctttacaggttagtttgtaaaatcaggtaagtttatttataatgtgctttcacttatttcactgcaatggctctcttatagtaatttgccttgtagagttctagcaaagaggtggcatctgtttttacttttatatgtttaaatttctatcattataacaaaatcgatttttcacagtaatgattctcagtgtggagtcatttgattattaagacccattgacatgagattacatcctctgcctataaaaatcctggaagaaaacctaggaaatattcacctggacattgcacttggcaatgaatttatgggtaagtcctcaaaagcaattgccagaaaaataaaaattgacaagtatgatttaattaaactaaagagcttcttctgcacagcatgagaaactctcaagggattgaacagacagcctaccgaatggaagaaaatattcacacactatgcatacagcaaaggcctattatccagaag

SEQ ID NO: 13371 - DNA, 2300 bp, Homo sapien
catgtccctgcaatggacatgatctccttcatttttatgggtgcatagtattccatgttgtatgggtactgcattttcttcatccagtctattaccaatgggcatttaggttgattccatgtctttgctattgtgaatagtgctaaacagcaagcacacttctaaggagaacgtctcaagggaaacaattaaatatattaaactgaataaaaataaaaatacaacatatcaaacttgatttaacacagttgacgtcagtgctgagaggaaaatgtatttcactaaatatatataatagaaaagtagaaatctctcaaataaaaattcaagctatcacatcaagaaagtagaaaatagtagcaaaataaaatcaaaacaaatataagaaagaatataataaggataagagcagaaataaatgaaacagccaaaagaaaacaacaaagaaaagcaaagaaataaagctggttctttgaaaatatctataaaattgacaaaccttaactaataatgataaagaaaaaagggatgtcataaattaccagtttcatgaatgcaatgggctaacattagcagtagaactcagcaatgtacacaaagaattacacagcatgtcccagtgacgtttactccagtgactgcacacctagacattcatcccactgaaataaaaactttttttttgcacttgcaattggcttcccctctgcttttgttggcaagagcaggtcggtgtcccaggcttagaatccatttttctctctctccgtctgtctctctgtctccgtctctgtctttgtctctgtctctctctctctctctttctttttttgacagagtcttgctttgtcacccaggttgcagtgatgcgatctcgggctcactgcaagctccgcctcccaggttcacgccattctcctgcctcccgagtagctgggactacaggcgcccaccaccatgcccgctagtattttgtatttttagtagagatgaggtttcaccgtgttagccaggatggtctttatctcctgaccttatgatccgcccgcctcagcctcccaaagtgctgggattacacgcgtgagccacagtgcccggccagaatgcatttttcctcccacaccaaagcacctgcagtatgggtgaagcagcctggagcctggctgcataagcctgcacagcaggagggtcccagcaggagggtagaggtgccactgcctgggtccagctcacaggctgccagggaggctccgatctggctccctggtgctggcagtgtcctgttcccaggatctgcacgtgggggtgccttcctgcatctccccatcagtggtaggtgctcctcccagccccctcttgcaggcctggagacagcggcctgcacctcaaccctactgcatgccagtgaagcgaagcaccccgggccagaagccccacagctgttggccctggtttggacaccaggcagggggcaccacagcaggagctagcagcccagccccgattctgtggccccgagtgccccgttgctgatggccctgtgttctgggtgcggaccaaggaggagcaggtgtggaaggcgcctcaggcaggccctgggctccgtgggcgtcttgtgctcggagattttgaggccatttgcatccagctccgccaaccagagctctaagctgcagcggcggccacccgcaacagcgccaccactagtgtcttgggggctttcttcagaggaggctgtcagcatcctcgagttccaggcgctctagccccagtcctgcttcaagaggctttttcccaccacaggcttctctcctcagtggccagaaagctgggccaactcccatgaactttgccagtaacgcaaggctgtcactgacatttgtggcgccaagacttgcgcacgcggattgcacacatcggccacttcctggaccacgtgcaatgacacgcgcacgcctcacgcacacgccgcataacgtctgaggcgcgcgccccgcacgcgcgccccgcacgcgcataacggcttggcttacctgtaacgggtacacttcgcttcgcgttcctcgcttggccttgcgttcctagcttggcttggctgttagtagctttgcctggtgtttcttgcttggattggcgtttcctccctcgcattcctttgctggacttgaccttttctctgctgggtttggcattcccttgactgggctgggtgtttccttgggagggggggcttggcctttcctggggtgggcgtggggtccccctggtgggcgtgggctttccccgggtgggtgtgggtt

SEQ ID NO: 13372 - DNA, 2300 bp, Homo sapien
ttcttaagtagatggaagtggtctcttgaatctgtgagctgtgcagcctcagtttggaggaggggtggtataagaactctcttagctgccccagcttgtatcttagtaggtaatgtggcccccaagtccactggctctaagcccagttcagcatgacacctgggagttgctgtccttgtgacctagactgttttaagtttctttagggccccagagcattttagactatggtggtgaagcttgccagaactcaagttccaatcactgggagggtgattcccctctgtccagggccagttgaaacacaccctctgtgggcaggcatcagctgagttcattccagttttgctttctgctatgatagggcagcactgagttcaatgctcacaatcccagtgctctccctctcccaagtgtacagattctgtctacatagcatgtgactactgccagggcatgagtgaggagtggcattagtgattcaagactgtctttcctaccctgttttagtgcctctttgtgtactgcagggttaaaaccaggtactgtgagtgctcgcctttattcttatgaaggtttttgtttgctttttaatagatagttgttatattggtgtccttccaggggaaatgatcactggagccttctatctagccatcttgctctgtcctctgttggttttctactatggcattgtgctcatgttctcagcttggtaaaatttcatattggatttgtaaagtatattcagctaaattcagtatgtagaataattagttatttttactactttgagctatatattcttattacaaccaaggcattttaccagagcaaggcatagaagagtcattcaaaaaagcaacactaggaaaagcaacactgggaagatatgggagctgtggccttgaaaatttatgcttatggaaaaactgggaaagtataggtgaaggacaaaaagaattataatttatgtagccaatatttgacaacttctcataacaaaaatttaactgtgaaaggagatgaagaacatagaatatttctgaagaagcctcagtttctgccagctactcctacagaaccatgtattcctgtgagtaaatatcaacatcaatttttggaatctgtcttttgtaataaaaatcagataaattttagccatgactcaaatattagtaaacatcagaatactcattttctagaaaactattacaaatgtaatgaatgtgagaaagtgttttatcaatcctcaaagtatccatattcaagaaaagccttacaaccctaatgaatgtggtgaaacttctaacccatcctcaaaacttactcaacatcgaagaacttatattggagagagctcacaaagatgtaataaaaaatgtataatagtctttagtcagtcacatctgaagagacataagataattaacactggagagaaatcagtaaaatgtaaagaacgtggcaaagcttttaccaggggcttacaacttggacatcagaaaattcatactggagagaaaccttacaaatgtgaaaaatgtgacaaagcctttaagaagagctcacaccttgctcaacatcagagaatccatactggaaagaaacctatcaagtgtaaggaatgtggcaaagcttttaacagaggctcataccttacttaacatcagagaatccatactggagagaaagccttcaaatgtaaagaatgtggcaaagcctttaatagaagctcatacattactcagcatcagagaattcacactggagggaaacctttcaagtgtcaaaaaatgtggcaaagcttttaacagagcttcacaccttactcaacatcagagaatacatactggagagaaacacttcacacataaagaatgtggcaaagcctttaacaggggctcacaccttactcgacatcagagaatccacactggagagaagtctttcaaatgtaaagaatgcagcaaagcttttatctagggctcacaccttactcaacatcagagaatctacactggagagaaattcttcaaatgtaaagaatgtggcaaagcttttaccaggagctcacacctttctcaatatcagagaattcatactggaaagaaacctttcaaatgtgaagaatgtggcaaagcttttaacagacactcaacccatactcaacatcaaataattcataccagatagaaactcttcaagtgtaaagaatgtgccaaaaccctaaactggtgctcacaccttactcaacaattctatcttttatacaataaattacggttaactatagttgt

SEQ ID NO: 13373 - DNA, 2300 bp, Homo sapien
aaatcttacacaattaaaggtgtgtgtgtgtgtggcttcaaaaaaattgttggctgtttctcttttctccgccattctttaggaataagattgtagaatacctgacagtctgggttatgggaacatcaaaccaagcagcagatgatgatgtaaaatgtattacaaggtaaaaaagagaatgaccttcaagtattagtgggttttcctgtaagaattataattacttcattacagctttatacttgtattttatgtgtatttaaattttttagatgtcaaacttttgtggttgaaatatgtaaagatactaatctttattactacttttttttgactgatagactttctgtaaaaataaatgtgcgagagcggtatgtttgggaagttagtgttgtcagtttatgaagaatagtctaccgttattgggaaataaggtacataaagcctcagattgcatttatgttatgattagatagaaaaaggtattatttgaggaactcattgtgttggtctttctaaaaaataattgatttcctgattcaggcaccagagacagaaaaaaaaggaagtaattaagtgtaattaagtctgctttaatgataaatgcttattgacacatatcagaaagtgattaaacactatggactgtataataagcctttacatatgtttctttgaccaagcctagctttataatatggtcgtctctcagtatctgtcaggaattggttccaggaaccaccccccaaactcctgcccacatctcacttccatgaacactaaaatccacagactgaagtccctgatacaaaatgtcatagtatttgcatataaactatgcacatcttcccatatattttaaattatcattagattacttataatatctaataaatataaatcttatataaacacaagttgttataccatattgtttagggaataacaacaaagaaaaatctttacatgttgagtacagatgaaaccctacttttttttcccccaaatagtttcaatccatggttggttgaatccgtggatacagaactcgctgagacagagggccaattgtacatgcttctgattgaagatagtcattttgccaagattactttgtagaaagttactattgtcttctcctcatttgagatgattttgtattctaggatctgcatattaattcaaattatttgggttgtgctaataatttgtttaatgaaacaggtagttcctaaagtttatatctgttaataagaggtttatttgagaggaagtgaaataacctgaaagatttatggtctctaatttttttttttcagagatttggaccaggcaagcatggaagcagtagtttcacttctagctggtctccctgtgcagcctgaggaaggagatggtgtggaattgatggaagccaaaggggacacagttatttcttaagtaaatttcagtcaccaaaaaacacaaagcaaaagcaaataaagccccccgccgccacacacacacacacacacacacacacacacacactctcaaagacaaaacaaaacaaaaacaaaaaaacaaaaaagaaaacaaagaaatgttccccatgcaggactaggattaggaaaataactgtgttttatgatttttaaagaaaataatatgatccctgaaattttgcttgtaataaaacccagattgcttcactaagtcatttacaaaagtgacattgtgtaagctgtttggaccactaattttatatactaaacattaaaaatgacacatttaccaggaaacattgcatctatttgatgcttatgttatgaaaggtatgctaggctatatcaggtataatcatgcccaacacagcatgcttcataatgagtcaccctggctgattatcctgagagaggagagaagcagttaatccagggccagtcacaccgtgcacatgtgatagttttggaatgtctggttagctttctagttgatacggcctttgctatgtaaaggtcagtctttttatttctcagatacttcacactatttatgaaccttttgagtgactgcagtgaagctgaagatgaaagtgcacaaacaggtggcaggaaacgtggcatgtctcggaggttggcatcacggaggcactgtgcagtccttgcaatgtcaaacttacttagtgccagcatagacggtggtctcatgcactccataggtgagatcaaatgaaagtttcatatagaaatacacagcctagagaactggcttgtaagataagcaaaaattacttcagtaaggccatgttagtaaatttg

SEQ ID NO: 13374 - DNA, 2300 bp, Homo sapien
tacttaatgttctgtccctggcttacttcacttaatatgatgtcctccagttcaatccatgtgcctcaaactacaggatttcattcttgcttatggctaaatagtattccattgtgtatgtataccatattttctttatgcattcatctgttgttagatacttaggatgattccatatcttggctattgtgaatagtgctgcaataaacacgggggtgccgatgtctcgtcaatatactgatttccttttctttggataaatgtccaataatatattgttggaccatataatagttctatttgcagttttttgaggaacctccacactgttctccatggtggctgtactagtttacatttccactagccccatttaagtgttcacttttctccacatctttgccagcatttgctattttttgtctttttgatagtagccattctaagtggggtgagatgacacctcattgtggttttgatttgcatttccctgatgactagtgatgttgagctttttaggaaaacatatttgttggtcatgtgtctgtcatcttttaagaaatatctattcaggtcatttgcccatttttcagttggattctttttttttttttttttttgctattgagatgtcaagagttccttgtatattctggatattaatcctctgctggatacatactttgcaaatattttctcccattctgtaggttgtcttttcactctgccaatttcttcctttgaattaatattaattttttaaagaaaagtatcttaaacgcttgacaatatggaattaaaaatacagtaccttcaagctgggtgcggtggtgcatgcttatagctgcagctatctgaaggctgaggcagaagaggatcgcgtaagtccagaagtttgagaccagcctgggcaacataacagcaagactcagtctctttttaaaaaatggtatattcaatttggggaacatgctacaaatcctcaaaaaacgggtacagaagaaacatactgcaacacaataaaaaccacatgagagacccccacagctagaatcatatggaatggggaaaaatggaaagcttttcctctaagatctggaacatgataaggatgcccactgtcaccactgttatttaacatagtactggaaaccctagctaaagcaatcagtgcagcccctgatatggcccccaacccaccctgcccccttgcaaccagcagtgtagcccccccgcaatagcgcacccaacacacccaaaccgccccgcctccccgaaccacgggcattgcagcaccccatagcaccctcaacctgaaaccaccacccccccgcaacagccgtgcagtgcagccctggataggacacttagcccacctcactgttgccagcaatacagtctgggatagtttccccaacaggctccccgccgggggcagtgcagccccggttagggcccccaaaccacccccgggtgcaggcagcacagccccagatagcacacctaaccagccacccaaggtgggcagtgacgcctgagatagggcccccaacccgtcccaggccaagggcagtgcagccctggatagcgcacttaccccgacgcttttctacactctggccggttgcagtgtccatcgctgccaccaaccgcagcgggcaaggcaagccagcgaggcaaggcgaggcaagccggcgaggtggtgagccagggaggccagccacagcccggtaggctgcagcctccagcatgcagtggctggcacctcctactccaagctggcaatggagcagctatgaagtcagatgccgacgaggctggaatagtgcaactctagctcttaacatgctttatataccgagattataaactacatgttctgattggatgagaggaaaacactaggcctactctgattggactttattgtcacgttctgattggttagcctaagacttgttctgatccaatcagaacatgaaaataacgtccaatcagagtaggcgtagatgtttctctcatccaatcagaacgtgaagtccgagaaccaggcctgcacaaccccccagtatataaggtatgctaagggggcgtcgcgctgttgcaggctatcgtgtgttaacctgtacttctgccgcagagtttggagaaagcggcagcagattgtgctgccgcaggctggagcctggaacctggagccctggagccttgaatggtgtgtggtggcaatggagagaggcagctggcagtgacagctgctccgtgcttggctacaggaaggaaagaaggagaaagcacct

SEQ ID NO: 13375 - DNA, 2300 bp, Homo sapien
catggccacaggctttctgaggctggcccccagggagagttcaatcccactatcccaattcctgccctggccttacctctcagtctcaccgagccgcttcatggtcccaaaccaggacccaaagtgctgcttgggctcaaggttgtaattatatgcagccaactggagcagcggacctccttgcttactttgaattcctgggtccagagggaaaaactgggtggtgacagggactggacagggatgccacaggggccctgtgggggtgttagattgggtggtggccagtctttgctcataggggacacccttctcctctccagtcctgtccccacctgttctcagagctggctcaaacagcagctcctccaggaaggtgtccttggtttcaacctggtactcccacctgcaggtcttcctggagtgtctcctctttctctctgtctccccataaatctaagatgagggggatggatttgcccaccgctactcaccgtatgactcttgtgaggttgatcagtctcccctggaaggccaacagctgaagtccatcagaaagggtcctctggcccagagccagcccctgcccacccctgtcatgctgcacccagggtgcaagccccagatcaggtctgggtgacaggaggggtatagaggggctgaggctcaggggccttctagcctaacttgtctggagacagttggggaaactgagaccccaagcaggtaggtatggctccgagagattattctcgttaacctggaacatttttgcaagctgttaggtataggaagtctgtcacaggtaagagaaatgctttttgagagcatgagagacagcagggctgtgacaatattgaaacaccaccgtgcagattcaccaattgccaccaccgggagccccctgagagtcattgcagatgcacagccctcccctgcaacccctggacctccccatggtctggcacctaaagggttatgcctcatggcaggaatcagggccctcaggatgccctgcccactccaaggtctgcctctgctctgattggtcactgacattcagattgtcacccaaatataaggacgttagcagaaagactcattcaatacaagtggactcagacatagataggaattgagttgcaaaaagccccttttgtttcttttattttggaaaaaacttttattgtgaaattcacatatatatatatggaaaaaaaactgaatcaatgcaaaaggatagacaatgaacaaatgaattccccttccactccagatccccaactcagatccagacctcctgagcccacttcccccatctcatcacagatccagacctcctgagcccactttccccatctcatcacagatccagacctcctgagcccactttccccatctcatcacagatccagacctcccccactttccccatctcatcacagatccagacctcctgagcccacttccccatctcatcaccagtgatttcttgggctctgcattagttttctattgctgctgcagcaaacagctacagactcagtggcttccatttccgtcttatagttctggttgccaaaagtcctaagaggatctcactgggctaaagtcaaggtgctggtggggctatgtcccttctggaggctcaagggatgaatcaggtccctgcgttttctagcttctaggggctccagcttctgggtttgtggcctccttcctccatcctcaaagccagcaacagcaggtgaagtcctcgcccatcgtgcatcactctcccttctgcctccttcaacttttttttttatatttagggggaacgagtataggattcttacatagtcaaaaagctccttatagagaagctcagaactttcaatacagctttgccttttttgccattttaattttccgtttaatttaaatgtattctctcatttgaccttcatactctgtggagaaatattcctgttttggcttgtattgacaagttgttttcacacagcccccacatcacccaaccaaccagcagagatcctccttcccaagaaacagataaagaaactgaggcccaggaaggctaagagtcctgccaggattattcacctttcaaggtaaggagccagttccagacctgggtttgtgcagctccaagctcccccgtctttctacaatgctagatttagactaaagcaatctagcaagtgtggccacacaatggtcaagttggatttagatgatgttctctataaatccattctcctctcccgtgtaagcaaggcaaagtactccaggccatg

SEQ ID NO: 13376 - DNA, 2300 bp, Homo sapien
gacagggcaagggcaaggccagagaaggaccatggaaaaaacacggccagggagggtccagggtaagggcaaggccagggcagaaccagagccagagcaggccaaaggcagggccagggcagggcaaagccagggtaggccagggccagtgtagggtgagggtagggccagggcgagttcagggccagggcaggactaagatagcacagggccaaggcagggccagggcagggccaaaaggaggggccagggccaagcatagccagtgtcagacctggggattgtcagggccagggtcagggtcaaggctgggccagggacagggccagagcaaggacagggccagggagaaggcagaaccagagaggatccagagcaaggccagggtcagggcagaaccaggaccaggataaggcaaagccaaggccagggcagggcaaggccagggagaaggcagggccggggcaaggcagtaccagggcagggcaggaccagtgcagggccaatgcagggtgagggcaaggccagggcatggaagggcagggcaggaccaaggaagggccaggagagggccacggcagggtcacggccagaacaagggtatggctggggtcaggaatatggtaggatgagggctgggcccaggctgggacatgcagggcagagcatggcctgtgcaaggcatggccagagccaggccatagatatgggagggcaacaccaaggcagagtcagggtagatccagggctgagcagagtcagggcaggtccagagtcgaggcagagctagggcccaagcagggccatggtagcaccagggcagacgagggcagggcaatggaggactgtgccatggcagtgcctggtcaactccggggcagggccagaagcaggacagggacagggccaatgctcaggccagggacagggcatgacaggtcgtgccagagcagggctgggccaacgttggggcagggcaaatcagaccaggacacctccaagtccagctctggccctgccttggccctggccccttcctggcctgaccttgtccctggccctgccctatccatgccctgtgtgtttgaccagtgttttataaccagaatcctacaagaaacttaaattagttctttttgtgcatttttagtagagatggggtttcacaatgttgcccaggctggttccaaactcctgagctcaagccatctgcctgccttggcctcccaaagtgttgggattacaggagtaatctggccaagtatttaacttctttatgcctgtttcctatatttggaaaatggggatgctttaagtacctagcacatagaattattgtgagaatcaatgcctcacatatttacatattgataaaattatattatattcatagaacactactggaagcaaagatagtattagttaaaatttagtgattactgcaaatattattactattacaaacaatatagtatagacattactactaatatagttatcttaaaaatctaaaataaaaattttatgtaatagcctaatgcaatctctcctgctctgccctggttcagccctagtgccggctctgccgctagtcctactacatccctggccctgatccttccctggtccagccgctgccctggcccttcccatcttcaggccttaccatggccctaccctggtcctgaccctgccctggtctggtcctgaccctggccctaccccagagaaggggtatggcagagccagggaagggccggggcaaataagggacaggacacatccaaatccaggaaagggccagggccatgacagagccagggcgagtccttggcagggccaggttccaggccagggccaggaaagggtcatgacagggtcactgtatggccaaggtccaggccaaagccaaggcagtggcagggtcaggtctgcataagggcaggacgagagcaagtgatatggcagggccagggccagggctgtgccaggacagaacaagagcagagcagggcaggaccagagccaggccacagagagagtagggcaaatgccaaggcaaggccagggtagtgccaggtctgaggcgaggtcagggaaggtccagggctgagtcaaggctagaaccaagacggggcaaaggccggggcagatctagggcacaagcggggcagatctagggcacaagcatggcaggctagggcagggcaatggcaagaccaggtcatggcagggccagcccaggatagaacagggcacaggcagggcagggccagggccatggctggggcaggacaagg

SEQ ID NO: 13377 - DNA, 2300 bp, Homo sapien
atttctatatctttacttcaatatttttatcttgctcatctatcattgttgtgatttcatttgtgtctcagtgttctcttgtggcatgctgaattatcatggagccccagagctctcctttcctcatgtgtgctgcttctttcatatgtgataactataatgaactttaacaaatctcaaattcgagtacattcccaatcaccttctaaaagtaacctcctaacctccactgattcctcagatgtggtagtttgaaagttgttcccatagatttcaactacaggccaaccagaggggacccatggccactagaatggtccagtgacctttatacttcagtgtgtgtaaaaatcacctgggatcctatttaacattcaagtttctgagccttcccctagccagtagattttatatacaaaatgtgagggaaccattacccttttcaagtgattaaaaaaaatcagaggtgaagcaattagatttggctacatttaatttgatgttttatctttcaagagattgggatggttctagtgaaaattatagctaatctgaatatggcttctaactgttactgggtgcttatgtcttttctttactctgatcaacaatattgggcaggtgtagtggctcacgcccataatcccagcactttgagaagccaaggcgggaggttcacttgagcccaggagtttgagaccagcctggacaacctggggagacctccatctctgcaaaataaaacaaacaaacagacagacataaaaacacctagctgggcgtgttggtatacacctttggtcccagctacttgggaagctgaggtaggaggattgcttgagccacaaggtcaatgctccagtgagccgtgattgtgtcactgcactctagcctggaaaacagagcaagaccctgtctcaaaaaacaaacagcatacgtcttattgttttgttcgcttgtttctgaaataatctcgttagtaaagcactatacttgataaacagtctgatttaatgaataaggatttaaactttagattttggagagacaagattaactaaccgttgatcacaaggagcacactgtgcaacaagctactctgataggacaaaagtcctaggagggctatataagcaaaatctcattcaaggactgaactttaagccctattcacttttagctaatcaagtgatgggcaagttgacatctatagggaagagagaagaggatgtgtttctgagctttccttcttcagtcaggcaactctgtgattcattaatttcctcccttccttctccacaccctggcatgttggcccatagccacaaggtggcaggataaccagtaacattttattcaagccaactgaagccctgcgggggctttgaagttcacacacactgtccaccttccacatactgatgctgggagcaatttagagcaaacatcatccagagtcatattactagatgactggattgcttcttttgtccctcaatcctgctctcctttcagtgctaactcaagaaaacactaagtttacactttgcaggagcccctggaatagttaaagctttaaaccatttcacatccaactcaatgatctgttacaaaaaatacctgttgattttctgttattttaatggatacctagcttccttttataaattggcattacaatagtctggtattagtattgatctggaatctatgtgcttccagatcagtcccattccttttacttttagaataagacaaaatgtagctcagacaccattcttccatgaaaccacatctctctaagaagatgctggaaagtcagtctttctcaaaaagtagttttcccctcaagtttcaacacattactccactgtaagtttagacagtataaatatgtataaaatatatatatataatatatatatattttagtataatattatgcttcagcttttcctgcatgtttttctttcttttctcttacacccttctctgtgatctcatctgacaatcactaccatggcaaccaagcctctgtgacgttccagcaagctcattgtcttctcttcactaaactttagttagtagttggtcccagtcagtaacactctgggagggctcaggccacatcacgaaatgtgacaggatagccttgaactcatcaattgctgggtaagaaagaattttaatgcaatggcaaacaaccaatcaaacaagcaaacaaaaacaataaacccttccttgaggaccaagaagacattgattagctaacctaagagctccaggtggagacctaggtc

SEQ ID NO: 13378 - DNA, 2300 bp, Homo sapien
ggtctctatctcttgaccttgtgatccacttgcctcggcctcccaaagtgctgggattacaggtgtgagctaccatgcctggccccatccttgaatttttattttaccatctttgtgtctttgtcatgatactaatcataagctgccctatatcaatgttcatccatgatattggcttgaagttttttcttgttgttgtgtctctaccaggttttggtatcaggatgatgctggcctcatagaatgagttggacagttctcagttttttggaatcatttcagcaaaaatggtactggctcttctttgcatatctggtagaatttggctgtgaatccatctagtcctgagctttttaaaatatatatatattttggttggtaggctatttattactgatgcaattttggagcaggttattggtgtgtccaggaatttacccatctcttacaggttttctagtttgtgtgcatagaggtggttgtagtagtttctgatggttattttttatttctgtggggtcagtggtaacatgacctttttcatttctagttgtgatgtttctttcaaaagattagaatggtaaaaattatatctattctgattagggcttctaggcattattaaatgtttacacctttaatttactctggtcaacagtatatttttggggactttttcttaaataatcttgtcactaaaccactatactttataaacagcctgattaaatgaacatgcatttgaacattagactctggatagacaagattaattaacctttgacacaagaagctcacagtacaacaggccactctgataggacaaaagtcctaggaagtctatgtcggcaaaatcccacctaagggctgaactttaagctctattcacttttagctaattaagtaaatatactgccatcccatgctgatagtgatgagcagtctccggggagtttgacttctatagggagggagggaggcgatgtgtttctgcactttgcttcttcagtcagacattctgtgacttcttcatttccttccgctcctcttcaagccctggcatgttggctcagaagcacaagagggcaggataatcctcactgtctcattcacactgactgaaaccctgggctttgaaatacagactcactcctcccaagctctactctgatgctgggagcaatttagagcaaatgttatccaaagtgacattacctagatcactaggttctttctttcaccctcctccaatcctgctgttctttcacttctaagtcaaggaaactccaagtttacactttgcaggagcccctggaatatttggggtttcatattgcacatcaaaactatttctcactgacccaatcatctattaaaaatcttgttgaatttctgccattttaatggctatctgccttcatatgaagttcttggtattataatagtcagtgtgcttccaaattaatcccaattcgtttacttttactttaagatgaaatgtaggcagagcacagtggctcacacctgtaatcccagcactttgggaggccaaggcgggtggatcatgaggtcaggagttcaagaccagcctggccaacatagtgaaaccctgtctctactaaaaatagaaaaaaaaaaaacagccaggcatcgtggcaggcacctgtaatcccagctacttgggattctgaggcaaggagaatcgtttgaacctgggaggtggtggaggttgcaatgagccgaagtcgcgccactgcactccagcctgggtgacagtgcaagactccgtctcaaaaaaaaaaaaaaaaaaagaagaagaaatgtagcttagaaaccattcttccataaaaccaaaaccatatctccttaagaggatgttggaaaatcagcctttctcataaagtagttttccccacaagtttaaacacattactccactataagtttagagactattttaaaaaactattatgcttcagcttttcctgcagttctctctttcttgtctcttacatacttctctgtgatctggtccaacaattattgccatggcaacaaaggctctgtgacatctctagcaagctcattgtcttctgccttattaaactttaatgggtaactagtagacagtaacactctgggagggctcaaaccacataaccaaatgtgccaagataatcctgagctcactattgtcaggtaaggcaaagtattttagtgcaatagcaaacaattaattaaacaaacaaaaacaagaaacctttcttgggacaggaagccattaattagctaagctcaga

SEQ ID NO: 13379 - DNA, 2300 bp, Homo sapien
tttgtgtgtattaataactgtagtcggacagtaaattatgttaaaatgcttatgggaaggcacaatggaaagaaacactttgttacagaagggaaaaaaaggtaattattcaaatgagatgcctttgaaggtcactatgccaagaggagccgatcgcatgatagtgttaggtttcacgttcaggagatcaggagggtccgtctgctggcttttatgataccctagacagagctgagagtataatgtatgaatggaggggagtggagaaaggggaggccaaatgtttgatgggaatggagggtcactattggagccattaggaaatacacaagcatgatttgtgctgaagcacagaacagtgttcctggggaatattgtgttgctttgggagctgctgaacatacaggagtttcactgttcttagttctcgaattctctagactctcttgacagcccaattttaaatattgggaatataggtaagacacattcatggttaaaaattcttaagtgaagatgtaggaagaaatttaaagtaatcaatttaggttatgaaaatttagttatggtgaactgtgatgtctgtttctcacatggaataatggaatataagtaattactcatctcagtggttcattttcccatagccatcaattacaaaactgctggataatttcctgaattgtccaccctagaagttgacctcacattacctcagtgagaaaccgctagtctggttgatccagcctcattcttcccatcaggaattttgtgtctctgtgcacatatggcatagtcctggtcagggtggcagagggaaggaactgaagagggcattgtcagaccattcttcagaggaggagtggagaagaattgtgtcccatttcccagttggctgtgtatctgcatatggcctcgggattgctgccagcctatccatgcatgatgaagcttatttaggggacgaagccagcatgctgagtgttcagtgccgacagccaagagaatcaactgcctggtgcatgctgcttttatgaaaacaagcccagggccacttgcattcttctgtattagattctctagtgaagttgtttcttcatttctgctgaaactgccacatataattacctagaggcattacaataaactgattgagagttaactgacttcctggtgaggttaaaatgagtgtcaggtgcacagtaagacagacaggagacatgggagcatagcaagcttgtgttcaccatggtttgtaccttaacttctgttttgtaccttctgtaccttccttagatgttcaggcactccattgaggagcctgacagaacattatttattgatggaccatagctcaaaatatagaaatggatattaccgaggagaatatactgttactactttatctttatcttaaaatatactcttccatctgaggtgaaaattaatccagatggtagaacttattgcagttactacagcattttaggaaatcaaaagctgcagaacaaacatatggacagatggcaggtatgtttttggaatcgtaaacaactttgcgatgattgtaaaaccaaggggtgtctcacaagggctggaaacctctcaaaatgaaacaacacactgaggatctttgagaagtactctgacctccaagcgagctggctgatatggaggctgagctacatgtagaaagccaaaggaatttctgcaggacatcatcatgccaagcacagcagtaaactgagtcccagcccttttcacacgctcaatggttagatcttgggaaggaatcaaagaagccattgtaaaatatcaaaatttaaaccctgattttgaatttaaaatgtgttaacatatggttgtggcctacactcagaaaatctgtctccttcagatggtgtctcagtagcaccacatggtttcaagtggctattcattaaatttctccatgaaactaccagatacagaatagataaattgtcactgtcttaaatcaacccttgggaaaggaaaactgtgtaaagacagcagagaggaaacattgttcaagggaaaaacaatctccagaaactgttgttaaagaaacagaggccctctttccagccagtgccgagcgatggacatctcttgggacaactggcacaagtgccacaaaaccagggacaagagaaagccctaccacaagaagcggaagtatgagttggggcacccagctgccaacaccaagactggcccccgccgcatccacacagtccgtgtgtggggaggtaacaagaaatactgtgccctgaggctgg

SEQ ID NO: 13380 - DNA, 2300 bp, Homo sapien
atatctgcattcttatttccccaaatagagtgattatccaaccatatccaaaccatatatatatatatctccaaaccatctaaatatcaagtattttttaatccatctaagaactgaaattgctgaaaaaactactccctccaaaagctgtagagataggcacatccacaattacagcagagacttgctgacttggaagagaagctcctggaaacacattggtgagaacacttacctggtgattacgctgaatgtctggaggacaagtgtggactagggggaaggtgagcgctcctagaggctgtacaccccacacttgtgtggacttgccctccagggccttcaggttctcatggaagcgattaaaatagattccctatagccacgaactggggaggagtaatcactgagaaaaaatgcacaaaaagacttttctagaaagctcatccgagggaaggtgttctctaaaatcttagtttatgtgggggaaggaagtacttccatattacagacccctcctcctcagccttcctctatcatgcaaatgataaaattagccaagaggagtcagactcaaggtggtagccctgggtgcagcatctgcggaagggaggaaagagagaaaatcagctgtatcactggagattccttgtaaaggtgctcaggtgaagagggcaaccaaaccagggagagtcaactgtaagaacataccatgctcccctgccccacacattacctcctcaacagcatcattaatgtggattaaagaggtcagtgtgattgctttagatctgtttgagaaagaaagtcacatgctgaggcctagggtcagggtcggcagcacttcccatgagtaagatactatgaagaaggaaacattaggggcccataactgtgaaaatcagccacagtgtgtgtgagtatgtttgtgtttgtgcttctgtatgtttgagtaggagttattgaaacagtggacgtggagtgagctttaatccacatccatctgcagcttcaggtattctcagatgcagtatttgtctgcaagagccaaattgagaaaagagccacctccaaccccccccagagttttagcctccctttgtttccagtgatccagtgcatctagacctccaggaaagggactccctggtgattttagtgattcttctcttggagcctccctgaagaggacattgggtttccaaaggcccattcactatttcaagaggtggtgtcatccgctcatgttgtcactgaaggagcattctgagccagggcacagtcacttcctagtgagctacagaggctgagagaaaaatgctctgtgagacccaacaggaagctccctgcagtgcaaggtgtgggtggcagggagcgctcgggcctccccgcagcacagacttgcagcccaagagcaggtgcacaggaggctggggaggggttcctcccaggggttgatgtcttccttttcttgaacaaacatgctttaataagttaaacaagaatttagtaaagactatttgtaggatttatctaacctaacaagtcaatgagaatcacatttaaaaggagaaatttctaggattttcagatatcttaatagttaggagatggagaaaagggatagttttattaattcagtgcttgccaatcttagcagagacagtagtaagacaggcagaaagcaaagcccagaaaagtatgaaggtgtcaaagtgccatttaagtatgggttcacttggaggaccatgttttgtgggaacttgttttcagcagagacaatttattttagcagagttctgggcatacaaggggacacacatcattaaacaaggattaggacagggcttcagcgtcccactgttgcatggcccataaataatgtgtgttctctttctcatcttggatcaagtctagagctatgaagctatgaaatagtacccctcatgaatatgcaaataacctgagatttactgaagtaaatacagatctgtccttgccctgagagcatcacccaacaaccacatccgtcctctagagaatcccctgagagctcagctcctcaccatggactggacctggaggatcctcttcttggtggcagcagctacaggtaggaggctccctagtcccagtgatgagaaagagattgagtccagtccagggagatctcatccactcctgtgtcctctccacaggtgcccactcccaggtgcagctggtgcagtctggggctgaggtgaagaagcctggggcctcagtgaaggtctcctgcaaggcttctggatacatcttcaccg

SEQ ID NO: 13381 - DNA, 2300 bp, Homo sapien
aagggacaggctggtcccatcactgacactcgtcctcagaaaccctgaccagctactgaccttcccaggtcccctgttcctggaacggttcctgtgtctgctcctgaaaagatgcccatcaagagtcccaagggttctgcccccttccttgatgtgcctctgggagtggggctggctgggctgtgggtctgctgtgaccctctccacaggtcagcagttcagtgcaggctgcaccaactcggtggggctgggctgtggctgaccctcctgggggagcctggactcttcttaggggtatctgcaggatcccaggttctgggagaacagggaagccacagtgtgtgcagggccccatctccagtaaagtgtttgctgttgttctgcttgacaagggcatatccccaggcctagaggcactatgggcacacagccaatgcgctagacacagggagtaagacacagttccctctcattactgtgaggactctagacacagtgtgtgtgtgtgtgtgtgtgtgtgtgtgtgtgtgtgtgtgtccattactgtggggactctaaccacccgtgtgtgtgtgtgtgtgtgtgtgtgtgtgtgtgtgtattaggagtttcgcagtgggctctgagacccatgattttgtaggtttagaaattatctgatgagatgttcatccaaaggaaccgacaagagattaggtgttctcccaaagcccctgggagctcctggactcattgtgagtgtggactgatccagtgcttccggagctccagagaaggggctccctggtggtttcatagaatccttgtttggggtgtttctgcagagttcactggctttcctacaaccaatttactattgcaagcgatggtgtcagcaggacatggtgtcacgtgtcactaaagaagcattctgagccaggacacagccacttcatacagggaggaaaatgctctgggagcccagacaggagcctctctgcagtgcaagggctgggctgcagggggcgctcaaggcccacccagcacaggccccagccccagagcaggtgcacaggaggctggggagggattcctctcaagatctgtgtcattcttctaaaaaaatctaaaataagtatttgacaaagactgctgaagattccataaatatcctattcaattgcaagaatttatcaatttacactggagatttctaaccctgctacataccttaatagtaagcatctggagatcaattaagcttttattttatataaataagtgcaacttttggagaaacacactcatcccccaaataacacattcatgtattaaagcctagaaatgctttaaattacctctgagctattcaagtgtgggttcccagtgaagtcctgttctagggaaaattgttctccagtgttctccactgttctggagaaaattgttctccagaagctctgtcaacatacagcttagggatgtggcagggcacacatggcctctaaggggattatagcttgaacccttagcatcctcctgttgggtaatccatgtgtcatctctccattctttctcatgctgtgttaggtatgaaatagcatcgctcatgaatatgcaaataactgatatgactatagatatctttgtgccctgagagcatcacccaacaaccacatccctcctcagaagaagcccccagagcacagctcctcaccatggactggacctggaggatcctctttttggtggcagcagccacaggtaaggggctgccaaatcccagtgaggaggaagggattgaggccagtcaagggggcttccatccactcctgtgtcttctctacaggtgcccactcccaggtccaactggtgtagtctggagctgaggtgaagaagcctggggcctcagtgaaggtctcctgcaaggcttctggatacaccttcaccgactactttatgaactggatgcgccaggcccctggacaaaggcttgagtggatgggatggatcaacgctggcaatggtaacacaaaatattcacagaagctccagggcagagtcaccattaccagggacacatcttcgagcacagcctacatgcagctgagcagcctgagatctgaggacacggccgtgtattactgtgcgagagacacagagtgaaaacccacatcctgagagtgtcagaaaccccagggaggaagcagctgtactggcatggaggaaatgacaaagattattagattgaagactttctcagaaaatgacattaagtcattaaggaaaagaaacaatataaatgtgtacttgagaaattt

SEQ ID NO: 13382 - DNA, 2300 bp, Homo sapien
gctgctgcttctcatcccaggtgggacacatgagccctccccatgcccaggatggagctgtttcaatcacagcaggatgggaatgtgtcttctctatgggggcttttgaagcacagctctcctgttcctgagatttgagatttataaagacaagtcccacagagtggacctgcacaaataagacagtacaggatccccaggagagacatcccatatgagaagggacaggctggtcccatcactgacactcgtcctcagaaaccctgaccagctactgaccttcccaggtcccctgttcctggaacggttcctgtgtctgctcctgaaaagatgcccatcaagagtcccaagggttctgcccccttccttgatgtgcctctgggagtggggctggctgggctgtgggtctgctgtgaccctctccacaggtcagcagttcagtgcaggctgcaccaactcggtggggctgggctgtggctgaccctcctgggggagcctggactcttcttaggggtatctgcaggatcccaggttctgggagaacagggaagccacagtgtgtgcagggccccatctccagtaaagtgtttgctgttgttctgcttgacaagggcatatccccaggcctagaggcactatgggcacacagccaatgcgctagacacagggagtaagacacagttccctctcattactgtgaggactctagacacagtgtgtgtgtgtgtgtgtgtgtgtgtgtgtgtgtgtgtgtgtccattactgtggggactctaaccacccgtgtgtgtgtgtgtgtgtgtgtgtgtgtgtgtgtgtattaggagtttcgcagtgggctctgagacccatgattttgtaggtttagaaattatctgatgagatgttcatccaaaggaaccgacaagagattaggtgttctcccaaagcccctgggagctcctggactcattgtgagtgtggactgatccagtgcttccggagctccagagaaggggctccctggtggtttcatagaatccttgtttggggtgtttctgcagagttcactggctttcctacaaccaatttactattgcaagcgatggtgtcagcaggacatggtgtcacgtgtcactaaagaagcattctgagccaggacacagccacttcatacagggaggaaaatgctctgggagcccagacaggagcctctctgcagtgcaagggctgggctgcagggggcgctcaaggcccacccagcacaggccccagccccagagcaggtgcacaggaggctggggagggattcctctcaagatctgtgtcattcttctaaaaaaatctaaaataagtatttgacaaagactgctgaagattccataaatatcctattcaattgcaagaatttatcaatttacactggagatttctaaccctgctacataccttaatagtaagcatctggagatcaattaagcttttattttatataaataagtgcaacttttggagaaacacactcatcccccaaataacacattcatgtattaaagcctagaaatgctttaaattacctctgagctattcaagtgtgggttcccagtgaagtcctgttctagggaaaattgttctccagtgttctccactgttctggagaaaattgttctccagaagctctgtcaacatacagcttagggatgtggcagggcacacatggcctctaaggggattatagcttgaacccttagcatcctcctgttgggtaatccatgtgtcatctctccattctttctcatgctgtgttaggtatgaaatagcatcgctcatgaatatgcaaataactgatatgactatagatatctttgtgccctgagagcatcacccaacaaccacatccctcctcagaagaagcccccagagcacagctcctcaccatggactggacctggaggatcctctttttggtggcagcagccacaggtaaggggctgccaaatcccagtgaggaggaagggattgaggccagtcaagggggcttccatccactcctgtgtcttctctacaggtgcccactcccaggtccaactggtgtagtctggagctgaggtgaagaagcctggggcctcagtgaaggtctcctgcaaggcttctggatacaccttcaccgactactttatgaactggatgcgccaggcccctggacaaaggcttgagtggatgggatggatcaacgctggcaatggtaacacaaaatattcacagaagctccagggcagagtcaccattaccagggacacatcttcgagcacagcctacat

SEQ ID NO: 13383 - DNA, 2300 bp, Homo sapien
tccctggttctgtgtacagtgtcacaatagtggtgacattgacagctggtgcctgcactttccaggccaagaaatttgaaagaagcaagtcacaggaccagcttggatttggggcaaacagacacatttcactctgtggggaagtgctgggaagcagccttgggtcctcctcagctcacgtgtggctgctgcttctcatcccaggtgggacacatgagccctccccatgcccaggatggagctgtttcaatcacagcaggatgggaatgtgtcttctctatgggggcttttgaagcacagctctcctgttcctgagatttgagatttataaagacaagtcccacagagtggacctgcacaaataagacagtacaggatccccaggagagacatcccatatgagaagggacaggctggtcccatcactgacactcgtcctcagaaaccctgaccagctactgaccttcccaggtcccctgttcctggaacggttcctgtgtctgctcctgaaaagatgcccatcaagagtcccaagggttctgcccccttccttgatgtgcctctgggagtggggctggctgggctgtgggtctgctgtgaccctctccacaggtcagcagttcagtgcaggctgcaccaactcggtggggctgggctgtggctgaccctcctgggggagcctggactcttcttaggggtatctgcaggatcccaggttctgggagaacagggaagccacagtgtgtgcagggccccatctccagtaaagtgtttgctgttgttctgcttgacaagggcatatccccaggcctagaggcactatgggcacacagccaatgcgctagacacagggagtaagacacagttccctctcattactgtgaggactctagacacagtgtgtgtgtgtgtgtgtgtgtgtgtgtgtgtgtgtgtgtgtccattactgtggggactctaaccacccgtgtgtgtgtgtgtgtgtgtgtgtgtgtgtgtgtgtattaggagtttcgcagtgggctctgagacccatgattttgtaggtttagaaattatctgatgagatgttcatccaaaggaaccgacaagagattaggtgttctcccaaagcccctgggagctcctggactcattgtgagtgtggactgatccagtgcttccggagctccagagaaggggctccctggtggtttcatagaatccttgtttggggtgtttctgcagagttcactggctttcctacaaccaatttactattgcaagcgatggtgtcagcaggacatggtgtcacgtgtcactaaagaagcattctgagccaggacacagccacttcatacagggaggaaaatgctctgggagcccagacaggagcctctctgcagtgcaagggctgggctgcagggggcgctcaaggcccacccagcacaggccccagccccagagcaggtgcacaggaggctggggagggattcctctcaagatctgtgtcattcttctaaaaaaatctaaaataagtatttgacaaagactgctgaagattccataaatatcctattcaattgcaagaatttatcaatttacactggagatttctaaccctgctacataccttaatagtaagcatctggagatcaattaagcttttattttatataaataagtgcaacttttggagaaacacactcatcccccaaataacacattcatgtattaaagcctagaaatgctttaaattacctctgagctattcaagtgtgggttcccagtgaagtcctgttctagggaaaattgttctccagtgttctccactgttctggagaaaattgttctccagaagctctgtcaacatacagcttagggatgtggcagggcacacatggcctctaaggggattatagcttgaacccttagcatcctcctgttgggtaatccatgtgtcatctctccattctttctcatgctgtgttaggtatgaaatagcatcgctcatgaatatgcaaataactgatatgactatagatatctttgtgccctgagagcatcacccaacaaccacatccctcctcagaagaagcccccagagcacagctcctcaccatggactggacctggaggatcctctttttggtggcagcagccacaggtaaggggctgccaaatcccagtgaggaggaagggattgaggccagtcaagggggcttccatccactcctgtgtcttctctacaggtgcccactcccaggtccaactggtgtagtctggagctgaggtgaagaagcctggggcctcagtgaagg

SEQ ID NO: 13384 - DNA, 2300 bp, Homo sapien
tgagaacacttggacacaggaaggggaacatcacacaccgggacctgtcgtggggtgggggtagtggggagggataacattagaatatatacctaatgtaaatgacgagttaattggtgcagcacaccaacatggcacatgtatacatatgtaacaaacctgcacgttgtgcacacgtaccctagaacttaaggtataataataaaaaaaaataagcctaggcctagtgtcagtgtaggaggcaatttttataggctagaaactaagaagaaagaaaaatatgtgttattggaatagtagatacaaagttggttttattctgagtgtatttgaacctgcaggtattcttagatgtaacattcaactgcaagagctcaaggacgaaacaaggcactcccaaaatcctacaagtttttgtattcatttcgtgtccactgactcaggaaatgtgaagtttcagagaaggtgttccactctgtgtcacagaatatttgctttgggtctccctgtagagttaaataggtttaataaggctcttcaattcttaaaagacatggtgtcagcagtacattgtgtcactgaaggagtattcagtacattgtgttactgaaggagtattctaaaccaggacacacccacttcatgctgagctagagactgtggggtaaaatgcctgtgagctacaacagaaacctcatggcaaggcaagggctcggctggagggggcacttgggagccaccaagcacaagttccagccccagagcaggtgcacaggaggccggggaggaggttttctctcagggccttggtcttcctttgtcaggaaaaaaacaatctaaaataactgttcaagaagtagctgacgtgctttaaatattctagtacatccaaaccattcatataacttaagataatgagagctattttttaaagtgagtttctaggactgtaatatcttaatagtgagaatatgaaggatgggcatgtttttactaattcaatgggtaccgattagttgaagaaactatattcctatgaataagaaattcagatttcagtgttaagtaatgttgcctacattgtgtgaatgacagggcagtgatggatctgagggtgtggcaggtgcacagaccaagtgagtcaaaaatcaatatgtaaagatacagatctatggatatgaactggaagtatgtaaatactttacaaaaatctaataaatggagttgaaaagtaacccaaaattattcaaaacacaaattcattgacaattattttgagagtagagagttcataaagaacttcaaactcctgttacctcttctgattcccattgttcctgagatgagaaaatcagctgtaattatgcatcacagggcaaatacgtaaaacaagagcgtttctattgaagatcctgggggatcaggacatgaggcacgtgctggagacactgtctcaggagggcccagtagatctcagagggacatcagcagtcacctttccagagtcaccagtgagctgtgctggtgcctgacaggtccaggatagggccaaggcacgtgctcagtgtcatagacagtgatggtcccaaaaataatccaggcggcctctatactaatcacatgtaggttcacagtgaggagcctgttctgagagggcttattcttcagtgaaaggacctctgtacacaaatgttggtaaatagagcagggcatgcattttctcaagtaagattagggcttagaccatttgcatctcactcttgtaaggctgatgtgtcatttatcttccctttcttatcatgtatcaggctttgagctatgaaatcgtctgtctcatgaatatgcaaataacctgagatgcactgaggtaaatatggatgtgtctgtgccctaagcacatcatccaacaaccacatgcctcttctgcagaatctccttagagctcagtgcctcaccgtggactggacctggaggaacatcttggtggcagcagctacaggtaagggactcccaagtcccagtgatgagaaggggattgtgtccatttctgaaagatctcatccactactgtatcctccccacaggtgcgcactctcaggaccagttggtgcagtctggggctgaggtgaagaagcctctgtcctcagtgaaggtctccttcaaggcttctggatacaccttcaccaacaactttatgcactgggtgtgacaggcccctggacaaggacttgagtggatgggatggatcaatgctggcaatggtaacacaacatatgcacagaagttccagggcagagtca

SEQ ID NO: 13385 - DNA, 2300 bp, Homo sapien
aactgaggttttatataagtcccctgattcttagaacatgaaggtgtagtattcaagtttggtcccttgaaagcacaatttttgttaaaaaaatttaagaaaattgtatgatttcctcagcaaatacatattgatcatctgttatacagccatgagaagtggttctgttgaacacgtttattttatcagatcccaattctaaaccaggcatagaatggaaaccatgaaggtaggatgaaataacttctgaatgtttgaaaatagtgtacttaaaaataaatatcaggtgtttttgttttgttttttgttttttgtttttgagacagggtctcactctgtcacccaggctggagtgtgatggtgccatctcacctcattgcagccttgacctcccaggctcgggtgatctcccacctcagcctcccaagtagctgggactacaggcacatgccaccatgcccagctaattttttgtattttttgtagagacagggtttcaccatgttgcccaggctggtctagaactcctgggcttaagcgatcttcccacctcagcctcccaaagtgccaggattacaggcatgagccaccatgcctggctgaaaataccaggtttttaagtatcagcactgcctcttcaatcttttctattactatgttgtgctcagtggtattttttattgaattagagcagtgctgttcaatggaaccttctttgaggatggaaatcttttatgtctctgctgtgtgggtatggtattagctgggtatggggcacctgcctatagtcccagctactcaagaggctgaggtgggaggatcacttgagcccaggaggccgagtctgcaggttcgtaccactgcaattcagcctgtgtgacagaatgagactcagtcgcagaataaaatgaaataaggaaataaaaatgtaattgttgaaataagaaactagtggatggattagacacgagaagaaagaattaattgtttaggcgattctctccaaaaagtaagtcagcatgtcacacagagagacatgaggatagatgatagggcagaagttggtgggcttggaggggagaggaagatcagaatgaggtccaaaatgtgtcttagtgaaatcccaggaggagatattaaaattatattagaaagtgaaagaaatagaagttttatttatttatttatttatttattttgagaaggagtctcgctctgtagcccaggctcgagtgcagtggcacgatctgagctcactgcaagctccacctcctgggttcacgccattctcctgcctcagcttcccaagtagctgggactacaggcacccaccaccacgcctggctaattttttgtatttttagtagagatgtggtttcacctttttagtcaggatggtctcaatctcctgacctcatgatccaccagcctcaggctcctaaagtgctggaattatacgcataagccactgcacccggcccaaaagctttgtgtttttacaaatattacacatgtttcttgtttaagaaaaaaagtcttcacaataacgtaggagaataagagaaacatttttccaaaaaagagaagtcattgtgattattttatcttattggaatgttggataatacagtctgcttcagtaatcatcaagcatgctatggattttccattttcataggatctgtatctcggttaaggtaatactggtaatttttgtactctatgaaaaatataggccaaaatcatagaccttgcatagaagctggatcatgaagacagctctggaggaacacacaggtacacacacacagacacacatatatataaagtatacacatatatattttttaaaagcttttaaagcaaaagccggccctgcccctctcccagagttggcggcctctcccctctcttagagtgggtggggacagtggttgcatgggcagctttccttgtgagccaaaggtccctctggacacatgatgcctggccacgccccctttccctttcatctttctcattaaccaatgggcttggagcattaaggccacgcccctattctgccttctactgcatccctggttacgcctcctctggctcagtcgcacagctacctggtaggtgactggaggtgttgatcagtgcttggtgggattttgctgatgtggccccaagcccgcctccctccccaccctgcaatggcagaagaaactcgacaaagtaaattggcagcagccaagagaaaggtaaaaacacaccaggtcacggacccccaacccagccatagatcctctccaacg

SEQ ID NO: 13386 - DNA, 2300 bp, Homo sapien
caccttagcttgccaatatgctgggagtacgggcgtgaactactgctcccggccaagagcttactttggtttgctagcaaggttcttggtatctttttatatttgaggctttcgtgctagtgctgaagtattacactcaccatctgaggtttacaggacttttgttttaatattgaaccgagggaactgtttagttttgcatctttgcaggtatacaaaatgtgcctaccaggactctgctttatatccattgaaaagcaagaagtaatacagtaaaagtttgcctggctacaggctttggaagaatggagtattctggtttaattctattaacttggaaggatgaaggtggaaaaaattcaaaactttaatttcctgttgaatgcaatttgaaaatatagccaatgagtccacttttcttctctagtaagtttggacattcagatctacttggtcttttatcatagaactcctagtgcgcctgagtcttacgttgtgaaaatccttttctaaaactttagatgtaagaggatagaaatgatattggatgagatcaggctggatgagaactgatacctgtagatatattttttagatgaaatctctgattgccacacgttttcttattgaactcataaaaataaaacacactggctggagggtggaagtaggaaggagatttatgtcttttaattgcatgtcattgtttcatattgagacagaacatatagtatccctggctttggacctacagaaggaaacacatttttctacctgctgtatggcagaggttcctgagcacctggagggattattgcagcacggattgctgggccctactgcagagtttctgattcattcgtgtctagggtggggcctgagaatttacatttataagaagttcccaggtgctcctggtccggagactacatgtttgagagccacccttacatactaactgtaaattgtagaactctagaaaaaagcgtagtttggactgggagaagaagcacacaggtaatggagcaaatcatgaaaaagtcaacccttgatcccaggtaacaagcaatacacagtgacataacacaattcttggttttcatgattgcaagtcatagccaagtatcgagtgagaaattcagtttcattttcagggcttagaggccaggtgattctagaaaaatcggatttagtgattaactcatgagagtaggagttatttatgtcctttttctctcccccatcacttagcatttagccttactttagaagggtcctgtatttgctttaaccttgtaaagaactttgagtgcttattaaatggaaagccttgtgtgtgtgtgtgtgtgtgtgtgtgtgtgtgtctgtgcgtgtgtgtgtgtgtgtgtgtatttagagacagagtcacattctgtagcagcccaggctgaagtgcagtggcatgattttggctcactgcaacctctgcctcacaggttcaagggattctcctgcctcagcctcccaagtagctaggattacaggcacctgccaccatgcccagctacttttgtatttttagtagagacaggatttcatcatgttggccaggctggtcttgaactcctgaattcgggtgatccacccgccccagcctcccaaagtgctgggattacaggcatgagccatcacgcctggctcaaagctttgtatttttaaagatattagacatgtttcttgtttgtttgttttttttaaaaaaactaaacgctaatgtaggagaataagagaaagtttttccaaaaaagagaaaacattgtgattatcttattggaatgttggataataaagtctgctttatcaatcatcaagcacactataaaatttccattttaataggacttgtacctcaattgaggtaataaagttttaaagtttttaaagtgaaagccagccccgcccctctcctggagtgggcggggacagcggttgcataggcagctttccttgtgacaacacaggtccttgatgacacgctgctgtctggccacacctccttttcctttcatctttctcattgaccaatgggcttcaagcatgaaggccacacccctattctgcattctagtgcagccctggttacgcctcctctggctcagtcacacagcgacgtagaggtgactggaggtatatacttgtcctcacctggatcatgctgatgtggccccaaccccacctccctacccatccccacctccctacccatccccacctccctacccatccccacctccctacccatccccacctccctacccatc

SEQ ID NO: 13387 - DNA, 2300 bp, Homo sapien
taggatgggggaaggtggaatgggaggtctgggggcccttagcatgggtggtgtgctgggaggtggggggtccaggtgagtgtggggagaggctcatacatgttttcatgtgtgcacacggaagctctagtgctggctgtgccactgactcatggggtagcctcaggcaactcatgtcttctctctggcctgccacctgggacttttaattcctggggtcccttccagcgccacggttctgtggttgtggggcgagggtagggggtcaatcaccaaagtggtcttttatgttcttcattcattcctttctctactgcctctggccatagcataactgatgaggagctgaaggagaaaaatgccaaactacaagaaaaacttcaacttgtagaatctgaaaagtctgagatccagctcaacgtaaaggagctaaaaaggaaactggagagggccaagctcctgctgccacaggtgagcagctgcagccccgggggttgtgggagacccatccagctgggaccatggtctagggatcatgcagggtatggggaggctccagccaagagctggaaaatttgggtccttgttctggtcccgccatagaatcctctagagtgtactaaaaatgtacaaattggggccctgcctggggaatcagaatctcaagagttagggcttaaaaatatttttttaaaggatcatggatgaaaaccattattttatagattacatttatttatttatttatttatttatttatttatttatttgagaagtagtctcactctgtcacccaggccagagtgcagtggcgcaatctcggctcactgcaagctccaccccccggcttcacgccattctcctgcctcagcctcccaagtagctgggactacaggtgcccaccaccacacccggctaatttttttgtatttttagtagagacggggtttcactgtgttaaccaggatggtctcgatctcctgacctcgtgatccgcccacctcggcctcccaaagtgctgggattacaggcgtgagccaccgctcccagcctatagattacatttatgtggctagctcatgattctgcttccttctgaggttcaaaaaaacactttcactattccagcagcagctgcaggcggaggctgaccacctgggtaaggagctgcagagtgtgtcagcaaagctccaagcccaggtggaagagaacgagttgtggaaccgcctgaaccagcaacaggaggagaagatgtggaggcaggaggagaagatacaggagtgggaggagaagatacaggagcaggaggagaagatacgggagcaggaggagaagatacgggagcaggaggagaagatgcggaggcaggaggagatgatgtgggagaaggaggagaagatgcggaggcaggaggagatgatgtgggagaaggaggagaagatgcggaggctggaggagatgatgtgggagaaggaggagaagatacgggagctggaagagaagatgcacgagcaggagaagatacgggagcaggaagagaagaggcaggaggaggagaagatacgcgagcaggagaagaggcaggagcaggaggcgaagatgtggaggcaggaggagaagatacgggagcaggaagagaagatacgggagcaggagaaaaagatgtggaggcaggaggagaagattcacgagcaggagaagatacgggaggaggagaagaggcaggagcaggaggagatgtggaggcaggaggagaagataagggagcaggaggagatatggaggcaaaaggagaagatgcacgagcaggagaagatacggaagcaggaggagaaggtgtggaggcaggaggagaagatgcacgaccaggaggagaagatacgggagcaggaggagaagatgtggaggcaggaggagaagataagggagcaggaggagaagatacgggagcaggaggagaagatacgagagcaggaggagatgatgcaggaacaggaagagaagatgggggagcaggaagagaagatgcaagaacaggagaagatgcggaggcaggaggagaagataagggagcaggaggagaagatacgggagcagaaggagaagatacgagagcaggaggagaagatatgggagcaggaggagaagatacgagagcaggaggagatgatgcaggaacaggaagagaagatgtgggagcaggaggagaagatgtgtgagcaggaagagaagatgcaagaacaggaggagaagatgcggaggcaggaggagaagatgtgggagcaggaagtgaggctgcg

SEQ ID NO: 13388 - DNA, 2300 bp, Homo sapien
ccacagcacctctggccaggtgaggttatgatgtccccccagcacctctggccaggtgtggttatgaagtcctcctggcacctctggccaggtgtggttatgaagtccccccagcacctctggccaggtggggttatgaaatctcccccagcacctatggccagctgtggttatgaaatcccccccagcacctctggccaggtgacatttatgaagtcaccaccagcacctctggccaggtggggttatgaagttccccccgccccccagcacctccggccaggtggggttatgatgtccccccagcatctctggccaggtgggattatgatatccccctagcacctctggccaggtgaggttaagatgtccccccagcacctctggccaggttgggttatgaaatccccccagcacctctggccaggtgacatttatgaagtcacccccagcacctctggccgggtggggttatgaagttccccccgctccccagcacctccggccagctggggttatgatggccccacagcacctctggccaagtggggttatgatgtccccccagcatctctggccaggtgggattatgataccccccagcacctctggccaggtgaggttatgatgtccccccagcacctctggccaggtggggttatgaaatcccccccagcacctctggccaggtgacatttatgaagtcacccccagcacctctggccaggtggggttaagaagttccccccgccccccagcacctccggccagctggggttatgatggccccacaacacctctggccaggtggggttatgatgtccccccagcatctctggccaggtcagattatgataccccccagcacctctggccaggtgaggttatgatgtccccccagcacccctggtcaggtggggttatgaaatcccccccagcacctctggccaggtgacatttatgaagtcacccccagcacctctggccaggtggggttacgaagttccccccgccccccagcacctccggccaggtggggttatgatggccccacagcacctctggccaggtggggttatgatggccccccagcatctctggccaggtgggattatgataccccctagcacctctggccaggtgaggttatgatgtccccccagcacctctggccaggtggggttatgaagttccccccgccccccggcacctccggccagctggggttatgatgtccccccagaatctctggccaggtgggattatgatatccccctagcacctctggccaggtgaggttaagatgtccccccagcacctctggccaggttgggttatgatggccccacagcacctctggccaggtgggattatgataccccctagcacctctgagcaggtgaggttatgatgtccccccagcacctctgtccaggtgtggttatgaagtcctcccggcacctctggctaggtgtggttatgaagtccccccagcacctctggctaggtggggttatgaaatctcccccaccacctctggccaggtgacatttatgaagttccccccctcagcacctctggccaggtggggtcatgaagtcccccaagccgcccctgaggaacaggcgaggcaagggccagcaggcactactagcgggtcgggacagctgcttcgctgatgctggttgtgtagcatggatgtgtgtagcgtgactgtgttgtgtggatggggcacggaaatccgcagagaccatcactggagggagaagctgcagggccgggagggttcagcaggtaagcagttcagggttcctggaaaggcgggtcccaatgcatttgctgaccgggcacctaacgggctgctctcaaaatcactgactgtcaccgaggccggccagagacccttatgtatctgattcacgatgacaccagctaactctgagtacagtagaaaacgtaccgtcgggcaaccagaaaatgcgcactccagtccccaccacgggacagcgccaggcagtaccctccacagccggagctcgaactgtcgcgagaatagcggtcggcttggaagtcgcccggcgcgggagcgcgaactctcgcgagaatgccgccagctccggaggcgactgcggcaggagcccgagctctcgcgcgacaggcaccaattcgttagacgcgcgctgcaggagcgcggaacatggcgcggcacgggccaccgtggagtcggttggacgcgcagcaggagcgcgacgtgcgggagctcgtccggggtgtcgccggcctccaggacgaggcagacc

SEQ ID NO: 13389 - DNA, 2300 bp, Homo sapien
aatacacatcttgttttccagaaaacaacattacatagttgtaaacatttgcctaaatcagcaataaacgtaacaattgtaattgttctgaaagtgtttctcagagtattctgattgacatgaaaatatagggggcatttaagccatttattatgtatacttgttagttgattgctacttaagttagcactaaattgcagatattctttgagataagttatttacttacttagaaacctttctattgacatttatgtttgctgtctcatagggaccaacacttgtacagcagtgatccattgtatgttccagatgacagggttttggttactgagactcaggttattcgggaaaccctatggtaagaaatgttcatttaattaatagtctttatgagacttgattactgagaagcaaaaacttttattaaaggaaacttttcaagcattttcacatgcaaactagaaaaggtccattaggtgtgaagttcggaccagatttgactgtggagattgagagagtttgatataattacttcattttcattttaaataatttagcatatgatttacttaggttagcccatctcttctttaacacctgagttcaaagcaagatttgctactgattttttttttttttttttgagacggagtctcactctgttgctcaggctggagtgcagtagctctatctcagctcactgcaagcttcacctcctgggttcacgccattctcctgcctcagcctcccgagtagctgggactacaggaacccaccaccaagcccggctaatttttacttttttagtagagacggggtttcaccatgttagccaggatggtctagatctcctgacctcatgatccacccaccttggcctcccaaagtgctgggattacaggcgtgagccaccgcgccggtagctactgactattcttaataggtggagtatatcaatgagggcctgtgcccgtacctggaagccaggaatctaatgcggcacatggtgctgttactactgaaattccaagtcctggtgctctcaccataaagtatgatattgacatgctcgcattcttagaaataggaagatctctttgggtcgtcaagtatataggggagatgctttgacaacatgttttagacttctctaagatgatgttgaaatatcttgagtcttagggtaatcagatgaaaagattgatgtcttccattttcttattatctgacctttttgcccctaattctgaatatttaataaaaatttcctgaggtggggcatggtggttcacacctgtaatcccagtgctgtgggaggccaaggcaggtggatcacttgagctcaggagttcgagaccagcctgggcaacatggtgaaaccccgtatctacaaaaaatgcaaaaattagccaggcatggtgacatgcacctgtagtcccaactgctggagaggctgaggctgcagaatcacttgaacccaggaggttgtggctccagtgagctgtgatcatgctgctgcactccagcctgggtgggtgacaaagtgagtccctgtcaaaaaaaaaaaaaaatgtcctgggcatactgtcatgaatatttttctagacttaaagtacactcgtctttttttaatctcatttcaggttactttcaggagtgaaaaagctctttatatttcagttgatagatgggaaggtaactgtgagaaacaatattatagtaactcatttaacacatgtaagttatttgtatttatggtaatttaagaaataggatttatgtaaactagtaatataattttagaacattttacaatattaaaattgctattgaactcgttcttgcttcctcacatgcaaaaaaaagctaacttaaaaatatttaatatccaaaaagaaaaattgagttgtgcatctttatagtacgtagaggattccttaatattgtttggaacatatttaatttcaatttgcattttctgctttttatttgtcattctgtattgtgaaagttatatactgtaattttgttttgctttaagtacatttacttatgtatgtttttaaaaatataagccataattctctagtctgttgaaattattgttcactttttcctttgtgtataaaattataaatattaatcatattattactttgtcttctactaaacatactgtttaaaacaattgcaaaagaagtattttacagcgagagggaaatgaatttgaatgtttacagaagaccacctttgaataattgcagtttgcttgtgttgtagagctgtttacgatctgt

SEQ ID NO: 13390 - DNA, 2300 bp, Homo sapien
aattagttaaattaaaattttttaaaatatacagttaagataaattttatgttatatattttatattgtattttaaaaaatacaaatctaggccatgcatagtggctcacgcctgtagtcccagctacatatgagtctgaggtgagaggatcacttgagcccaggaatttgagaccagcccgggcaacatactgagaccctgtctctacaaaaaatttttaaagtagccaggtgtgctgacaccaggaattcgagaccagcctggccaacatggtgaaaccccgtctctactaaaaatacaaacattagcctagtgtggtggcgaacacctgtcatcccagctactcaggaggctgaggcaggagaattgcttgaacccgggaggatgcagtgagccgagatcgcaccactacactccagcctgggcaacagagcaagactctgtctcaaaaaaggtagccagctctggaggcacatgcctatggtcccaggtactcgagaggctaaggcaggaagatggcttgagtgtggaaggtcaaggctgcagtgagccatgtttgtgccactgcactccagcttgggtaacagagcaagaccctgtctcaaacaatatatagatttaaaaataaaaatctaactagaggctgtaatttagaatgctacagtcttagttgggtatgtacattaggtgtattttctagtttgttggtataactttttttcacaccaatttaataccatatttctttttttcttttttttttttttttttttttgagacgtagtcttgctctgttgccaggctggagtgcagtcgcacgatcttggctcactgcaacctccacctcccaggttcaagtgattcttctgcctcagccccctgagtagctgggactacaggcgcacatcaccatgcccggctaattttttggggtttttttttgttttttgtttgagatggagtctcgccctgtcgcccaggctggagtgcagtgtcatgatcttggctcactgcaacctctgcctcctgggttcaaactattctcctgccttagcctcctgagtacctgggattacaggcgcccaccaccatgcccatctaatttttgtatttttaatagagatggggtttcaccatgttggccaggctggtctcgagctcctgacctcctgatccgcctacctcggccttccaaagtgctgggattacaggcatgagccaccacacccagctgtatttttttttaatagagatggggtttcaccatattggccaggctggtctcaaactcctgcccttgtgatctgcccacctcagcctcccaaagtgctggggttacaggcgtgagccaccatgcccagccaatttcctcatccttaatggatgctttgctagtaataggatttagatagggaaaccttgttcgcttgcctgggctatctcaggatacacctgctgcctctgtgtcactttcactctcaagtttcccagtctggactacaaacaatatgatcatcccatatttaggtgagtttttcttttttcttttttttttctttttgttttgagacagtgtcactctgttgccaggctggagtgtagtggcacgatcttggctcattgcagcctccacctgccagattcaagcaattctcctccctcagcctcccaagtagccaggactacaggcgcgtgtcaccatgcccagctaatttttgtatttttagtagagagggggtttcaccatgttggccaggatggtctcgatttcttacctcaggtgatccgcccacctcggtctcccaaagtgctgggatcacaggcgtgagccaccacgcccggcatttaggtgagtttttcataaggattttatagtgtatgtttttggatttttaatttctttgtgccccaaaaaacatagaaatccgatcacttttttaaaggcatttcagaaatgtttaaacctccttttatcctagtgaccagggaaccctgagagctgaccgtgcacactctctgcctcaggtctccctccttttctctctctgggtggaaacggtgcggccttacctgcagacggtggacgagtggatcgtgcacgggcacctgtgggatggcgccagggagttcatcatccagaggtgagctgcagcagagcacaaggtcactgggggctggcatcaccagtttcctccccatgaaaatcaaatgctttcgttagtttcagacagtactgagaaagcacagttcacatcacagaacttgtcgtcatcataggcaagttctatctcatttttac

SEQ ID NO: 13391 - DNA, 2300 bp, Homo sapien
tgccccttgagttgaattctactttgatattaatataatcactccacctttctgattagcatgtccttttgcatctttttaatttcagcctctttgtgtccttatatttaaattatgtctttttttttttttttttttgagaccaggtttcactcttgttgcttaggctggagttcaatggcgcaatctcagctaactgcaacctctgcctcccgggttcaagcgattctcctgcctcagtctcctgagtagctgggattataggcatgtgccaccacacccagctaattttgtatttttagtaaagacggggttttgccatgtgggtcaggctcgtcttgaactcctgacctcagttgatccacccgcgttggcctccgaaagtgctgggattaacaggcatgagtcactgtgcccggccaaaattatgtcttcttaaaacagaatatatttgggtctcgtttttaatccaatgtgacaatttctgtgttttaatccatttacagttagtaaacggattacatgtttagtccatttacattcaatgtgattactaatgtggttgaagtctaactgcttgctctttgtctttgccttatgtgctttttgctccttccttcctgctttcttttggatcaagcatatttttgtattctattttatctcttttcttggatttttagctgtattattttttattaattgctctagggattacaatattttattattttaagacggagtcttgctctgtcgcccaggccggagtgcagcgacacgatcttggctcactgcaacctccacttcctgggttcaagcgattctcctgcctcggcctcccgagtagctgggattacaagcccacaccaccatgcccgactaatttttgtatttttagtagagacggggtcttcaccatgttggccagtgtggtctcgaacgcctgacctcaggtgatccgcccgcctcggactcccaaaatgctgcgattacaggcgtgagccactgcgctcggccgggattacaatattttaaattatcacagtataacttgaatttgggttctatcatgtcatctacaatgtaaaaacctttggaatctaattttgagactccaccctaggcacagaaaaggagtaatctgctgatttgaaaatgtgtggactgggaaccagaatgttatccaaagcccctgttttgcaggaatgtgagaaagtgatatccgaatattgagtcaactggtagattgtctcaatccgctggtcaggattcatttgctgctttttgccttaccgcagagcacaagcgggggtaaccaaaccttcataatctagagaccagactagaatatctgatgcccatccttactgttctccgtaagaaccaggggtcgcggatgaatggggagtgaggttgctgcggctgagcggggcgtttagggcagttttcctaaacacgcctgtgaccagctgactccactcagcgtttccgtgtgaggtatgtttcttcaccggcctttcaagattgttttttggcacgagctcaaatcaggttttcttccgtccgccgttcccgcaggtctgcgcacggatttgtccctggttcccgcaggcaatggggccgcaggggccggccgggggggtccccagcgggctctgcgcgccgacctgcagctgggacccgcgcctggaaccctcccgacgagcgcaggtgagcgcctcctgccaagtggggcggcgccacacgggcgtcctgggtgtccccctgagctccttccgcagctcaggccaacccccgccctgacccggtggagccccgggacagggtgcggaccccgttccttcgcgctccgaaccggacggacccgcaggaggaccccacgcccgctccgctccgaccccgccgtcccgcgcaggctgcggtgacccaggccggcaggtagccaggggctctctgcctgggaggacaccttcggcggctggcgtggggaaaggggccgcccggccggggatgccccgccaggaggagggagcggccggggccgcggccgggagggaggagcgccgggaggaagaggccgagccgggagagcccccgccccgggaggaaggggaggaggccgagtgtttcctggcgcattcccggccagcccgagtgactcactcggccaaggaaactcccagggcccgcccaggacccccaagccgccgcggacgcaggtgaggaaccccgctcgcccgcgcctgccctgcggcctccgcggggtccgggtccccctcggaacctgggccggccagggc

SEQ ID NO: 13392 - DNA, 2300 bp, Homo sapien
gtgctggctagtagcaccggcagaacagtttgtatgccgttccaaatacgtgactttaattatgctgttggatatttgcactgtggcagccacttataaaggctggtcagatacaactgaggctccattccaagggcagtggacactggctttgcagtgaccaggccagacctggtgctgctgcctgggaatgggggcttcttagacacagaaggagactagaggctgtgctggatgctggtgctgggggaaaatccctgtgggacgtggcattcatgggaggacaaaaggagggccggaaaaaatcccagggtgcaggcggctggagtcacgcattgcctttgttctctagcagtggggtgcagggtccgctggtggcagttagagacggagcaaagtaaatgcacttgaaagagctttgggaggtggaactgtgaggagtcagagaacaagatgggatgagacatgagctctgatgtgcctgtgtggagtggacaccgccagggcccccacgctggctctgtaggtggcacccaggccagaccctgcacccacgctgccagggctgagaccttggagacttggatttagagctgattactccaagtccgcctaacagggtgaggcagaagctgtgcagattcgcatctatggaagatgcacggacggagagcccttggaagcgggccgggcccaggccgtgtgcgtgcggtgacagctgcttggcatcacacaccaaggcggatgtgggagggctgcctatgatcatgaaaaacctgaaatatgaaaatgtgaagaataggagagaacagcagtttgccacagcagggccctggccagcactccgcacggtgctctgatgacttgagaaattttgtggaagctgggagaaagaaagagcttacaaagcagtttgtatgacagtatcttgtttttgtaagggacagtgggatgattgatgataggttttctttttccttttccatgttttctgattaatcagcatcaaacattgctatttttgattgtagtaaaatatgcatgcataacataaactttacccccatgtttaccttttttttttttttttgagatggagtctcacctcactctgtcgctggggttggagtgcagtggtgcgatctcagctcactgcaacctccgcctcctgggttcaagtgattctcctgcctcagcctcctgagtagctgggattacaggcacctgtcactatgcccagctaattttttgtatttttagtagagatggcgtttcaccatattgtccaggctggtctcgaactcctgacctcgtgattcgcccgcctcggcctcctgaagtgccaggattataggctggagccaccgcgtcctcccccatcttcaccattttaagtgtacagctcagtggcgttaagtacatttcaccttattctgcaaccaccaccactgtccagctagagcgtttcatctttccaagccgaaactctgtatccactaaacaccaactccccagcccagcacgcagcccctgtcaccactgttctcctttctgtctctgagtttgaccactttaggtaatttatatgagtggaatcatgcggcgttttttcttttgtgactggcgtatttcacttagcctaaggtcgttaaggttcaaccatgttgtaacttgtcagaatttcctttcttttaaggctaacattccactgaccacataaatactgttatttttatacaaagaaagaagtctgcaagcactggcttggaacaagctgcgcatctggcgtttttccatgggttcaacaagctgcgttatctggtgtttttccgtgggttcaacaagctgcgcatctggcgtttttccgtgggttcgacatcagtggtccctgctgtggatcacagctgacgcacgagcagttctcccccgagcctgtctgtggcgcccctccccaccttcctccaccatggggtcatcttggcctctcctgggcagaggccggggaggaaggcgagtccctgtgggtgctgcgcggggtcaggggctgttgccatgtgggatctgtggcttcccagggtgctcggtccgacctgtcttcttgttgacccgcgtggggcccgggcatgactggacacgcccccaggcctctcctggcactatctgggttcaggccgcagaaagggcagactgcgggactctgggctggagtcgcaggacacgggcagcccctatggggccgaagcacgtcctcaggcagcctggcccctccgagcggcatcaccctgaggtgcctgcgtgga

SEQ ID NO: 13393 - DNA, 2300 bp, Homo sapien
aagtaataaagcacactgtcatgacaaaattactgtctggaaacagggaaataatgagccctggcaccatttttctgtcccaggaattcctttggaagctctttgtcatgtaattatgttccatcagagtcttccaggctttttctgtgaatggtagttcactgcgcctttgttgtgaacaatatgggatttggactacaacctcttgtaacttctttttctagtaatatcatgcctgctttcctgagtctttttcttctttcctatttgaattccatcacaggagggtgtgctggggtggatgcatgtgtgtttcgagtcagatgcatccctgtcctccaggtgctcatggtctgatggggagtcagatgcgggcacagttccattgactatggctttggagaagacgttttggggcagggcagctgcagggcacgaacgcgggagggcgtaaggtgctgtgggcgaggaggagcagcccccggcatgtgccaggcagaggaggcttggtgccatccctaagaagggccgtccctgttgctgtgtcccccgcaggtgatcgccatgatcaaaggcctgcaggtgctgatgggcaggatggagagcgtgttcaaccacgccatccggcacaccgtctatgccgcactgcaggacttctcccaggtgacccttagggagccgctgcggcaggccatcaagaagaagaagaacgtcatccagaggtcagccttccccacgccctgtgcccgctgtgcccacacgtcctcggatgaacttggattcaaacaacaggagcgttaaattctcaaaaatgatttcaatatatttatcttcaaccttcagatgccctcttggtgaattacctctaaaagtaatgcatgggtccaattattaacccaaacaatggacagtaagtcagctgccgagtgtctagggagtctgaggaccccgggacaaggtgcatttatcccaggctcgcggtgcctgtggttcatgcatggtgccttatgggggtctctgcacggtggagccctgttggtgatgaggctgtgttccaaaccagtcgagagacatggccaggctctggtcatgtgggtgacttcacattcctgttggttactggggacagccagctgcgggcaggcggggcccagctctgctccgtgcggaggctgtgttctgccctctccctgcccacagcatgactcagagccacctcactgctgccctgggctaacagatgcgaactggagctcagggcagtcttctgggggtagtaatactctccagaaggcagactcctttttaactttcctgttgagctggtccattaccacatccctccatggcccccagagtaatttgtattttcatgggggctgttctgagagccttgtagttgggtgaggagatggtgtgattgtgaggctggaggtctcggcctctgggccttgctgatcacttggtggggtgttcagtgtcctgcaggccatcaggaagaccgtgtgtgactgggagacggggcatgagcccttcaatgacccagccttgcggggcgagaaggaccccaagagcggcttcgacataaaagtaccacgccgcgccgtgggaccctccagcactcaggttctcgtcccttgagccccgcctgcaccctctccctggggggacccaccctgagctgtgagcgggtggggctggtgaggcccgggttaaatgaggtcctcgctgcctgctcaggcagagaaagtggcgcctgtggtttctgctgctcctctgtttcccacccaagtgagttgggagcgtgaggagacgtgccttgattgtcagatgtgtcatgtgcactaaaaaggagtctgactccatttcaactcccatcccaaaaatgtgggcacaagtccacgtgtctgtattcattctgtgtttcttgatgggtgtttgaatgtctgtataatttttacgttgggtctgcaaatgactgtagatggggcgtgggaaactgtgaggtgctgcttgcgtgtgtcatggtcctaagctgcccactgtcctctctcctggtgtgttcaggcctccccgaggtgcttctcacgactttcacacccggtttaatccacaccgctgcgtctgtcctccgtcctggggctggtcttctccctcatctctgccggaggcttttaatctcttctgccactcttctggaaagtcaccagcaatgcacgctgctggctctgcaggagggtcagggggacggccctcggcctgtgcgtggtgccagccaccctccctgcctccctctgcgt

SEQ ID NO: 13394 - DNA, 2300 bp, Homo sapien
ggcactagaaccagtcacgttcctactttgcatgggtgctggctgggacccggggactcagcctggaccagggagatggatgaacctggaccttccccaggccttcgtagtgcaggccctgtgaggtggccatgcccgtgagctgccttgcgggagccctgtggcctggccttttgtgtgacacagcctctgacccagatgaagtggggaaaggaagtattgattgaacagctttgttctggggatcaggactgtggacctagatggaagggcagtctttcaaaatataaagttcatggaagggaaagtgtttggaaaagggtgtgtctcatggtgagcgactggggagccgcccagccggtctgtcttctgagcaccgtgagtgggaagcccctgagttccttgtgcgtcagtcctcacacatcccttgtggtgcccaggagatggtaagggcagtcaccttccactctctgtggctgtggcatggccatgccatttgtgtgggcagagcctctgatggctcgttgcacagcattggggtggcgtgaggagctggaaccagcttggaggcctccttcaggcatgggcctccttgcccctggccatggcctttgtccagatatgaggtagtgggagacgggccttcaaccatgggccatgctggacatgctcctggtgagctgtgggatccaggaccttcacctttgttcttttttttttttttttttttttaatgctgtctatgtacttccgttggtgtaattttttcttttttttctttctttcttttttttttttttttttttttttgagacagagccttgctctgttacccaggctggagtgcagtggcacaatctcagctcattgcaacctatgcctcccgggttcaagcaattctccggcctcagcatcccaagtagctgggactacaggcacccaccaccacgcccggctaatttttgtatttttagtagagatgagtttcatcatgttagccaggctggtctcgaactcctgacctcaagtgatccgcccacctcggcctcccaaagtgctgggattacaggcatgagtcaccgcgcccagtccacctttgttcttttccagtcagttcattctttttttttttccccccaacagagacaaggtcttgctctattgcccaggctggagtgcagtggtgcaaagacagctcactgcagcttcaacctcccaggctcaggtgatcctcctgcctcagcctcctgagtagctgggactacaggcatgcgccaccacacctggctaattgttttgtgtttcatggagacggggtcttgctatgttgtccaacctggtctcaaactcctggcctcatgttatcttcctgcctcatccacctaaagtgctggagttcattctctatcattttttttggacagggtctcactctgtcacacaggctagagtgtagtggcacgatctcagctcactgcagcctcaacctctcaggctcaagtgatccttctacctcagcctcccaagtagctgggactcaggcgtgcgccaccacgcccagatagttttttgtagttttgttagagacagtattgccgtattgcccaggctggtcttgaactcctcacctcaatcaagtgatctgcccacctcagccccacaaagtgctgggattacaggcatgaaccaccaagcctggtccttggagttcattctggaaataagaaaataattttcttttgttaaaaatcctatgtacttgtagtgaaatattttaaagtctgctaagtgagaagatgcaggcaggtggaggcccttgtccgtgtgtggccttcagtgagcgtctgctgtccccaagcatcctcgcagcctggtgggtgtggcggccgcctcaggcgcagccaccacgtgctttcacaggaggactggtgtttgaagtgaaagttgtttttccttacgtgagaggtggaaaatggagttgagtttctgaggtggggcgaggctgtcggagctgcgagtgagtggcagaggctgctggtcacactgctgctgtcctctgcaggtacgtgctctactccctggacctgtacaatgacagcgcccactacgcgctcaccaggttcaacaagcagttcctgtacgacgaaattgaggccgaggtgaggcccctgcagctccatttctgttcatttccttcaattaaatctcctttctctttttgttttctcccaagtattcaactttctttaaaatataagacagtataaaccacgaagcaagcatgtgggagcaagcccttc

SEQ ID NO: 13395 - DNA, 2300 bp, Homo sapien
cacccaaggagctctgggtctgagaactggttgaggagccatgaatttcttttatgatgattcaagttaggctggtattggtcggcctagggcttttccctttatccagatcaatgagacttccgaaggccgatcgtttgtgccagccctggggataccacagtcctttagtcaacactggcacccctgtgccaacgctggcacccctgtgagtcaggcaatttgagtacacatgagttgtgctgcccgccacctggcaccattggagtcaaggagcccaggctggtggcctacagagaataatttagacagagctcttcaaagatgcctgagatgagaacaggtttcagggagctaaaacagtaggccctgctgactctggaattgaataaatcaaaattccctcctaagacaaagctgcccatgggagaagctgctgggaatagcatgtaagctggtaagggttaggatcatggcggaggggagcatgagaggcaggtctcagaaggcttgagccagtgctgttactcttggccctgaccaacccctcttcctcttcagaagcatgagagagcttatttcacttccagtcgagccacaggtaaagatcatggtccaatcccctttagacgtattacactaaaaaagaaaatgtaagtgcacagcagtgtccctacagacagtggaggcacgtcagacagacacccacggaccatggaaactgtaacttcatctttcacagtgagctaaaagaaatgaagaaagtagtagttgctggccgggcgctgtggctcacggctgtaatcccagcactttgggaggacgaggcgggcggatcacgaggtcaggagatcgagaccatcctggctaacatggtgaaaccccgtctctactaaaaatacaaaaaattagccaggcttgatggcggacgcctgtagtcccagctactcaggaggctgaggcaggagaatggcgtgaacccgggaggcggaggttgcagtgagccgagattgtgccactgcactccagcctgggcaacagagcgagactccgtctcaaaaaaaaaaaaaaaaaaaaatagtagttgctgtgaaagaataatataaatgagaatttttagaaatccagaaataggctgggcacggtggctcacacctgtaatcccagcacttttggaggctgaggtgggtggattgcctgaggtcaggagttcaagaccaggctggccaacgtggtgaaaccccatctctactaaaaatacaaaaaattagccgggcgtggtggcacatgcctgtaatctcagctacttgggaggctggggcaggagaattgcttgaacccaggaggcagaggttgcagtgagccaagattgtaccattgcactccagcctaggcaacagagcaagactctgtctcaaagaaaaaaaaaaataaatcgagaaataaggttattggaaaaaagaaagttttgaaaagagaaaaggccgggcacagtggctcatgcctgtaatcccagcactttgggagactgaggcaggcagatcacgaggtcaggagatcaagaccatcctggctaacatggtgaaaccccgtctctactaaaaataaaaaaattagccgggtgtggtggcgggcacctgtagtcccagcttactcgggaggctgaggcaggagaatggcaggaacccgggagacagaggttgcagtgagccgagatcgttccactgtactacagcctgggtgacagagcgagactccgtctcaaaacaaaaacaaaaaaaaaaacagaaataagaatgaaggctgggcactcggtggctcgctcctataattccagcactttgggaggccaaggtggatggatcacgaggtcaggagatcgagaccatcctggccaccatggtaaaccccgtctctactaaaaaatacaataaattaaccaggcatggtggcacacgcttgtagtcccagctactcgggatgctgaggcaggggaatcgcttgaacccaggagtttttgaggctctgtctcaaaaaaaaaaaaaaggaatgaaaagagggaacatttttaaaatcaaaaagaaattaaagcagaaaaaggatttgagaggaaatgatgttctcagatgatcatcatcatggatgatgaagattcagtgtacctgtcatacagcttcctcaagaagaaaaccaaagcaacggaacagggccgactggcatctatttcaagaaaatattgataaaatagaagacaccttgaaagtgtctattaaaagcatacatcatgtatttggtaaaac

SEQ ID NO: 13396 - DNA, 2300 bp, Homo sapien
ggccatgagttgataattatagcagatgatgggtacaggctcattgtgccattttctgctttcgattacatttggaatattcaataaatgaaaagtgaatattgagcagaaaattggttctgccggtttgaattaaaatattaaatgagccagttctgtaaaataattttcaaagagaatctgtatccataatgttaacttaaaaatcttttgttttttaaacaaatgtaaacctttgcaattaccgtttcatacaaaggagcagaatatagtaaaatattttttctactgcagagggggagagacttgatgccaaaatgaaaagactagaatcaaagtacgccccgctgcatcttgtcccactgattgaaagactggggacccctcaggtaacgtgtaccgtgatggctgtggctgttgcaagctgggcatccatgccaggccaggtggcctggttgggagccagactggaaggcatcgtgaagtccagcggctgcgtggctgctcaggcctcaagtgttgcaagtggggtgtgcaccaggactgcttccctgggtggtgggaggattcagatgagctaacacctggaaagagcttagcacatcacctggcacgtaaggcttacacagaagacatcactttcactgtccagcccttcatgaagaaggctttcccataggtgtttaagaacagaagaaattaggccaggaggcaaggtgtcagggtagagttctacagtgatccagctgcttatgctaagtcagggtttctcagccattttggaccagataactctatggtgggggctggggcgccctgtgcatcgtaggatggttagcagcatccctggcctccacactagctgccagtagacccgctccacccaaaacatttttccagggccgggcaccggggttcattcctgtcatcccagcactttgggaggccaagacaggagtttgagaccagcctgggcaacatggcgaaaccccatctctacaaaaaatacaaaaattatccgggtgtggtggcatgcacctggtcgcttgagcctgggaagtcaaggctgcagcgagctgtgattgtgccactgcactccagcctaggcagcagagcaagaccctgtctcaagagaaaagagacatagaggatgtggagtagctggatgcctggaggcccacggcattccacggcttgtcctttctgcagcaaattgccatcgcaagagagggggacctgctgacaaaggagcgcctctgctgcggcctgtccatgtttgaggtcatcctgacacggatccggagctttctggatgaccccatctggcgcgggcctctgcccagcaatggggtcatgcatgtggacgagtgtgtggagtttcacagactgtggagtgccatgcagtttgtctactgcattcccgtggggacacacgagttcacagtcgagtaagtgtgtgctgagagcaggacaaagccccagaggaggggaggagctgtgggggaggggaggcgtgttaggctaacaagcagccagccatgctcaggaagtggaccagaaactcactgagcggcttttaagcctcctgtagtggggattcttacttgatgccaaagagctgactcaggactctagtattcagggagtctctgaacccacggcaattgtatgcacgttgggcgtgcatttttctaggtgggaggtccatagagtcattcatcacagaggggatatgatctaaaaagggacaggaagcagcacaccagaagagcccaaaaaagttatttatcaaaaccagggaacagccacctggctgcccggcattctcttcctggctgtggaaggtgactgtgtaggcacagacagtaatgcagatggcttggtcactgacatctggagacagactgagaaaagacttcataacgtatcactcatctcccattctgtttctgcttcttgttcctaggcagtgctttggtgatgggctacactgggctggctgtatgatcatcgtacttcttgggcagcagcggcgttttgctgtgctggatttctgctaccatctacttaaagtccagaaacatgatggcaaagatgagattattaaaaatgtggtatgtggatgaaaatctcgcaccatctatggaccttttgcaaaagcatactttctttgtgttataagttcttgtttctggcaatgtttttcatcctagtacgtaaggtgccaccaacagaaactttcttttcgttcccaaaatgaatctaaatataattggccagtaaagcagtctggcagagaa

SEQ ID NO: 13397 - DNA, 2300 bp, Homo sapien
tagtagagagtatcctggataaaaagatatttgagacattgcagccaaattccttgattgaattttaacagtaaccatatttaaaagacattttgggaattaaagaagaaagagtttaacaagagaagaaaaaggcaaattgtagagtgtaaatgaagataattgtaatatgtttaaccaataaaagatttacatctgaaatatataaagaattaccttaaatcaattagagaaaacaggataaactttaacagctacttccctaaaagatttcatagggttaataaacaaatgaaaatgggaaatgcaaattgaaggcataacagaatcatcccatactcctaacaaagatcagcagggagaatgtggagcaaagggagctctcatacgctgctaaatgaaaattggcataacttttggaaaaagcagtagccaagagggatccttttgtgagatcatgcctctgccctgtgtaggattcctcagtagcttttcaatttagataattccttagtgggacttaatttcccagtgttctaaaatttcttatctgacagcccatatctaatgccatgacacatagtaggataccttctttcatcaccagcactttattcttttccctcactgtttttcttcataacacttttaacctcttggcacatgtgcttggtttgtctgtcttccctcactaaaagttttatgagaggctgggcgtggtggctcacgcctgtaatcccagcactttgggaggctgaggcgggtggatcaccttaggtcaggagttcaagaccagcctgaccaacatggtgaaaccctgtctctactaaaaatacaaaaatcagccgggtgtggtggcgggtatgtgggcctgtaatcccagctacttgggaggctgaggcaggagaatcgctttaacttgggaggtggaggttgtagtgagccaagatcacgcacgccattgcagtgcagactgggcgacagagcgagactctgtctcaaaaaaaaaaaaaaagttttatcagagcaatgtctttgttttgcaccctgctgtatatcctgattctagaacaggacctggtgtatagcatgatttgcatttttaaaaagagcaagctgggcacggtggctcacgcctataatcccagcactttgggaggctgaggtgggtggatcatttgaggtcaggagttcaagaccagcctggtcaacatggtgaaaccccgtctctactaaaaatataaaaattacctgggcatggtggcgcccgcctgtagtcccagctactcgggaggccgaggcaggagaattgcttgaacccgggaggtggaggttgcagtgagctgagatcgtgccactgcattccagcctgggcgatagagcaagactccatctcaaaaaaaaaaaaaaaaaaaaaaggaccaaatgaaaaggacttgggggaagagtacctttaccttcatgtcggcttcttctcagtgatttttatttactgtcctgggatataagtatctatttaaaatttttattaaaatgccttatgtcagcatgagctagatttcttccgttagatttacagatatgtgttgtttctagaatgtttctaattgacttggactcttactgtaatagaaatttacagacccataacccttattaataaattggagaggctgggcgcagtggctcacgcctgtaatcccagcactttgggaggccgaggcgggcagatcacgaggtcaggagatcaagaccatcctggctaacacggtgaaactccgtctctactaaaaatacaaaaaaattagctgggcatagtggcgagtgcctgcggtcccagctacttgggaggctgaggcaggagaatggcgtgaacccgggaggcggagctcgcagtgagttgagatcacaccactgcactgcagcctgggcgacagagtgagactccgtctcaaaaaaataaaaataataaattggaaaaatatggaggttactaaatacagttgaaataatatatagatagtgcataaaatgccggcatttccaagttgagtacatacattcttacctgagtttttcttttgttgtctgtctctaagtgggagctggtgaggtggccaacttcgctgcgtatgcgtttgcaccagccactctagtgactccactaggagctctcagcgtgctagtaaggtaaggacacgtttttcatgtagaaacagtagtcggtatcttagtttctaaaatattcagtaccatctaattaaatatgttcaacacaatttacatttcaacaacctgga

SEQ ID NO: 13398 - DNA, 2300 bp, Homo sapien
aataggattagagcctgaaaaggacaaatgatatttggtgttttgtttcaaaaagtgcataattcattttataaagatcctccccccacatgatttgaatttcatataatagtgtttttgtgtctagtcacaacctggaacaacattcctaagggactctacacctgcaaccaaggaatcattgatttactaggagatctaactctagctggctactctttgcttcttacaaatgagctctgtctttgactacttttgcagaaaccacgttggtggatcccaaggaatttctcctttccaggaggagccaaggcaggatagcctaacagttagtttcctatacatctcatgaaaaataaatctgcgctttgggaggctgaggcgggtgaatcacgaggtcaagagatcgagaccatcctggccaacatggtgaaaccctgtctctaataaaaatgcaaaaattggctgggtgtggtggctcacacctgtaatcccagcactttgggaggccgaggcgggcggatcacgaggtcaggagttcgaaaccagcctggccaacatggtgaaaccccatctctactaaaaatacaaaaattagctgggcgtggtggtgtgcacctgtaatcccagctactggggaggctgaggcaggagaatggcttcattgaacccaggaggcagaggttgcagtgagccgagatcgtgtcactgcgctccagcctgggtgacaagaaagactccgtcttaaaaaaaaaaaaaaattagccgggcgtggcggcgcgcgcctacagtcccagctattcgggaggctgaggcaggagaatcgcttgaaccggggaggcggagtttgcagtgagccgagatcgtgccactgcactccagtctggcgacagagcgagactctgtctcaaaatcaatcattcaatcaatctgctctcagtgtctcgaggcgggctttcaccaaacgtcaacctcacatctattccgcgaccgggtcagtaaggaagggcccagcggtcgtcgaactaccacagctatttcggccccgccccgtcccgcccccagctttggacccaccctttcccccgcttcttgccctcttgggagctctgttcccctttggcatcgcccggggacaccaattaaatgcagcttcacactgtgactgcccctgggaaccctcattttattttatttatttatttatttttgagaaggagtctcgctctgtcgcccaggtggagtgcagtggctgatctcggctcactgcaacctccgcctcccgagttcaagcgattcccctgcctcagcctctggagtagctgagattactggcgcgcaccaacacgtccagctaatttttgtatttttagtagagatgcggtttccccatgttggtcacgttggtctcgaactcctgacctcgtgatctgcccgcctcggcctcccaaagtgctgtgattacaggtgtgagccaccgcgcccggccggaaccctcatttattctatttttttttgagacggagtctcgctctgtcgcccaggctggagtgcagtggcgggatctccgatcactgcaagctccgcctcccgggttcgcgcccttctcctgcctcagtgtcccgagtagctgggactacaagcacccgccaccacgcccggctaattttttgtatttttagtaggggcggggtttcaccgtgttagccaggatggtctcgatctgctgacctcgggatccgcccgccttggtctcccaaagtgctgggattacaggcgtgagccacagcgccgggcccggaatcctcgttttaaataagggccacgccggagtttgattttgaactgatcggccaacgccacctggcagcatactgtactgcttaactacgcttccagcttcgtccctcgccaggtcccgcctggatcctgcgccccgcccccgtccccacactctacgcgccccgccctccgcgctcagccgactggggccttgtaaaggaaccggaacccggcgggagagagccccgggggcggggtgtacgtggtgcggcactgcgcgtgcgcgcgaggcctcttgcgtcatttagccgcgcctaggttttccggcgccggccctaggtcccggcagcggtggtgacggcggtgccggaggttgtccttggcaggttttcctcggcgcttctccatggaggaggcggtgcgaacggcttcagccccgaatgctcgcatctcccactggacggcgacgaaggcggtggccgtgcgagcgcaggactgggcggcctgtgtgggggtgt

SEQ ID NO: 13399 - DNA, 2300 bp, Homo sapien
cgtcgcccaggctggagtgcagtggtgccatctcggctcactgcaagctccgcctcccgggttcacgccattctcctgcctcagcctcctgagtagctgggactacaggcgccctccaccatgcccggctaattttttgtatttttagtagagaccgggtttcatcgtgttagctaggatggtctcgatctcttgacctcctgatccatccacctgacctccggatccgtccgcctccgcctcccaaagtgctgggattacagtcatgagccacctccccggccctattttatatttcttcacaaaataataatgctgtatgcaaagctgccaaaaggtttatacttttcgtttgtttttgagacaatcttgctctgttgcccaggctggagtgcagtggtgcaataacagctcactgcaacctccacctcaagccatcctcccacctctgcctccagagtatctggggttggaggtaaaagccaccacgccccgctaattaatttttttctttttttggtagagacgggtctcgctacgttgcccaggctggtcttgaacgtctgagctcaagcgagcctcccacctcggtccccaaagtgctgggattataggtgtgagccactgtgcccagcttgtagcatcgtttatagacaacaaaacctggcagcaaccggccaggcgcggtggttcacgcctgtaatcccagcactttgggaggtagagcggacggatcacctgaggtcaggagttcaagaccagccttgccaagatggtgaaaccgcgtctctactcaaaatacaaaaattaacccgggcgtggtggcggacgcctgtaattctagatactcggaggctgaggccgagaatcgcttgaatccgggaggcggaaggttgcagtgagccgagatcgcgccattgcactccagcctgggcgacagagcgagactctgtctcaaaaaaacaaaccaacctggtagctacctaacacccaacaatggctgaatggttagacaaattattatactgtcattagaataatcatatttatgtaccgatacagaaactgatatatattaaataaaaaggaaatttcgtatattgtaattggaaacatgtaaaagtatgtatacattatgggaaaacacctaaaatactaataattaggtgagggttgtggaattgagtcactttaaaaaatatttttttccaaaaaaaataaaataactttttcctatttttcaagcttgtaattttgttgttgtttctttttttttttttttttgagacggagtctcgctctgtcgcccaggctcgagtgcagttgtgtgatctccgctcactgcaagctctgcctcccgggttcacacccttctcctggctcagcctcccgagtagctgggactacaggcctccgccacgacgcccagctaattttttgtatttttagtagagacggggtttcactgtgttagccaggatggtctcgatctcctgaccttgtgatccacccgcctcggcctcccgaagtgctgggattacaggcgtgagccaccgcgcccggcttgttgtagtttattaaaacgaggaaactagactatgggatcacaagcccagagccccatgtagctgactctagcgccaagggcggaagagaaacgcccagcgccagggctctccttcgatctctgcagcggcgcgccgggcttcgcgctccggtgagttgggccggcctccgctggaggctcttcggggaccgctgcccgccggtgcgtcctgccgcgctccgctgcccggatattgcagaggacaccactcagaaagtatgcgtgtttctccgcgctggaaacttaaccaggagtcctgcatttccatttgcgaaatccgggaacccccgccccacccagcgcctcaccggcccctcactgccgccgcgtccggcgccactgctgtccccgcagcctaaggcgccggtccctggcacccccgtcccgcccccgcccctcttcctgctcctcccccacccgtccccctcccctcccccgcccgcgcctcccggtcaccccccatcccgccccgcggggcgcggcgcgcaggcgcaggctcggagggcgggcgcgggcggaatggggactgcagctgcggcagcggcggcggcggcggcggcggcggccggggagggggcgcgtagcccgagccccgccgccgtgtcgctcggcctgggcgtggccgtcgtgtcgagcctggtgaacgggtccacgttcgtgctacagaagaagggcatcgtgcgtgccaagcggc

SEQ ID NO: 13400 - DNA, 2300 bp, Homo sapien
gctaatttttgtatttttttgcagagatggggtttcatcatgttgcccaggctgatctcaaactcctgggctcaagtgatctgctggccttggcctcccaaagtactgggattataggcatgagccactgtacctggcctactaactttaattttaggtgtatcttttaggaagtaatatctcatggcaaaataatgtttgtcattcagtagttactgtagtttcatttcagtttttcttttgttaaattcaagcaaaatatagttttatgtttttaattaaaatcccatatgtgtttccccatcagataaaatatgcctgtcatttaacctatgtactcacatggaaaaatgtctggggtggagttcttttttttttctttttttttttgagacggagtctcactccgtcgcccaggctggagtgcagtggtgccatctcggctcactgcaagctccgcctcccgggttcacgccattctcctgcctcagcctcctgagtagctgggactacaggcgccctccaccatgcccggctaattttttgtatttttagtagagaccgggtttcatcgtgttagctaggatggtctcgatctcttgacctcctgatccatccacctgacctccggatccgtccgcctccgcctcccaaagtgctgggattacagtcatgagccacctccccggccctattttatatttcttcacaaaataataatgctgtatgcaaagctgccaaaaggtttatacttttcgtttgtttttgagacaatcttgctctgttgcccaggctggagtgcagtggtgcaataacagctcactgcaacctccacctcaagccatcctcccacctctgcctccagagtatctggggttggaggtaaaagccaccacgccccgctaattaatttttttctttttttggtagagacgggtctcgctacgttgcccaggctggtcttgaacgtctgagctcaagcgagcctcccacctcggtccccaaagtgctgggattataggtgtgagccactgtgcccagcttgtagcatcgtttatagacaacaaaacctggcagcaaccggccaggcgcggtggttcacgcctgtaatcccagcactttgggaggtagagcggacggatcacctgaggtcaggagttcaagaccagccttgccaagatggtgaaaccgcgtctctactcaaaatacaaaaattaacccgggcgtggtggcggacgcctgtaattctagatactcggaggctgaggccgagaatcgcttgaatccgggaggcggaaggttgcagtgagccgagatcgcgccattgcactccagcctgggcgacagagcgagactctgtctcaaaaaaacaaaccaacctggtagctacctaacacccaacaatggctgaatggttagacaaattattatactgtcattagaataatcatatttatgtaccgatacagaaactgatatatattaaataaaaaggaaatttcgtatattgtaattggaaacatgtaaaagtatgtatacattatgggaaaacacctaaaatactaataattaggtgagggttgtggaattgagtcactttaaaaaatatttttttccaaaaaaaataaaataactttttcctatttttcaagcttgtaattttgttgttgtttctttttttttttttttttgagacggagtctcgctctgtcgcccaggctcgagtgcagttgtgtgatctccgctcactgcaagctctgcctcccgggttcacacccttctcctggctcagcctcccgagtagctgggactacaggcctccgccacgacgcccagctaattttttgtatttttagtagagacggggtttcactgtgttagccaggatggtctcgatctcctgaccttgtgatccacccgcctcggcctcccgaagtgctgggattacaggcgtgagccaccgcgcccggcttgttgtagtttattaaaacgaggaaactagactatgggatcacaagcccagagccccatgtagctgactctagcgccaagggcggaagagaaacgcccagcgccagggctctccttcgatctctgcagcggcgcgccgggcttcgcgctccggtgagttgggccggcctccgctggaggctcttcggggaccgctgcccgccggtgcgtcctgccgcgctccgctgcccggatattgcagaggacaccactcagaaagtatgcgtgtttctccgcgctggaaacttaaccaggagtcctgcatttccatttgcgaaatccgggaaccc

SEQ ID NO: 13401 - DNA, 2300 bp, Homo sapien
ctacaatttgggaccatgcctgggaaatcagaacctcagggttagggcttaaaatttctttttaaagaatcatagacgaaaaccgttattttatagattacatttatatacctagcttatgactctatttccttttgaggttcaaaccaacactttgcaggagaagatgtggaggcagaaggaggagctacaggatcaggagaagctacggaagcacaaggagaagatgtggtgacaggagcagaggctgcgggaccaggagaaggagctgtgggagcaggagcagcaaatgcaggagcaggagcagcagatgcgggagcaggaggagcagatgcgggagcaggaggggcaggtgcgggagcaggaggggcaggtgcgggagcaggaggggcaggtgcgggagcaggaggggcaggtgcgggagcaggaggggcaggtgcgggagcaggaggggcaggtgcgggagcaggaggggcaggtgcgggagcaggaggggcaggtgcgggagcaggaggggcaggtgcgggagcaggaggggcaggtgcgggagcaggaggggcaggtgcgggagcaggaggggcaggtgcgggagcaggaggggcaggtgcgggagcaggaggggcaggtgcgggagcaggaggggcaggtgcgggagcaggaggggcaggtgcgggagcaggaggggcaggtgcgggagcaggaggggcaggtgcgggagcaggaggggcaggtgcgggagcaggaggggcaggtgcgggagcaggaggggcaggtgcgggagcaggaggggcaggtgcgggagcaggaggggcaggtgcgggagcaggaggggcaggtgcgggagcaggaggggcaggtgcgggagcaggaggggcaggtgcgggagcaggaggggcaggtgcgggagcaggaggggcaggtgcgggagcaggaggggcaggtgcgggagcaggaggggcaggtgcgggagcaggaggggcaggtgcgggagcaggaggggcaggtgcgggagcaggaggggcaggtgcgggagcaggaggggcagatgggggagcaggaggggcagatgggggagcaggaggagcagatgggggagcaggaggagcagatgcagaagcaggaggagcagatgggggagcaggaggagcagatgcggaagcaggaggagcagatgggggagcaggaggagcaggtgcagaagcaggaggagcaggtgcaaaagcaggaggagcagatgcggaagcaggaggagcagatgcgggagcaggaggagcagatgcgggagcaggaggagcagatgctgaagcagaaggagcagacggagcaggaggagcagacgggggagcaggaggagcagatgcgggagcaggaggagcagatgcgggagcaggaggagcagatgcgggagcaggaggagcagatgcgggagcaggaggagcagatggggaagcaggaggaacagatgtgggagcagaaggagcaaatgtgggagcagaaggagcagatgtggaagcaggaggagcaaatgggggagcaggaggagcagatgcagaagcaggaggagcaggtgcgaaagcaggaggagcagatgcggaagcaggaggagcagatgcggaagcaggaggagcagatgcggaagcaggaggagcaaatgggggagcagaaggagcaaatgggggagcaggaggagcagatgcgggagcaggaggagcaaatgggggagcagaaggagcagatgcggaagcaggaggagcacatgggggagcagaaggagcagatgcggaagcaggaggagcagatgcggaagcaggaggagcagatgcggaagcaggaggagcagatgggggagcaggaggagcaggtgcgggagcaggaggagcagatgggggagcaggaggagcagatgcggaagcaggagaagcagatgctgaagcagaaggagcagatgggggagcaggaggagcagatgggggagcaggaggagcagatgcggaagcaggaggagcagatgcagaagcaggaggagcaaatgggggagcagaaggagcagatgcggaagcaggaggagcaaatgggggagcaggaggagcaaatgggggagcaggaggagcagatgcggaagcaggagcagcaggtgcaaaagcaggaggagcagatgcggaagcaggaggagcagatggagcaggaggagcaggtgcgggagcaagaggagcaggtgggggagcaggaggagcagatgagggagcaggaggagaagatgggggagcaggaggagcagatgcagaagcaggaggagcaga

SEQ ID NO: 13402 - DNA, 2300 bp, Homo sapien
gtgtaagagactcagtgcagtgtcagtatctaccatgtgctatgcactctgcgttttctttttttttttttttttttttgagacggagtctcgctctgtcacccaggctggagtgcagtggcgtgatcttggctcattgcaaactctgcctcctgggttcaagagattctcctgtctcagccttcgagtagctgggactacaggcccttgccaccacgcctggctaatttttgtatttttagtaaagacagcgtttcaccatattggtcaggctggtcttgaactcctgacctcaggtcatccacccacctcggcatccgaaagtgctgggattacaggtgtgagccaccatgcccgggccaacccatagccttttggtcttctctcagccaaggcatccagtgaaaatgcaatttatttttcagattcctctggagaattaaaaagtctcttttgcggctggacacagcaactcctgtaatcccagcactctgggaggctgaggcaggcagatcacaaggtcaggagatcgagaccatcctggccatggccaaaatggtgaaacctgtctctactaaaaatacagaaattagctgggtgtggtggcacaggcctgttgtcccagctacgtgggaggctgaggcaggagaattgcttgaacccaggagacggaggttgcagtgggccaagattgagccactgcacttgctctggtgaaagagcaagactccgtctcaaaaaaaaaaaaaaaaaaaaaaaagtctcttttgcatcaaattgccatactctctgctcttggtcctcttttccatgtactcattcttcaagcatttattttctcattgcctgatccagatcattgcaatgaccaaaaaatgttcggatgctatgatttttgtgatattcttttagcaagttaatcacgatgttgcattcttgagtgtgcaagtgtggaggtaagtcaggatgcatctttaagacaaaaagatgggtcacggcagtgccacaccactcacggccacaccaggagagctgaaagtcaccaacgaagatgcctgacccagaagctggctgctagggagccaagccaggtcactccacatgtggccaatgcccggggattgccctccaccgcccaagcttattattattactattattattattttgagatggagtctggctctgcctcccaggctggagtgcagtagcacgatctcggctcactgcaacctccgcctctggggttcaagcgattctcctgcctcagcctcccgagtagctgggaccacaggcacgtgccacctcacctggctaattttattttttgaatagacagggtcttgttatgttgcccaggctggtcttgaactcccgggctcaagcgatcctcccacttcagcctcccaaagtgccaagactacaggtgtgagccaccacacctggccaagttctacttttctaatatttaaaatatgaaataggccgggcacggtggctcacacctgtaatcccagaactttgggaggctgaggcgggcagatcaccagaggtcaggagttcgtgaccagcctggccaacatgatgaaaccccgtcactactgaaaatacaaaaattagccaggtgtggtagcagatgcctgtaatcccagctactcggaaggctgaggcacctaaaccggggaggtggaggttgtagtgagccgctaccatgccactgcactccagtctcggcgacgcaatgagactctgtctcaaaaaaaaaaaaaaatagatgatgtcagtgatttctattacatgaggtctggaagcactctgtacgtgattgctccacgtttagtggtgctaagttcaaataattcaggtggtgagaaactgacttccgtaggagtgcgggtgtgcgtgcgtgccgcggaaatcccgccttctggcacctgcggttgccccctggcctcagccggtgggctcccaagtaggaagataaaccgcattgcaggaagcgggagagtccggaggagcggcgaagcgctcctcttccccattggctgcgcccacggagccgccttgcgattggccctaagcgcgggtggcgggggtcgggagaggcgtcaggatccctggcgccgcctgagccagcggctgctaggaggctgtgtccgcaagccagcggggcgaggcggctgggccctgcgcgtcaggtcccggcctggggcaccggggctgccagcgtcggaggaggtgcgggcgctgggttgacgggcggccgaacggggggcctgcgcggaccgcccgcggcgcag

SEQ ID NO: 13403 - DNA, 2300 bp, Homo sapien
tcatgaataattctgctatgaatgcttgtgtgtgagtttttgtgtagacatatcttttcattgctcttgtgtacgtactgaggagtaggattgctgggtcctgtgattacccagtgtttaaccttttgaaagacgccagatggttttccaaagtgggtgcatcatttatattcccagaagaagtaaatgagggttccaatttgtccacattatcaccaacacttgtaattgtgtgtctctttggttacagccatcctagtgggtgtgaagtggtatctcgttatggttttgatttgtaattccttgtcggctaacttgtacatatttcttatgctttgtagaagaaaaattgcatattggatgacatagctgtacatgtcttagttcaggctgttgtaacaaagtactgtagattagtggcttataaacaacaaaactttttttctcacagttctggaggctgggtagtctaagatcaaggtgctggcagatccagtgtcttgtgagggccagtttcttaatttgtagatgactgtcttgctgtgtcttcacatggtgaagagcagagagagagatcctgtgtctcctcttctttttataagggcattaatcccaattttcttgaggtctccaccctcatgacctaattacctcccaaaggccccatcttcaaatcccatcacactggggatttaggcttcaacatatgcattttggggggacccaaacattcagtccaataccagtacatgttataagcatgaatatacagatactgtcttttaggtgataatattacatatccctaaaagaaatgataacaacagctaacacttaagtgctgttttccaggccctgtgctgagtgtttgacaacacagatcactcatttaaacaattgtgtattattattaatagagagaagcataagttgacaacattcctctctagaaaaagttattctaggcatgtgaagtgaaagtagttttttttccccccactttatgccccagagggtccttttgtcttccaggtggtgctcagcttagagccttattcatgtgcagtaagggactgctgaatgaatgaaaatttaactgactgagtagtagtgtagttaaattaatccatgtgaccaatttcctttcaatttcctaatggttctacataactattagctcttactaagataattttcccttctgtctgtagaagtccttggatgaggatgacctaggtcctagaagggtagttgccctggagaaagaagctgaagaatggaccagacgggctggagaagctgtcgtctctattcaagatatcacagtgaattattttaaggagacagtaaaagcattagcaggtgataatctaaaaaatgctatacgcagatacgtgtaattgattgtcattttattcaaataccatttgagtccctcttacgcactaggcactgtgttttctaggtggcgagaattcagtgtcaaacattaagagacattgtacagtctggtgaagggagagaaatcttaattatctattcactgaagcacacagaaaatggcagtgacaataaatggcacaaagaagagagacatggggctctgagggtctgtgagagagaaattgggcttgatcagggtggtcactgaaggcctctgagaagtggcgcttgccccaatatctgaagggtaaatggaaattgagagaatagaaaaagtgaggagtgttctgggcggaaggaatagcactggcgaaggtcccctggcttgagggaagttggcaaataggagcttacagaaaacctgcggggctggatcgcagagagtgcaggacaatgtggtatgagggagaatgctggcaagacaggcagggatcagaccgtgcaggggcttgcgggctgggtgaaggactttttttcagtcttaaataattgttgataaaaacaccaaataggaaacaacttaatgtctgtcagtttgttaagttatggtacattcataaaagagaaaactacatagctattaagcatgattcttgattttttttttataaatggcaggagtttctgatatattgcacagaatcaacaagatataaagcagaatgatgatcctggttttttggtcaaactatccatatgagcctgtctgtctagctagtcatagaaacaatatggaagcaagtgtgccaaaatataagaagcacttgcctcaactaggtgagatcatgacttattattgtccttttaaaaattgaatacctaaaattgtatattaatgaccatgtattatttttata

SEQ ID NO: 13404 - DNA, 2300 bp, Homo sapien
gattgcgccactgcactccagcctgggcaacagagcgagactccatctcaaaaaaaaaaaaaaaaagagagagaaatgttaagtaagaatctcatttgagctacatgtgtgaaaatatgtcttttacattattatataacacagattttggatatgacgagtgctgaactgaggcttttcacttgatatgcattacaaattagaatttttcactcacaaaacatgcttatgacaattttatatgtgaatagaattgtaaaaattgccttaagagttattgaataaaatgtttaaagtgcctcataggatgaggaaaaaatggaagagttaattaacaaggatacaaagcgtaaaagatagagaagaataagagttcaaataaaatcgaatgaaaagacaccatcttgtgtaactctgtagttaattgtgcatgtgtgctatttttcatgacttggagcacgttattttttggcgaagagcttccattctatctatggatatgccaaaattttcctattttagatcttctagtctccaactctcaagataaaaaacaaaaatcattaaaacctctgactgatattgaatgcctgcaaaaatatctcctcccatcaccttgcaacagatgacttgctcgtacacctttttgactaccactccccatcaagggttctctccttcgagacggcagtaattctctatgtatttcatgttatgtgcaaactttactttcaaagagttgttacctatattaatgtatttacatcattcacttaatatattttctctatcagtaaaattggtttagatatattggattaggatagaacacgtcacaatttttctcacctttatgattttttttttagttggaccgtttttcagttggtgacagtgtcagaaatgaattaaagttgttaagaataggtaagggtaaagagaagggtgtccttatgtatcaattttgcttatttagttttttcaagttcaataagaccctcctctcccttcaaggaagatgattcctaggcacgtctgttatttctatcaaaacacctgaggttttttttttcattcatattgttaaaataccaattgtggagcgaaaaatgcttcacctgggactgtcccctgacaggcggtgcgacgaggtcaggcccgcgcccgccaagccctagggccgctgccgccgacggccatggaggacgagcagcccgacagcctggagggctgggcgccgctccgggagggcctcttcgccgatccccaggggcaccggttgcgcttcctggtggcttggaacggcgcggagggcaagtttgctgtgacttgtcacgaccgcaccgcgcagcagccgcagcggcgcgaggggcccggctggggctggagcacaagcccgaggccgccgtgtccccgcccagctgggccggccggctctcggccgcggggttccgcggcgcgcgccggcagctagcggcgctgtggccgcctctggaacactgcttcccacggctgccgccggagctggacgtgggcggcggcggggcctgaggtctggggctcgggcggtgggcgctgctgtggccggcgcgcgtgggccccggcgaggcggcactgcaggagctttgcgggcagctggagcgctacctgggcgcggcggcccacggctgtggctgcgccaccgtgcgcgacgctctcttcgcggctaacggccgcgcggccgactgcgagagcccgcgcgagtttcgggagcgggccctgcgcgcctgatgggtcgaggcggacgcgcggctgcgtcaggtaagcgaggccgggccgccggcgtttgaccgcgcttgggtggcctgggacccggtgggaggcttccccggcgccgagagccctggctgacggctgatggggaggagccggcgggcggagaaggccacgggctccccagtaccctcacctgcgcgggatcgctgcgggaaaccagcgggagcttcggcagggcctgcagagaggacaagcgaagttagagcctagtgtacttgccgctgggagctgggctaggcccccaacctttgccctgaagatgctggcagagcaggatgttgtaacgggaaatgccagaaatactgcaagcaaaactgaaaacaacccatccatgtaggaaagaataacacggactacacgtaagcaattccaagtctgtgtctgcggggacgtcgcaagtgggataaaatggtttaaaggaagaaatggcttttaggagttagggtgttttgttttaagtaatacagacttggtcaaatggaaag

SEQ ID NO: 13405 - DNA, 2300 bp, Homo sapien
gtgaaatctgtttatgttatggaccagtgattcattcctttttgttttgtgtagcaccctgttgaatgaatatggagctttccaatccgttctatcctgatgaatatccaggtgtttctgttgaaactgctggtcatatattatgtgtttaaatgtagtagataatgataattatttttccaaaatggttgtatcaacttaataactcattcaaatacgtgaagaccttctaacaatctaaaaagatggacctccaatttcaaataataaataaaaagattaagtacttgaacaggcagtatatgcacattttttaaaataaaagattgagttaaattttgtaaaatgtaggccgggcgtggtggctcacgcctgtaatcccagcactttgggaggcagagacaagcggatcacgaggtcaggagatcgagaccatcctggctaacactgtgaaaccccgtctctactaaaaatacaaaaaattagccgggcgtggtggcgggcacctgtagtcccagctacttgggaggctgaaacaggagaatggcatgaacccaggaggcagagcttgcagtgagctgagattgcgccactgcactccagcctgggcaacagagcgagactccatctcaaaaaaaaaaaaaaaaagagagagaaatgttaagtaagaatctcatttgagctacatgtgtgaaaatatgtcttttacattattatataacacagattttggatatgacgagtgctgaactgaggcttttcacttgatatgcattacaaattagaatttttcactcacaaaacatgcttatgacaattttatatgtgaatagaattgtaaaaattgccttaagagttattgaataaaatgtttaaagtgcctcataggatgaggaaaaaatggaagagttaattaacaaggatacaaagcgtaaaagatagagaagaataagagttcaaataaaatcgaatgaaaagacaccatcttgtgtaactctgtagttaattgtgcatgtgtgctatttttcatgacttggagcacgttattttttggcgaagagcttccattctatctatggatatgccaaaattttcctattttagatcttctagtctccaactctcaagataaaaaacaaaaatcattaaaacctctgactgatattgaatgcctgcaaaaatatctcctcccatcaccttgcaacagatgacttgctcgtacacctttttgactaccactccccatcaagggttctctccttcgagacggcagtaattctctatgtatttcatgttatgtgcaaactttactttcaaagagttgttacctatattaatgtatttacatcattcacttaatatattttctctatcagtaaaattggtttagatatattggattaggatagaacacgtcacaatttttctcacctttatgattttttttttagttggaccgtttttcagttggtgacagtgtcagaaatgaattaaagttgttaagaataggtaagggtaaagagaagggtgtccttatgtatcaattttgcttatttagttttttcaagttcaataagaccctcctctcccttcaaggaagatgattcctaggcacgtctgttatttctatcaaaacacctgaggttttttttttcattcatattgttaaaataccaattgtggagcgaaaaatgcttcacctgggactgtcccctgacaggcggtgcgacgaggtcaggcccgcgcccgccaagccctagggccgctgccgccgacggccatggaggacgagcagcccgacagcctggagggctgggcgccgctccgggagggcctcttcgccgatccccaggggcaccggttgcgcttcctggtggcttggaacggcgcggagggcaagtttgctgtgacttgtcacgaccgcaccgcgcagcagccgcagcggcgcgaggggcccggctggggctggagcacaagcccgaggccgccgtgtccccgcccagctgggccggccggctctcggccgcggggttccgcggcgcgcgccggcagctagcggcgctgtggccgcctctggaacactgcttcccacggctgccgccggagctggacgtgggcggcggcggggcctgaggtctggggctcgggcggtgggcgctgctgtggccggcgcgcgtgggccccggcgaggcggcactgcaggagctttgcgggcagctggagcgctacctgggcgcggcggcccacggctgtggctgcgccaccgtgcgcgacgctctcttcgcggctaacggccgcgc

SEQ ID NO: 13406 - DNA, 2300 bp, Homo sapien
gaagctttacatcttttttctaagatctaggatgtagatctggtttacacagtaattttcaactgcaggagtattttgcctcctatgggacgtttggaaatatctggagacatttttgtggtcacaactggtcatggtcgggaggtcttattggcattctgtgggtagagggaatgttactaaatgcccgacaacacaccaggagaaccctccacaaagaattatctggcccaatatatcaatattgctgaggctgacaaattctggtttaaataaatatccaatttggaggatgagtctttgtctttttccttcttctgcatattggtctccagatttcccacttcttcagttagttttcgtaactgtaggttcttaaaaaaaaatgagcactttggccgggtgcgacggctcatgcctgtaatcccagcactttgggaggccgaggcgggtggatcacgaggtcaggagattgagaccatcctggctaacatggtgaaaccccgtctctactaagccaaaatacaaaaaattagccaggcgtggtggcgggcgcctgtagtcccagctactcaggaggttgaggcaggagaatgttgtgaacccgggaggtggagcttgcagtgagccaagatcacgccactgcactccagcgtgggtgacagagcgagactccgtctcaaaaaaaaaaaaaaaaaaaaaatgaacatgtcatccatacttctaaggtgttgtaaagatgtgtaaagttttcactttttgcatcatattcacatgtggctatatgcccttttctcttcaaagttttctttatcttgattacttatcagaggtttgactgttttattttcctcagtcttttgaaagaatcctccttcagttttattttttaaatctagtggtttttctttttcctttttccttatgtcttaattatttccccctttttgtttgttttgcttttcctagtttagtggatcaatgtaatttaaattgctttttaaacaaacatgtaagggtatacattttcgttgggtgctgtttgactttgttgcacaagttttaaaatctattttttaatagtttgtattttctaaattattttattgcatcttttgttcacattgctcttactattaattttttatttttattaataaataaataaattaattaattaattgagatggagtcttgctctgtagcccaggctggagtgcagcagcatgatcttggctcactgcaagctccacctcgggggttcatgtcattctcctgcctcagcctcccaagtagctgagactacagctgcctgccaccacatccggccttttttgtatttttagtagagatggggtttcaccgtgttagccaggatggtctcgatctcctgacgtcatgatccacccaccttgggctctcaaagtcctggaattacaggcatgagccactgcacccggcccaaaagctttgtgtttttacagatattagacatgtttcttgtttaagaaaaaaaatcttaacgaaaacgtaggagaataagagaaacatttttccaaaaaagagaaatcattgtgattattttatcttattagaatgttggataatatagtctgcttcattaatcatcaagcatgctatgcattttccatttttataggatctgtatctcagttaagataatactggtaatttttatactgtaatcaaagatgaaaaatgtaggccaaaatcatagaccttgcatagaagctggataatgaagacagctatagagaaaaacacagatacacacacacggacacacatatatatataaagtatacacacatatattttttaaagttttaaagctgttaaagcaaaagctggcccctcttctcttccagagtgggaggcctctcccctctcttagagtgggtgcggagagcggtcgcatgggcagctttccttgtgagccacagggccctctggacacgctgctgtctggccacgccccctttccctttcatctttctcattgaccaatgggcttggagcattaaggccacgcccctattccgcattctactggggccctggttacgcctcctctggctcagtcacacagctgcctggaaggtgactggaggccttgatcggttctcattgcgattttgctgctgtggccccaaccctgcctccctccccaccctgcgatggcagaagaaactcaacacaacaaattggctgcagccaagaaaaaggtaaaaacgcactaggtcatagcccctcaacccagccacagatcccctctgatg

SEQ ID NO: 13407 - DNA, 2300 bp, Homo sapien
cgctgcagaggcaggtaatgtgctgccaggcaaaaccagttccctgagagaggcctccatgtactgaagttccctgccctcagagtcaggggcctttattccgtaacgagtgcagaaagggtctagaagtgacagggtagattttctggaggcaaggggcagaggtccttgataattggtaagttgctaaccttcagtttacctgcttttctcttaagtggtaaatcctgcaactacttactcatctgcttcacagaatttgtagtgtaattgtcttaagaattaaactaaaaataattcttttttaattaaacacatgcatctgtaatgttgcttttttctaaagtccctgacaatcctaatcactaatcaacttgagtgtaattacctggctgtaaaataatgaatctcaaaattttcacatgattacttgcattatgagaacagaaaataaagagaggctgggcgcagtggctcatgcctgtaatcccagcactttgggaggcagaggcaggtgtatcatgaggtcaggagtttgagaccagcctggccaacatagtgaaatcctgtctctactgaaaatccaaaaaaaatgagccgggcttggtggtgagtgcctataatcccagctactcaggaagctgaagcaaggagaatcgcttgaacctgggaggtggtggttgtagtgagccaagaccgtgccactgcactccagcctgggcgacagtgcgagactctgtctcaaaaaaaaaaaaaaaaagaaaataacaatctgtagtttcctcatcagattttttttaatgcttgtcattttaaattttcttttatcagatcttagctgtgcatttgttgcaagcagtccttccgtcatgggacaagaccgaaagggtgagggacatgaaatgcctcatggagaagctgtttgacttcttggggagcttgctcactatgtgctcctctgacgtgccgttactcagaggtgggtggccgtctcccttccctgtaccctggtgaagagcggtgcagtgccgtcactcagaggtgggtggccgtctcccttccctgtgtcctggtgaagagcggtgcagtgccgtcactcagaggtgggtggccgtctcccttccctgtaccctggtgaagagcggtgcagtgccgtcactcagaggtgggtggccgtctcccttccctgtgtcctggtgaagagccgtgtagtgccgtcactcagaggtgagtggccgtctcccttccctgtgccctggtgaagagtggtgcagcagcttctcccctggtttcctcctcagagtccacgctgaggcggcgcagggtgtgcccgcaggcctcgctgactgccacccacagcagcacactggcggaggaggtggtggcactgctgcacacgctgcactccctgactcggtggaatgggctcatcaacaagtacatcaactcccagctccgctccatcacccacagctttgcgggaaggccttccaaaggggtgggtttgtgttctcagaattaatttagttgaacagtaaacctgtagggattgggcagctccgtgagtgtccccggtcgagctcgctgtttggtctgcactaggcccagttagatgactacttccctgattccgagaaccctgaagtggggggcctcatggcggtcctggctgtggttggaggcatcgatggtcgcctgtgcctgggcggccaagttgtgcacgatgactttggagaagtcaccatgactcgcatcaccctgaagggcaaaatcaccgtgcagttctctgacatgcggacgtgtcgcgtttgcccattgaatcagctgaaaccagtaggtgaacttgtgcttagttactgcatgataagggaaattgactttacactagaaccgagcaccaacatcagcacttgaaagaacttgattctggtacttgaagtttgccttccaggaagctgtgcgagcttgtgcttctgtggtaagcagggcctgtctcacagggcacttaaagcagtggttcgtgtgtatttcagcctcagagacacgaagagggctttagcaacctagaaggtaccgtgcatctatgaggtagttctaattattttaaaatgtgaatttatgaagtttactttttattcaacaactcaagttttaaaaaaacaaacatgtttaaacacctttaaaaaaacagcctttcttcatgtagaaaatgcttagtagttttgagtgacgtgacttaatgtagcagctactgtcatcttaatctgtgaatcaaggatgcacagggagaaggagccatt

SEQ ID NO: 13408 - DNA, 2300 bp, Homo sapien
ccacctcccaaagtgctgggattgcaggcctgagctaccatgcccagccctgctttaatttaaagtgtattacatttgatattagtacagccccttcagctcttttttggttactattttaattgtatctttgtatccctttactttcaatctgtttctgtatttaaaatgtttatcttgtagatagcacattggtggatcatattttgttcttcaatcctttcagccagtctgcttttctttctttctttttgagacagagttttccttttgtcacccaggctggagcgctatggtgcgatctcagctcactgcaacctctgcctcctgggttcaagcgattctccagcctcagcctcctgagtagctgggattacaggtgcgtgccaccaggcctgactaatttttgtatttttagtagagacaggggtttcttcatgtcggtcaggctggtcttgaactcctcacctcaggtgatccaccgcctcagcctcccaaagtgcaggcattacacgcgtaaaccactgcgcccggccaaagtggtggattttttttctcagaaaatctattccattctttttccagaaaccaaatttgtacaagttaactaaaataaatatttatactctaatttttttgttctgaggtctgagtttttagaattttatctttacatgtttagaaaaattagaaaatatagatagaacataaccaagaaaataataacaactttccttctgttcaaagttcattactattagccgagtgcagtgactcacacctgtaatcctagcactttgggagactgaggcgggcggatcacttgagcccaggagttcgagaccagcctgggcaacatggcaaaatcccgtctacaaaaactacaaaaattagccaggtgtggttccatgtgcctgcagtcccagctagtggcaaggctgaggtggagaaccacctgaacccggtaagtcaaggctgcagtggtgcagcctctgtcccccaggctggagtgcagtggtgcaatgtcggctcactgcaacctccgcctcccgggttcaagcgattctcctgcctcggcctcccgagtagctgggattacagtcacgtgccaccacacctggctaatctttgtattttcagtagagaaggggtctcatcatgttggccaggctggttttgaactcctgacctcaaatgatccacctgctctggcctcccaaagtgctgggattacaggcctgagccaccacgcccggccgttatttttctttcttagaggcaggatctcactctgtcgcccaggctggagtgcagtggcacgatctaagctcactgtagcattgatctcccaggctcaggcgattctcctgtctcagcctcccgagcagctgggatcacaggtgtgtgccaccacacctggctaattgttaaatttttttatttttattttttagagatggggtcttgctatgttgcccagtctggcaacatgggatcctccaactcctggcttcgagggatcctcccgcttcggcctcccaaagcgctgaaaattacatacgtgagccaccacgcccggcctatattgttttatagttcttcaattttgttttgtggtcgctggaggtgtttccttcttcgattccctgcacagtgcttccacagctgctccatggaatctgcccaagacttttgctgcgttcagttgaacacacaggaggaagctcttcaggccccagccagccgaccgcacaaagatgcgttctcatacccaggggagctggtctcgccactcgacccgcgccctggatagctatagttagtgtgagcgccacctcccgccgcggcgtgatcaagagcgctccgggccaagcagtctcccgtgggagtgcgggagcgcgtgcgtgcggcggaaatccagccttccggcgcccgctgttggccttggccgcagccacggcgctccaagtaggaagataagcgggattgctggaagcgggagagtcgggaggagcggcgaagggctcctcttccccattggctgcgcccacggagcagcctcgttgcgattggccgtacgcggggggcggcagtcccgcgtcggcccgcccctcgggccgcgagaggcgccgggatcgcgggcgccggctgagccagcggctcttgggaggctgcgtccgcgcgccggcggggcgaggcggccgggccctgcgcgtcaggtcctggcctggggcacctgggcggccggtggcgggggcggtacgggcgcggggctggcgggcggccgagcccgggaggcg

SEQ ID NO: 13409 - DNA, 2300 bp, Homo sapien
aataatggacgcaaggcttaaaaaacttgatctgtttattttatgtttgtcctggaagtcagcctcggcatgcaggaagagtgtatatggattgtgttatttttgctataatcattagtttgttggtattcttactgttttactgttgttgcgtgtggagaaatgactgggtgagatcacaggtgatggagagagacagcgctcagctgagagaccagtgctggcctgtctctcctctgtcctgtgaaaaccctgctccaggagggtccagtcttttggtttccctgggccacactggaagaagaattgtcttgggctacacataaaatacacttatgatagctgatgagcttaaaaaaagaatcccaaaaatatctcatgatgttttaagaaattttactttgggccacattcaaagctgccctgggccacatgctgccctcgggccgtgggttgaacaagcttgatctactcagtaagcttggctcccaaagcaataccttcctttcctcaccatgaaggctgtggttagggtcaaaataaaagctacaaaagccttcctccctagcaaaactaaagctgaagtgtttgatcatcatcttttgtctttgtaataaaaccctctaacttaatgacaagaaccacggttttctcgacatagtaatttttcccttttattacagtggtttcttgtaacaacccgtcatgtccctcttccagcccctcccctttttgccctgcttctagaatgtacagaactgagtgtagtgtttagttgcagtaatgaactgagcagaggtctggagcatgcttctcctctagtcctctgtagcactcatttatcaccatatctgtggcatcctggcgtttgcgtggttgcgccccaggtgtttgctgcccctcctggtttgcggtgatgtgtctgttctggtcagtgctgtggggcgtggccttgtgtatgtcttaggctgtcgaggtgtcccagcgtatggttttgcatttgcctctccagggtcctgagggttctgtaggtttcacagactccaggtgagtttcggtggtcatttcctgacctgtgatatctatacctagatgagtggtgtgcttttgatttcacttctactcacagggcaaggccgggtctctgatttctcatggggcctcttgctacccaaagcctgggacgggcagtgtgttgccccctggctgcggttggctggcaggcaggtgatcctgagtggctcccagccttctgcaggaagctcgagttcagtgggtccttgtgtgcattcccgtgtgggaggttgtgctgaagcctggcggcttggctctgctttcagagcccggaacctcttgactcctgctgtgtgtgcccacgtgaattttggttttgcacttgaggagtttccctgtgtactctcagctccacagtctaatttttagcagctcttttttttttttagacagggtgtcactttgtcacccaggctggaatgcagtggtacggtcttggcctgccaggttcaagtgattctcctgcctcagcctcccaagtagctgggactacaggtgtgtaccatcacacccggctgatttttttatagagatggggtttcatcatgttggccaggctgatcttgaactcctgatctcaagtgagctttcccgtcggcctcccaaagtgctgggattacaggcatgagccaccgcctatggcagcttttgtggttacattgtagccattatttctgtgtttggtgcagattgttggggcggggtggaggttgctgttgctagttgtttagctcttctgctcatcttgagcttttccatatatgtgttcatagtggggttaaaaaaaattcctctagaaaatacttcaactattgtgggtaagagtttttttagtccagtttttaaaaatacgtaaactgagaagttattttgtctatttagatgatacttcaaattgacttttattcagtgtttaataagactttgaaattcactcatttttaggggttctaagtgaaaattgtttttctcctttcagttgcatgctgccattagtcaccaggttgacctggaattccttggtttaggtctgggcagcgtcttcctgaacagcctgaagcagaaggtggtgaccctggcaagcagcgcagacgtgctgagcaccgtgcagtcggcctcccaggccatgctgcagagcggctggtccatgctgttgcccaccgctgagaagcaggcccgggcactctgctctcctgtcctgcggaggtgggctcggggaaggaaca

SEQ ID NO: 13410 - DNA, 2300 bp, Homo sapien
ccgccatagaatcctctagagtgtgctaaaaatgtacaaattggggccctgcctggggaatcagaatctcaagagttagggcttaaaaatatttttttaaaggatcatggatgaaaaccattattttatagattacatttatttatttatttatttatttatttatttatttgagaagtagtctcactctgtcacccaggccagagtgcagtggcgcaatctcggctcactgcaagctccaaccccggcttcacgccattctcctgcctcagcctcccaagtagctgggactacaggtgcccaccaccacacccagctaattttttgtatttttagtagagacggggtttcactgtgttaaccaggatggtctcgatctcctgacctcgtgatccgcccacctcggcctcccaaagtgctgggattacaggcgtgagccaccgcgcccagcctatagattacatttatgtggctagctcatgattctgcttccttctgaggttcaaaaaaacactttcactattccagcagcagctgcaggcggaggctgaccacctgggtaaggagctgcagagtgtgtcagcaaagctccaagcccaggtggaagagaacgagttgtggaaccgcctgaaccagcaacaggaggagaagatgtggaggcaggaggagaagatacaggagtgggaggagaagatacaggagcaggaggagaagatacgggagcaggaggagaagatacgggagcaggaggagaagatgcggaggcaggaggagatgatgtgggagaaggaggagaagatgcggaggcaggaggagatgatgtgggagaaggaggagaagatacgggagctggaagagaagatgcacgagcaggagaagatacgggagcaggaagagaagaggcaggaggaggagaagatacgcgagcaggagaagaggcaggagcaggaggcgaagatgtggaggcaggaggagaagatacgggagcaggaagagaagatacgggagcaggagaaaaagatgtggaggcaggaggagaagattcacgagcaggagaagatacgggaggaggagaagaggcaggagcaggaggagatgtggaggcaggaggagaagataagggagcaggaggagatatggaggcaaaaggagaagatgcacgagcaggaggagaagatacggaagcaggaggagaaggtgtggaggcaggaggagaagatgcacgaccaggaggagaagatacgggagcaggaggagaaggtgtggaggcaggaggagaagatacgggagcaggagaagaaacgggagcaggaggagaagatgtggaggcaggaggagaagatacgggagcaggaggagaagatacgggagcaggaggagatgtggagggaggaagagaagatgcatgagcaggagaagatatgggaggaggagaagaggcaggagcaggaggataagatgtggaggcaggaggagaagatacgggagcaggaggagaaggtgtggaggcaggaggagaagatacgggagcaggaggaaaagaggcaggagcaggaggagaagatgtggaagcaggaggagaagataagggagcaggaggagaagatacgggagcaggaggagaagatacgggagcaggaggagaagatacgagagcaggaggagatgatgcaggaacaggaagagaagatgggggagcaggaagagaagatgcaagaacaggagaagatgcggaggcaggaggagaagataagggagcaggaggagaagatacgggagcagaaggagaagatacgagagcaggaggagaagatatgggagcaggaggagaagatacgagagcaggaggagatgatgcaggaacaggaagagaagatgggggagcaggaggagaagatttgggagcaggaagagaagatgcaagaacaggaggagaagatgcggaggcaggaggagaagataagggagcaggagaagaagatacgggagcaggaggagaagatacgagagcaggaggagatgatgcaggaacaggaagagaagatgggggagcaggaagagaagatgcaagaacaggaggagaagatgcggaggcaggaggagaagataagggagcaggagaagaagatacgggagcaggaggagaagatacgagagcaggaggagatgatgcaggaacaggaagagaagatgtgggagcaggaggagaagatgtgtgagcaggaagagaagatgcaagaacaggaggagaagatgcggaggcaggaggagaagatgtgggagcaggaagtgaggctgcg

SEQ ID NO: 13411 - DNA, 2300 bp, Homo sapien
gcaactgaggttttatataagtcccctgattcttagaacatgaaggtgtagtattcaagtttggtcccttgaaagcacaatttttgttaaaaaaaattaagaaaattgtatgatttcctcagcaaatacatattgatcatctgttatacagccatgagaagtggttctgttgaacacgtttattttatcagatcccaattctaaaccaggcatagaatggaaaccatgaaggtaggatgaaataacttctgaatgtttgaaaatagtgtacttaaaaataaatatcaggtgtttttgttttgttttttgttttttgtttttgagacagggtctcactctgtcacccaggctggagtgtggtggtgccatctcacctcattgcagccttgacctcccaggctcgggtgatctcccacctcagcctcccaagtagctgggactacaggcacatgccaccatgcccagctaattttttgtattttttgtagagacagggtttcaccatgttgcccaggctggtctagaactcctgggcttaagcgatcttcccacctcagcctcccaaagtgccaggattacaggcatgagccaccatgcctggctgaaaataccaggtttttaagtatcagcactgcctcttcaatcttttctattactatgttgtgctcagtggtattttttattgaattagagcagtgctgttcaatggaaccttctttgaggatggaaatcttttatgtctctgctgtgtgggtatggtattagctgggtatggggcacctgcctatagtcccagctactcaagaggctgaggtgggaggatcacttgagcccaggaggccgagtctgcaggttcgtaccactgcaattcagcctgtgtgacagaatgagactcagtctcagaataaaatgaaataaggaaataaaaatgtaattgttgaaataagaaactagtggatggattagacacgagaagaaagaattaattgtttagacgattctctccaaaaagtaagtcagcatgtcacacagagagacatgaggatagatgatagggcagaagttggtgggcttggaggggagaggaagatcagaatgaggtccaaaatgtgtcttagtgaaatcccaggaggagatattaaaattatattagaaagtgaaagaaatagaagttttatttatttatttatttatttattttgagaaggagtctcgctctgtagcccaggctcgagtgcagtggcacgatctgagctcactgcaagctccacctcctgggttcacgccattctcctgcctcagcttcccaagtagctgggactacaggcacccaccaccacgcctggctaattttttgtatttttagtagagatgtggtttcacctttttagtcaggatggtctcaatctcctgacctcatgatccaccagcctcaggctcctaaagtgctggaattatacgcataagccactgcacccggcccaaaagctttgtgtttttacaaatattacacgtttcttgtttaagaaaaaaagtcttcacaataacgtaggagaataagagaaacatttttccaaaaaagagaagtcattgtgattattttatcttattggaatgttggataatatagtctgcttcagtaatcatcaagcatgctatggattttccattttcataggatctgtatctcggttaaggtaatactggtaatttttgtactctatgaaaaatataggccaaaatcatagaccttgcatagaagctggatcatgaagacagctctggaggaacacacaggtacacacacacagacacacatatatataaagtatacacatatatattttttaaaagcttttaaagcaaaagccggccctgcccctctcccagagttggcggcctctcccctctcttagggtgggtggggacagtggttgcatgggcagctttccttgtgagccaaaggtccctctggacacatgatgcctggccacgccccctttccctttcatctttctcattaaccaatgggcttggagcattaaggccacgcccctattctgccttctactgcatccctggttacgcctcctctggctcagtcgcacagctacctggtaggtgactggaggtgttgatcagtgcttggtgggattttgctgatgtggccccaagcccgcctccctccccaccctgcgatggcagaagaaactcgacaaagtaaattggcagcagccaagagaaaggtaaaaacacaccaggtcacggacccccaacccagccatagatcctctccaacg

SEQ ID NO: 13412 - DNA, 2300 bp, Homo sapien
acaaaatacttttcaagatctttattctatgtgagaggaagggattcttttccatcccagacagcttcatcttagccttcccgtgtcatgaaaaggggtataattaataaacaactggggtcagattcaagaaaataatctgtggatgctgcagccaggaaggggagtggaggatggaggaaaatccgctgtaccactggagactccttgtaaagggtgcagcctagagaaaacacagcaagaaaacattggaagtcaatttccagaacatatactgctcccctgtccactgcattacctcccctcctcaccaataggattaatctggattaaagagaaaagtgtgataatgcacagactctgtccaaacactacaacttagggaaaccaaaggcagtgggagagaacaagtcaaggacagtgaagtgattcaaagcctctgagaacaacagcttcaggaccaaggtcacagcctctccctcaatggccttagatttacttctcatggggcatctgcagggttcccaggtgagaactggcaaagagaacatgaaggcacttcccaaatctccagtaatactgagcttgctttagctctgtctggaaaaaataacaacaacaaacacaagcaggactatggccagtgttggaagcacttttcattgagacacttggaaggagggcaaatctgagtctcgttactgtgcaaatgtgccactgtgagtgtatgtgtgtgtgtgtgtgggggggtgctttgagacatagggtctttgtgtaaagttacaatctgatgtgatcgtcaaccacagaatcctaaaaaaaaatagaggctgccccaaagttcccatcggttcctagacttgccatgtgtccggaccctatcagtgcacctagaactccagggaaggggctccctggtggctttagtgattccttgttgctgtgctgaggtctcccggtagattatgtcgggtgttctaaggcctatttgctactgtaagagatggtgggagaagcaattgctgccattgaaagagcattctgagtcagggcaaggccacttcatactgtgcttgagacgctgggaggagaattctctatgagcccagacaggaactttcctgcagggcaggagctgagctgcagggggcgctcagggcgcacccagcacaggatccagccctggagcaggtgcacaggaggctggggaggggttttctctcaggaattgaatgttctttatttcaaagcaataataacctaaaatctaaataagaatgtagtaagtactgatgtgtctttaagtattctattatatatgtagcctatacctaaccaaataattgaatgcaaacagcatttaaaaggagaaatgtctggtcttttcaaatgtatttatagttaggaattgaagagtggttttattaattcaatgggtgttactgtcggaagatacactcatcccagaatttagatgtgcagaggtcaaggcccaggaaaagttcaggttgtcagggtgccatatgaacaagaaatgacattgaggacaatgtcctgggagattctggttttctgtaaaacgagttctgtcttcatggacttctgagcataacagagggcaaatatcattaaacaaagttcagggcagggagctctgcatcccactgtggcgtggtccgtgtgtcacctatcttcttcctcaggttgaggtggcttgagctatgaaatacctgcctcgtgaatatgcaaatgcactgctgtctaccgaggtacatacagatctgtccttgcccagagagcatcacacaacaaccacatccctcccctacagaagcccccagagcacagcacctcaccatggactggaccgggaggatcctcctcttggtggcagcagccacagggaagagaatcctaagttccagggctgatgaggggactgggtccagttaagtggagtctcaaccacttctctgtcctctccacaggtgcccattcccaggtccaatcggtgcagtctggggctgaggtgaggaaacctgggtcctcagtgaaggtgatcccagatacaccttcaccttccactacatacactgggggcgacaggcccctggaaaagggcttgagtggatggaacgtgttgatcctgaagatggtgaaacaatatatgcacagaattccagggcagagtcaccacgacctgggacacgtctacagacacagcctacatggagctgagcagcctgagatctgaggacacagccgtatattaatgtgcaagacacgcagtgtgaaaaccc

SEQ ID NO: 13413 - DNA, 2300 bp, Homo sapien
aggtctgggggcccttagcatgggtggtgtgctgggaggtggggggtccaggtgagtgtggggagaggctcatacatgttttcatgtgtgcacacggaagctctagtgctggctgtgccactgactcatggggtagcctcaggcaactcatgtcttctctctggcctgccacctgggacttttaattcctggggtcccttccagcgccacggttctgtggttgtggggcgagggtagggggtcaatcaccaaagtggtcttttatgttcttcattcattcctttctctactgcctctggccatagcataactgatgaggagctgaaggagaaaaatgccaaactacaagaaaaacttcaacttgtagaatctgaaaagtctgagatccagctcaacgtaaaggagctaaaaaggaaactggagagggccaagctcctgctgccacaggtgagcagctgcagccccgggggttgtgggagacccatccagctgggaccatggtctagggatcatgcagggtatggggaggctccagccaagagctggaaaatttgggtccttgttctggtcccgccatagaatcctctagagtgtactaaaaatgtacaaattggggccctgcctggggaatcagaatctcaagagttagggcttaaaaatatttttttaaaggatcatggatgaaaaccattattttatagattacatttatttatttatttatttatttatttatttatttgagaagtagtctcactctgtcacccaggccagagtgcagtggcgcaatctcggctcactgcaagctccaccccccggcttcacgccattctcctgcctcagcctcccaagtagctgggactacaggtgcccaccaccacacccggctaattttttgtatttttagtagagacggggtttcactgtgttaaccaggatggtctcgatctcctgacctcgtgatccgcccacctcggcctcccaaagtgctgggattacaggcgtgagccacggctcccagcctatagattacatttatgtggctagctcatgattctgcttccttctgaggttcaaaaaaaaacactttcactattccagcagcagctgcaggcggaggctgaccacctgggtaaggagctgcagagtgtgtcagcaaagctccaagcccaggtggaagagaacgagttgtggaaccgcctgaaccagcaacaggaggagaagatgtggaggcaggaggagaagatacaggagtgggaggagaagatacaggagcaggaggagaagatacgggagcaggaggagaagatacgggagcaggaggagaagatgcggaggcaggaggagatgatgtgggagaaggaggagaagatgcggaggcaggaggagatgatgtgggagaaggaggagaagatgcggaggcaggaggagatgatgtgggagaaggaggagaagatgcggaggcaggaggagatgatgtgggagaaggaggagaagatacgggagctggaagagaagatgcacgagcaggagaagatacgggagcaggaagagaagaggcaggaggaggagaagatacgcgagcaggagaagaggcaggagcaggaggcgaagatgtggaggcaggaggagaagatacgggagcaggaagagaagatacgggagcaggaggaaaagatgtggaggcaggaggagaagattcacgagcaggagaagatacgggaggaggagaagaggcaggagcaggaggagatgtggaggcaggaggagaagataagggagcaggaggagatatggaggcaaaaggagaagatacacgagcaggaggagaagatacggaagcaggaggagaagatgtggaggcaggaggagaagatgcacgaccaggaggagaagatacgggagcaggaggagaaggtgtggaggcaggaggagaagatacgggagcaggaggagaagatacgggagcaggaggagaagatacgagagcaggaggagatgacgcaggaacaggaagagaagatgggggagcaggaggagaagatgtgtgagcaggaagagaagatgcaagaacaggaggagaagatgcggaggcaggaggagaagatacgggagcaggagaagaagatacgggagcaggaggagaagatacgagagcaggaggagatgatgcaggaacaggaagagaagatgtgggagcaggaggagaagatgtgtgagcaggaagagaagatgcaagaacaggaggagaagatgcggaggcaggaggagaagatgtgggagcaggaagtgaggctgcg

SEQ ID NO: 13414 - DNA, 2300 bp, Homo sapien
cacggtcaaaccccgtctctaccaaaaatacaaaacaattagccgggcgtggtggcgggcgcctgtagtcccagctactcgggaggctgaggcaggagaatggcgtgaacctggaaggtggagcttgcagtgagcccagatcgcgccactgcactccagcctgggcaacagagcaagacttcttcacaaaaaagaaaaaaaaaaaacctaacaagacatcaccaggaaaaaaactgagactccacttcctcttgtgaacgttaagtataaaattaccaaatgaactatgagcaagcccatctcaaccacatataaaatggtattaatcatatatcacaacaaagttgatttaattccagaaatgcaaggttagacattcaaaagccaatcactaagttaccttatcaacataaaaagataagaaaaaaatgctcaatcaagaaagaaaaaagcaattgataaaattcagtacctattcataaatcctaaaacctatctaacagagaggaagcaacatgcccagttaaacactcccatagctgagaataatgacacaacttatttgcagccaaaagatgaaaactgcaggccagatgcagtggctcatacctctaatcccagcactttgggaggcagaggcaggcagatcacgaggtctggagttcgagaacatcctggccaacatggtgaaaccctgtctctactaaaaatacaataaatgagccaggcgtggtggcacatgcctgtagtcccagctactcgggaggctgaggcaggagaattgcttgaaccgtggagaaggaggttgttacagtgagccgagatcgtgccactgcactccagcctggcaacagagcaagactgcgtttcaaaaaaacaaaacaaaacaaaaaaacagatgaaaattgaatatcagtataatcttaaaacttttgagaaatctatgtttttcagctaaaaagagacagactcagccttttgacctttcctctttccctccctggaaggcaatccaaggcctggaaaaacaacagccacattgtaaccacaaaaataaaaacatggctaaggaagtatcaggaaacggaaaagaaccctggactgccttcctctgcacgttttaagtgacaaaaatgaaatctatatttcttttttttttttttgagacagagtctcgctctgccacccaggctggagtgcagtggcatgatctcggctcactgcaacctctgcctcctgggttcaagcgattcttctgcctcagcctccagagtagctgggactacagatgcacgccaccatgcccagctaatttttgtatttttagtagagatggggtttcaccatattggccaggctggtcttgaactcctggcctcgtgatccgtccgcctcggcctcccaaagtgctgggattataggcatgagccaccgcgcccggccatgaaatctatatttctttaagtcactgaatcagatttattttttctgtgactacatgtagccctaaatgatgcattaaatactaaaataaatactaaaatacatactaaaattttggtcttgaactcctgacctcaggtgatccacccgcctcagcctcccaaaatgctgggattacaggcatgagccactgcacccagctcaaaagctttgtgtttttaaagatatcagacatgtttcttgttttttttttttcaaaaaaacttaacaataatgtaggagaataagagaaactttttccaaaaaagagaaatcactgtgattatcttactggaatgttggataatatagtctgctttattaatcatcaagcatgctgtaaattttccattttaataggatttgtatctcaattaaggtgataaaggtttaaagtttttaaagtgaaagccagccccgcccctctcctggagtgggcggggacagcagttgcatgggcggctttccttgtgacatcacaggtccttcatgacacgtggctgcctggccccgcctcctttccctttcatctttctcactgaccaatgggcttgaagcattaaggccacgcccctattctgcattctagtgcagccctggttacacctcctctggctcagtcacatagctgcgtggtacgtgactggaggtgtatccttgtcctcgtctgaatcacgctgatgtggccccaaccccacctccctccccaccccatgatgtcagaaaaaaccagacagaacaaattggctgaggccaagaaaaaggtaaaactcactgggttgcggcaccccaaccccaacccagccccaggccccctc

SEQ ID NO: 13415 - DNA, 2300 bp, Homo sapien
ataattatcaaattaggaaaagactaccttttaaaaacattgagccttctactgaccgactataaagactatatataaagtatcccacaatttatttaggtcttctgaagctaaaatgtttttaattttattgtataaccttaattagtttaattcctaggttagctaacttttaatgttgttatgaatgttattaattttaaatgtttacttcaaatgttattgatgatagagaaataaaaatgattttcatatattggactcctgtccagtgtccttgctaaatgtacctattaaatctaatagcttatctgtaaattattctcaattttctgttgcattccatcaataatttctttccagttataacatcttttatttctttgctattacactagctaggacttgcaataataaatacagattttttttgcctttagatttatttcagagagaaagttttagagacctttatttagataattatctaaattacagatgtaatttaacagatccatattcacatgtatttctgctcctgtcatttttactaatagatgtttccaccaatatgactatttcatgtaacttttcaagttttatctcctaactttgttcctgatattctctaatgatttttaatgtctgttattaatgtagtgataacatatttgaaattactgatcttgggtattagagccttcttcatttttccttgataaatttcaccagaaattatctggcttcaataagcagtttaagggattttacttaatttatttcccttatttaatatttgtttttcttcattgcttttcttgcccttattatttgcttcattctgctttcattgcttttacctacttaattataatttaatttgttgacttgggtgattataaatattcagatatgtttccactttacagatttaggcaacaaaatttcctcaaagaaacttatagaaaaaaaatccaataatatataaaatgatatatcatgacagaagggcttcttattagaaacaaattggttagttaaatatttgaaactcatagctgcaaataatcacattaagagaataaagggaaaaacaaaattgtctcaaaaaatgtataaaactacataacagaattcagtatgcagtcatgatacgtactctcagcaaagtaggaatacaaaaaaatgattaatctactacatttatctgcaaaaatgacaaaacgctcatacatggaaattaaagaccattcctttgtggataatatggcacaggatatgttatgaaaggctgtcctgccacaacacagcacagatggggttgaaagaaaggaagggaaacaaagggctgccatgaattaaaccagtagagaaaataaaagcctgggtcatgcaggggacagtgtcttattaggccagcatcaggactggttgaagtctggcgcttctaacacagtgggaaaatgagcatagtaatcacaataaagaaagacatctgaaaggtgctaacttagcctcggatcagaagtgctctctgctaatgccttgctggtgaaaagcgtatccagtgtaagccctcagaaatcccagaaaacaaagaccaaaagaaacggcgccttgtcaaccgaacgaattgaaaaaagcttcctgccgcgatcgggcattaaaagaaaaaaaccacagacataagatggagtgaataaaaaaagaatttatataattcatggatgaaatgtttcagaatctataggattatattttttttaaggcagacagatacgaaaatacaacgaagcgtgcatgaccgaaaccagaagagattaaagtaaaacctcattctcctgaggaaatcgtgtgagaagggacttagggactgccggaacacagcgaagcagaggcagaaggcagacaaaaggggctgggttggtccccgcctgtgtgaacgaaaaaatatgtcagattggaaaattgcggtaaaaaccaggcagagcacgtacgttgcccccacaggaagtgtccgccatgctgcctgtgcccggaagtaggtaggaacacacagtcagagggacccaaaagcaggggggaaggaaaaagagatgcacacttcccccagagaagcctccgagcgcggccgccattccgggcctcaagcccataaagaaaaaataccggagaggttctggcaccatttcggggtgccaaagcagccatggaagagcctgcagctccctcagaagcccacgaggcagccggggcccaggcaggtgctgaggcagcaagggagggtgtgtctgggccgg

SEQ ID NO: 13416 - DNA, 2300 bp, Homo sapien
cactccacactgcagtacagtgatttttctaaaacatggatgggttcctgtcactcccctgtgaaaagtcatccatgtggagtctgactggtctgcatttggggactggacagagtgagaagggatcctgtgtcagccaggactccggtagacgcccctatgcaatatccacttgtggtggtcgggggcggggaaggggcgggattgagcccccttcccccctcctccttactgcggaaagctgcggagcgagcagcactcacttcctattcagcattcagcagggagggagcctctgaacagccacgtaggcattctcttctctctggaggaaaaggcccagcagctgtccgaggaaaagacccaccagctgtcagcaaagggacatgtcgcagctaagtaagaatctgggtgactcgagtcctccggcggaggccccgaagccgcctgtctatagccgccctacggttctgatgcgggccccgcccgcttcctcccgggctccgccagtcccttgggatccacctccaattgacttgcaggcttcattggccgcttggcaggcacctcagcctgcctgggaggccccacagggccagctgcccgccccggtggttccgatgacccagcctcctgccctagggggcccgatagtcccggctcccccgctggggggcccgatgggtaagcctccgactcccggggtcctgatggtgcatcctccacctccgggagccccgatggcccagcctccgaccccgggagtcctgatggtgcatccttcagctcccggagctcccatggcccatcctcctcctccggggaccccaatgtcccaccctccccctccggggaccccaatggcccatcctcctcctccggggaccccgatggcccatcctcctcctccggggaccccgatggtgcatcctcctcctccggggaccccgatggctcatcctccccctccggggacaccgatggctcatcctccccctccggggacaccgatggctcatcctccacctccggggacaccgatggctcatcctccccctccgggtacaccgatggcccagcctccagctccgggagtcctgatggcccagcctctgactccgggagtcctgatggtccagcctgctgctccgggagcaccgatggtccagccgcctccagcagccatgatgacccagcctcagccttcaggagcaccgatggccaagcctccaggtccaggagtcctgatgattcatcctccaggtgcgagagctccgatgacccagcctccagcttcaggagcaccgatggcacagccggcggccccacctgcacagccgatggccccacctgcacagccgatggcttcttgggccccgcaggctcagcctctgatcctgcaaatccagtctcaagttataagggctcctccgcaggttccccagggcccgcaggcacccccagcgcagctagccacacccccgggctggcaggcgacctcgccaggatggcaggccacgcagcaaggctggcaggccactcccctgacttggcagaccacgcaggtcacctggcaggcaccagccgttacctggcaggtgccgccgcccatgcgccaggggcccccgcccatccgccctggcccaccacccatccgccctggcccaccaccggtgcgacaggccccaccgctgatccgccaggccccaccggtgatccgccaggccccacccgtgatccgccaggccccacccgtgatccgccaggcccccgctgtgatccgccaggccccacctgtgatccgccaggccccacctgtgatccgccaggctccacctgtgatccgccaggccccgccgctgatccgccaggcgccgccgcccatccgacctgccccacaggtcctggccacccagccaccgctctggcaggccctgccacccccacctccactgcggcaggccccgcaggctaggctgccggccccgcaggtgcaggcggcgccgcaggtgcctacggccccacctgctacgcaggtacccgcggcgccgcccgctggcccgcaggtgccccagcctgtgctgccggccccgctgtctgccccactgtctgccccgcaggctgtgcactgcccttccatcatctggcaggcccccaaaggtcagcccccggtgccacacgagattccaacgtcaatggaattccaggaggtgcagcagacacaggcgctggcctggcaggcccagaaggcccccactcacatctggcagcccctgcctgcccaggaggcccagaggcag

SEQ ID NO: 13417 - DNA, 2300 bp, Homo sapien
aaccatagcctatggccaaagccaagttgagatttaaatagtaggttcaaacacttttcttattaaaaaatatatcaaatgaactaaatattttatttctttatttatttaatgtttgagacagtctcgctctgttgcccaggctggagtgcagtggcatgctctcagctgactgcaaactccacctcccaggttcaagcgagtctcctgcctcagcctgccaagcagttgggattaagggtgcccaccaccacacccggctaatttttgtatttttagtagagacggggttttgccacgttggccaggctggtctcgacctcctgacctcaggtgatctgcccgcctcaccttcccaaagtgctgggattacaggcgtgagccaccgcacctggcctaaatattttatttaaatagttagaaaataatacatacccaaacaaaataaagaataatattgatggagatttaaatgcaataaatgaggattatatttatgaagcatgggggtaataagtctgttcaagagacattcttaaaaacaatgaatataattagcatatttctgtaagatgttcccaagaaaatggtagatatctataaatagaagaaggagaaaaaggagaagtagatggagaggagaaggaggaggtggaggagggtgaggaggaggagaaaagtgttgaaataattccaactaagactgatatctaggaattaccctggtgaagtgggaagcttaagagtcctgttggagggactggtgtggtaatggctctgccaaaagtgttatgtgcgtgcaaacccaaagagagaaagcacagaaaacctttcaacatcaacctgcttgaggaaaaataaagtgggaaaagatacatactcacagtgaggactctagacatgtcaagacaatttttaaatatgcttttggcttcgagtggcaataactagattcaagacagcatatttaagaagctgctgatgagaagaaacccgggaagagctgaaggaccacatcagcccagaccaaggatgctgaagcagcattaaggtccctggtttcagatgctcaggcaatgaccctttttttcatggagagcctgtaggagtgacagttttgtctttgcccactgggaatctgttttccatacctggaaaacagggttacctatgtttcccctgctaccctttggtcatctcagagacactaccagatattacccatgggacctattttttttttaaatctcaggaaagacttgggtgtggcttccaacgtggaggactcagtagcttcagagagggtcctgagagaaggtgaattgaagaatgagggtgctgggcagagggaaaagacattatcatacaagtttgtgctaaaagatatagcaatccttctgctatggactaagtatggaaaaaaataaaatggaatcaaagttacccaaaggaagtgtaaaacccaaatttatgcccgttaaagcattaatgatgctctaagtccactgcctacttaaaaagttcatagttcacatgggttgataggaaattacgttaacgacacactgcatttccccttttcttatagcctatctgatttggtagggagtcgatcattttttattggaatttctcaggattccaacctcagacatccactttacagtttacacattttcttggacaagcccgactgttcctctcactggttcgcataaagctcatgtttacaaagccgcccagacctttctctgggactctcatatttaacttaattctggatatacccaggtaagcgtttcccaagaaacttgaccccaacatcccaaaaacttaaggtatctttcccttaaactggccccttctccagtacgcatccatctcacttctctcctgccctagatcttctcagcccaaacaggaaaccccgggatcgctctcccagcaggtgaagcctcgccatggaccctccccgtcggggccccgcgctgccccgcccgcccccagccgctggccaaggccgcggtcgcgcaggcgcagtgccgcgtcccgccgccgccccgccctgcccgtcgctgcggaaggcgccgcgcgcagcaacgcgcacttcctctccaggaatccgcggagggagcgcaggctcgaagagctcctggacgcagaggccctgcccttgccagacggcgcagacatgtcagaacaaagtaaggatctgagcgaccctaactttgcagccgaggcccccaactccgaggtgcacagcagccctggggtttcggagggggttcctccgtccgcga

SEQ ID NO: 13418 - DNA, 2300 bp, Homo sapien
atttaagaaagtaaaatttgtcagaaaatttgggatcagcagaaagtaatggtacttttggctcatagacgtaacattccataggccactcaggaagaaattgagaataaagaatggcagagttcatttcatagatcccctttatctgaggtctatgtgccagtggatccatttagtagaggggcagctttctgaacaacaactcagggacatatgctaagctttgatttttagtttccatagggaaccccatattcccatgactctccattccttgctactgttttaccttcttgcttgtccagtggctcgtgtacttctcagaggtagagaggtgcctggaatttctgtgaagggactcaagattttcctttatttccatgcttggggtggtacacaggcccctatgaggggtccctgcaccttctcaggccctaaatgaatcctcatctgcttgtgggactcctgaatttcatctaccatgttcttgcttttgtactgcttgccgctttcaggtaggaaaactcctgttcaaccttggcagacaaatctcatcttcactggccaagacatttggatgactattcgtatatgaattatgtcaagagtgccaaagttcagtataaaataatgcacatcagttgatccactattatttaatagaaaggtgggtaaattattgactatgtcaatgaaaatggagatataaatagttgccagcagaaaagtatttttaaaatgttaagctaaatgagaaaaaataataaaatattttaacacctttcctaaaagtgattgttacagatatatttgctgaatagagcaaaattatgtgtacattttctaagtggcattttaaaaatttgtcactgagactatttattactgcctcaatttcagagccattcttggtctgttcagggattcagttcctctctggttcagtcttgggagggtgtatttgtgcaggaattcttcattctttctagattttctaatttatgtccatggaggtgttcataatattctctgatggttgtttatatttctgtggggtcagtggtaatatcacccttgttgtttctgattgcatttatttgaatcttctcaacatcgctcattattagagtaacgcaaatcaaaaccaaaatgaaataccatctaacaccagtcagaacgtatatattaaaaagtcaaaaaataacaaataacaaataatcaaacaaataacagaggctggcaagattgtggagaaaaaggaacacttatacaatgttggtgggagtgtaaattaggttaaccattgtggaagacagtgtgatgattcctaaaagacctaatgacagaacttccatttgacccaacaatcccatttctaagtatatatccaaaggaatataaatcattctgttataaagacacatgaacacatatgtccactgcagcaatatacacaatagcaaaaacatggaatcaatctaaattgtccatcaacgatagactgtataaagaaaatgtggcacatatacaccatggaatacaatgcagctataaggaacaaccagatgatgtcctttgcagggacgtgaatggagctgcagtccattattcttagcaagctaacacaggaatagaaaaccaaatatctccatgttctcttataagtgggagctaaatgataagaacacatggacacatagaggggaagaacacactcagagttcctgaaaccattggtctggtttccaatgagtggggcaatcagacacacaagcacaccaaggcttaaccgctctgctcactggaagggaaagaaactacccaggaatgccacctgcttccaactagctgatcccatgattgaggctctagggaatttctctttacctgctgagatatttctgtcttggggaacctcctttctcttcttgccactgcaccagctgccaactacacttccttaccacagggcaagtgacatctgaagaggctgacagacttcagagctgggtaaggcaaccagaataccccctgaactgcctctgcctgttctgtgatgtcacctgacctctgctctgtttacatatagctgcttgtgacatcatctgggcatgtatggtatctgtatctacgtcaagacctgggctttgctccacttggagtcagctgattgacaggagggcatctgaaattgagaggagatttcaggacgtttacccagccctttagtggggatctgtccgggactgtgcagtctgaacctgcaactgtaaaaggtacaatatctacatttaggccct

SEQ ID NO: 13419 - DNA, 2300 bp, Homo sapien
attcatcatttaggggaatctgttttgccttccacctctgcctgattactaggacctagaaactgcatgctttcctggttcttttccttaagaggttccaccccaaaggcaataatcccatttaaaaacttaacaactttaagaaaatctccacatgtaagagtgtctgcttttcctggccatcctcactgaacttttacccccacatttttccttgctttagataaaatataaattctctataattatttcacctaagaattatccctttaaaataaaagtgtggaactgcctggttaaaaactttttagggcagggaacaggtaatcaagagactgatgatctaaaatgaaaaagaaaaacttaaaaactgacaaatgaagaatccatataactctaccagatctgcttctctatgtctgtgtatttatatgctccatatatgcaatattttgctgacaaactatataaaagagctctaataaatgggcgtatatatgcacttaaataaaatattttatcagaaaaaatttaactaaactgctttttgttcacatgactctaataatctttgaatgataaagatagctttaaagattattggtacaataaaattatttcttcaacatttagacatttggtctaaattaggcaggtcagatattctctttgctgttttaaggttacaaatatctatgactttttgtaagtgtccaacctgcctgcattagagccagcagcttctaggtaaagcctggggacatgctgagttagccacgcccccgagctatgttggaaacagtcagacattatcttcatttctgtcctgtgtcctaggctctgcacttggtacgaaattaaaattactttcactaaaaataaaagttgtgaagatttaacattgtaacacatgtgattgacactgctgagaaaagattgacattcaaggtatataaaaattataaaatgtgtttttgtaaaaagttataaaaagacctgaagatattgtttttgtttaaaaaagtaatcttgtctaaattagaggttttaaaaattgtcttaagttaaaaaataataggagaaaacggaaggtttaagcaggttataaaaggtttgtaaaagattggtctagtaaagaaagttctgtgtgtgagtgtgagcaacttgccaaaacttgaagcaggttacttagtttttctacagaatgatcattaatgtaaaaatcacagtgatacaggcccagaatctgcccccttaggtgtgatcaacagagttttcatggagcattaatcagttgtttagtagaaaattgtaaacagttatggtctaactgatttagattggatagatttgtttataaggttttatgaaaaattgtgtttgacattaataaaacactaattaataaaacactaataaaacattaataaaaggtaaaatttggttttctctttaaacaatatttttgtataatactgacagataataaaatgttttttatttgtcttttaaataaactgaaaaaagtaggggagagagaagacacagattcagatggcctcatgcagtcgttacttggtcctgttgtttgggagctgagtctcctctctaccaatgaataaaggcttttgcctttttaaatttttgagctatcattttggctaaacaaatgatttgtggttatctgggattctattttgtgatatgaagtgttttaaaactttaatatttgcacactttgaaaaataaaattataaactaagaatttttattttaactcattagccttttaaatattacgtcccctgaagtccaaaagagatatatttggcttatttggtatattaacctacagaaaacactgtcaaatataaaatcatgtttaactttctttgggttatatttatataaatatgttattagtatgtattccaaaattatatggttcctataattctaatatgtcttagtatatgttatcagtcataattattattattatgctgaattgttatgtgccacagaaatgaacagatttctttgtcgattgtgtctttaacaatggcctcattggacacagcgactcatgcctgtaatgtcctcactgggcacggtggctcatgtctgtaatcctagaactttaggtggctaagttgggaggattgcttgagctcaggtgtttgagatcagcctgaggaagatagtgagaccttttctctacaaaaaaatcaaaaaattagttggatgtggtagcacttgcctgtggtcccagctcctctggaggctgaagaaagaggatt

SEQ ID NO: 13420 - DNA, 2300 bp, Homo sapien
aaagtgcatgggaaaaagcaacacaaattacagcaggatctgtgatctgctttttccaaagcaaggtttgatgacttcagcatttaaaggggaaaaagtgagcagtaggggaagggggaaaaaagcagagagggctaggcactgaggcaagcgtttgcattctcgtgaggctttgattagcactcactgaaaccacatttgatatgtgcaaatagaggagtgggggataaagttgattatgcattcatctcatgtttgctggatctacactttgcataagataaagtaaccatgtataattacagctatctatttgggaaaaaaaggaagtcagttttagtgtgacacagttcctaagcctaactttcccattggtcatagagatttagtgtcctgagattttattttcctttcaaagctgccattagtctacacattttgtgtatgagtgcattaagttgtcacagcatctcaagaggtagacactactgtgaccctctgaaagttctagctctgaatctgagctaaagccctataggaaaagacttagaacaaccttgagcttgacccagtgttcctactcatatcaactatgttagaatagcatttctctcttagagtaaacactttgtaggtgctttttaagaattcctcacctaccctattgtaatgaaattattttcctatattaaattctaaatactccattgaattcttttttctatggaggtctataatccacttgaagttgattttgtgcatgagtttaaaagtaaattttatttctctcgatggacattcagtatactgaaatgtttattgaaaattcatctttttccagcctggtgcggtggctcacgcctgtaatcccagcactttgggaggccgaggcggcagatcacgaggtcaggagattgagaccatcctggctaacatggtgaaacctcatctctactaaaaatacaaaaaattagccagacatggtggcaggcacctgtagtcccagctacttgggaggctgaggcaggagaatggcgtgaacctgggaggcggagcttgcagtgagccaagattgcgccactgctctccagtctgggtgacagagtgagactccgtctcaaaaaaaaaaaaaaagaaaattcacctttttccattactttttcttttggattatttgtttatatagacatctatcagattttcaactctttttatttttatggattcttctttattatcattaattttttgagacagagtctcgctctgtcacccaggctggagtgccatgttgtgatctcggctcactgcaacctctgcctcacgggttcaagcaattgtcctgcctcagcctcctgagtggctgggactacaggcacacgtccccacacctggctattttattttgttttatttttagtagagatggggtttcaccatgttggtcaggctggtctcaaactcctgaccatccgccttggcctcccaatgtgctgggattacaggtgtgagccaccgtgcccggcctattgattcttctgtctgtgttcaaatattacatgttcttattttttggagagttcattttacactagacatttccctgcagagactgttctcttcatcactgtgctactgaagacagggaaggataaaaccttgcatgtcttgcacttacatgaatattcccagctgtacttcgaaaaaacagcaggtcatagaacctgtggagacaaaatgacccatcttggatgctagtccaccatgttacttctgatttgccccagttccatgaatgccttctgatctctcatttatttactgtccttagtgtaaaatcatgtcaaccagtgtgttaccacaaaaattacatgctatgaggcatgtagcctccttgtccattctggagggttgcttttaattgccttgctaaagcatgtataccttttccctgtggagtattaaccctgggtctggagagtaacagtgtgaacaactgcctacctgcaaccatccaagggtatggttctgtgtgtaagttccatctataaattaaccagtactgactaaatggattttctgccttcttctttaatttttcagatcctttggcatttgagagttgctttgtgtatacggtcctttaacggagcaaatggccagccaggaaaccaaagtatggacaaggggaaagaagcgtctgtggaggaagttttacaagcgccctcctcatccatttgggtggtgttgcccatatgctacatgtctgtggaccactatgtgtgtttaaagctttttag

SEQ ID NO: 13421 - DNA, 2300 bp, Homo sapien
gaaggggccattcctagtgaggcttcctgttttggtacccctttcctgagtccaaacatgaagaatgtttgtgaatattccagatgggccatgtccccttatcaattggagccccaattagggtttgcatccagaatggtgccttcaggtttggggtatttggatttgtttcatggaggcaccaagactctggatcttctttggtctgcagccagaagcatatttaggagagactacacatctgctcaggtacactggtgggtggcacagatagacacatagagagcagtcattttctggggatccattctataaagtggggtggagtttttccgtttcacaagttagatgttgaaaatgggctggatgtccagtaatgtctgacaggttgcccactcgcatccaagccacccatggccgtccttgtaaatggtaattcccttgctccggccatggcacttccttgctaaatcgtgttccctgtcaagcactggagggagaggccatctctgttctcttattatactgaggtggcagagtagctccctcttattggtctgatgcctcgcttggtagcatcaaggcaatccgggccaatgcagaggccaatgctaagggccccatagggctcccaccgcagtgggagctgttaggggtggagcagaggccaggtgcgttctggctgtggtggttggagctgctaaaacagcttgggtgtaggacatttaaaagtcctaattcttcttcattgctttctgcctgagtttggctatctggcttgtgaagagtcctttttccattctgtcccttggtacagctggcagctggcgtcttccctcatggtatgaatcctgattttcaaaaagcgtgcaggcttggacatatggtattttttctgattttccagacctctgacaaaatgagtctaactgcattaaagactagtattggttgcgtccgttcagaggtcaaaatttataacctaacttgtccacagtccaaacagcactgcaataatagacggtttttctcttagtcaagggctcatagctataggatctacacttagctagggtatgccccaggggcctcccagaggggatagagaccttgtttccctcctgacttggtttctatatccatactgctcattcctgttgaaacagtgatgacaacttttatttgttgtctgtcttctgttctacactgctcatatccttcaaccagagctctatgggttggaaagacttttctagcttcttataagtagtgcaattagtaccactcatggtcctaaaaggaacacttgtgcaaatctcaccacacagctgggacagccaaagagatcagagaataaactccttgggcagctagtggttagcaccagctagcacagcactcccccaccaccgccccgccacgccccgaccggccccaacagcacatcaacttcatcccaggtccatgttctgctgtacttagtaccctagtagagggtaactgaatggcaacaaattaaatggtaaattaggcacacaaagagggcagaggggttggagtcaggactgcctaaatacttatcccatatgctgttaagctttttttcacataaacaacattaagcaccataagcatggtggcaagccctttagataacctatggaatagttcgcatccttcctttccccagaaaaactggcactgttgtgagaagtgctccagggccctaaaaagagtgaccctgctagagcagtggaggctgtttccctccagggctggatcctggatggagtggggcttatgcagatcaccttgcagaggaaagaaggaagaggagagagagacagagatgggggcctaaatgtagatattgtacacttttacagttgcagattcagactgcacagtcccggacagatccccactaaaggtctgggtaaaagtcctgaaacctcctctcaatttcagatgccctcccgccaatcagctgactccaagtggagcaaagcccaggtcttgacatagatacagataacatacacgcccagatgatgtcacaatcagctgtatctaaacagagcagagctcaggtgacatcacagaacaggcagaggcagttcaggggtattctggttgccttacccagctctgaagtctgtcagcctcttcagatgtcacttgccatgtggtaaggaagtgtagtcagcagctggtgcagtgggaagaagagaaaggaagttccccaagacaaaaacatctcggcaggtaaagagaaattccctagagcccctatcatggga

SEQ ID NO: 13422 - DNA, 2300 bp, Homo sapien
attccttcctagcgatacaaatgaactaagacaaaatgcttcttaaaattgatagtgtcaaaacactattggtcaaaatgcagactttttgtggttgtccttatatgaatgcacatgaacctgtcctagaaaccttccattgacaccttcttttaatgtcatcaacacaaaacttgcagaggagctgtcagcaggttggaaagataatctcacagagtgttgcgtaggaatctcacaagaaatgaaatatcaccaaagcttctggttaacagagaagatgataatgaggagaaaatcataagaaagatgaatagtgactcagaagaggtgcatctggatgagagaaatttatcaatatctttatttttctattttttgagacagagtcttgctctgtcacccaagctggagtgcagtggcacaatctcggtccactgcaacttccatctcccgggttcaagcaattcttctgcctcagtctcccaagtagctgggattacaggcacacactaccacaccgggcaaatttttgtatttttagtagagaattttttttttttttttttttgagatggagtctcactctgttgctgaggctggagtgcagtggcacaatctcggctcactgcaagctccgcctcccaggttcacgccattctcctgcctcagcctcctgagtagctgaggggactacaggcacctgccaccacacctggctaattttttgtatttttagtagagatggggtttcaccgtgttagccaggatggtctcgatctcctgacctcaggatcctcccgcctcggcctcccaaagtgctgggattacaagtgtgagccaccgcgccgagcagcaataccttttttaacgtgatttgcttatatttgcatctcattggagtgatataaaacaaatatccacatttatatatgtcgaaaagagttattgtcattaattgtgaggtaaaaattataaggtgtaggaagtatttgtaccatatcttgtcaatgattttattcctttactatggcgtaaaataatgatgtattttacaattgatacaaaaaatatatttaaattacttagaaaacactgtcaatattagcatactgatgttgtgattagtatagacctgatatttatctacaggcattatgtatcattagttcattcatttctcccaaaatatcaaaaggtaggttctattaccactcctaagtacaagttctgaatttgagctaaagccctgcaaaaaaagggctgtctccatagtccttgctcacataaactatgttagaaaatgtttttctgttaaattgtgaatacattgtaggtctaatttaataaatcttatgctagcctatagtcatgaagatattttcctaacataggttgtaaatactgtattaaaaggtatttatatttgggtctatgatgcacctgcaattaattttatgtgtaatgtgaagttaaaggtacatttaacttcccccaatgaacattaatttcctagaacattgattgtaaaagccatctttctactaataactgctcttattaattatttgcatttatattattttgtctgttttgagctttcctttatttcattggttcacctttctatctgtgcaaatattacattgtcttaattactaagagtcttcatttaatacaagaattttccatccacagccctttagcctatctactgtggtgttctaaaaggaagaaagaggctagtaaatcctggatactttgctcctacaccaatattcccagctgtaccttgaaataaaaggatttagaactttagaacattgctgttgttgcttatgtctctaatgttctcttgaatcttgacaatccccgaacactgctccccgctttatttgtttagtccagtcccagtgaaataaattagatgtcaaggctcctcattatggttgcctggtttttggaacctggggtactttgtactcctccagcaacagccagaggtggcagagagctgtcagtcatccctgggtgcctcctgcgcaagcgcagttgtcctcctgcgccgacctcgaatgcggtcctcctgctgcagaccacgcccaccaagggctggccgcagccactgtagctgagctcagagccttctgtgtggtttgcgggggcaaggtcagctgccccctgccctctctctggggctatttgaggaatgcggcctttttgcataagaaaggcttttctctacagtaactgtggtcgctgatcaatgacaccttcctggtaacatttcatattgctttttt

SEQ ID NO: 13423 - DNA, 2300 bp, Homo sapien
attaaagtattaggtttggaatacaactttttgggttgattgctcatatttcttagaacagaaattctcagtgtacaactttaactctgaagaaagctacccatccaatgaagaagtagcaaagtgactgtttgccatttctatcttccttctcaatagatttattgaaacatagcatatacatcacctctccacatttgttgtacttttgttatttctagttcattcttgaggtttctctttaacacagcgactattaattctagcccagttggccaggagctgtggctcacacctgtaatcccagcacttgaggttgaggtgggtggaatgcttgagctcaggagttcaagacctttgggcaacatggtgaaaccccatctctactaaaaacacaaatttagctgggtgtggtgatgggcacctgcagtcccatcaccatactcgggaggctgaggcaggagaatcacttgaacttgggaagcagaggttgcagcgagccgagattgtgccactgcactccagcctgggtgacagagcgagactccgtctcaaaaaaaaaaaaaaaattctagtgctgctcaagaagcctctagaagatttgttcatggatgtttacattgtgcctttcagggtacacttttttaaatcttattttacagccaaatacataattatctgatttgtcagtggttttattctccattgtgaaatgtaaagtaatgatgcaacctataattgatgtgaataatttattttgcaattactatttatgtcagtatcagcaaatactacattcatttgtatagatgatattaatctacaggttttatggattattagttcatttcatcctcacagcatctcaagaggtcggcactagttttactcccaatcacctagtgaatttgatctaaagccctacaagaaaggaatggatgaaacttgattttgactgagtctatctttgaagtctttacttacatcacgtgttttagaatatctttttttgtatggaaaacacattctaggaccggattaagaaatgttactctagggccaggcgcagtggctcatgcctgtaataccagcattttgggaggttgaggcaggcagatcacgtgaggtcagaagtttgagaccagcctggccaatgtggcaaaataccgtctctactaaaaatacaaaaaaattatccaggcatgctggcgggcacctgtaatcccagctactcaggaagctgaggcaggagaattgcttgaactcaggaggaggaggttgcagtgagccaagattgcaccattgcactccagcctgggcaacagagcgagaatctgtctcaaaaaaaaaaaaaaaaaaaaaaaggtattctaccccggaagtcatgttcccaaattagatgtaaatcctgtgttaaattgatttaatatttaggtctaagatccacctaggaatgattttatgtgtaatgtgaggttatagatcagattttatttttccctgtggatatatttcttgaaatatttatagaaaaattcacatttccccaattaatcttataaattatttgtgtatatatgcttgtgtctgatttgctctctcctttttttttccattggtttatttctctgtgaaaatatcacactattttagtaagacacttcatttaacacagaattttctctctagggccttctcttagccaagtgtgctattatataaagaagaaagagtgaaaacctctatgccttgaacctacaccaatattctcagttgtcccttgaataaagagcagaatttagaactcactattactgatgacacttaggtctttaatgttcttgtgaatcttagacaacccccacaacatcattccctgctttatttgcttagtccattcttggtggattttatgagatgtcaacactcctcattaggattccctccttctgaagcctttgggattttctacccacccagcaaccaccagaggtggcagaaacccctgcagacatccttcttgcgcaagcgcagttgtaccatgaatgcggtcgtcctgctgcagaccacgcccaccaagggcggggccacatccactgcagctgagctcagagccttctgtggggtctgcagtggcaaggccagccgccccctgtcttccctctggagctgtttgaggaatgcagttcttttgcataagaaaggcttttctctccagtcattctgcttgctgatcaagaacacttaacagcttcaggctttcctggtaatattcattcttgcttttgtgtttttgtttt

SEQ ID NO: 13424 - DNA, 2300 bp, Homo sapien
ttggtgtccacaatggaaaaaggatattaggaaaaaaaagaaatataagatatagaaattagttaaaacaatgagaataaaaaatgaacacccaattcctgctcctagaagaagtagtactctaacatttggtgaagttctaagagccaacatttttacccagcttatactaggacctgttctaaatagtattttagctcatttaattgttaagccattgtataaagtaaacagaatcccttcttttgttacagattaggaatttaatgcacagagggttagataacttgctcaaagtaacattgtggtcaagagtcaaagctagaatttgaatcaaaagagcctgagtccaaaggcatggttttcatcactggactataatggtgtgtattctttcataattttttcagtgtaaaactgaacatacagtatgcttttattttatttatttttttgagatggagtcttgccctgtcaccaggctggagtgcagtggtgtgatctcagctcactgcaacctccgcctcccacgttcaagcaattctcctgcctcagcctcccgagtagctaagattacaggcatgtgccatcacgcccagctaatttttctgttttttgtagagatgggtttcaccatgttggccaggatggtctcgatctcctgacctcgtgatctgcccacctcggcctcccaaagtgctgggaatacaggcgtaagccactgtgcccagcctacattttatttttcgattgactcccgtgatcagagtcaacttcccatgttattttatgtgaatatgtatcaatgaactattagaaattgcaatgtttttgtaggtcaaaacaattcaatattgacaattttatatgattcagcctaatacatcattttttccatcagccatattgcatgttattatttatatatacgtttatttagttagcctatctgttctctgtgaggaacattacacagtttctgagattttgttacgatagaagtcagcattgataagcctctgcgcacctgttttaatgtaggatcattgggaactgagcagtagcttacagggcttgggaggggatttaaccatttagtcaacctccactcacatcaccctcccttcttcgataatgggcaattgagaaagggcaaatgtgtgtaaaaactatgcagatgcagtttcaggattattttcttcttttctgcagtgtcttttcccaagctacatcagcgtctaaattttggagttactgatgcttccgttatttctgcagatagaatattatgtcgtaaataatgtttacttgtccattagtattatataaaagtgcctgtttctccccactccagctatcattgattattggtaaaaattttaatgtatccaattctaataggcaaagaaaggctctcctacttagatcttaggtgggggtctaagttcatatttttgttttacaaaaattgaatagccagtgtttttgagttgaatgatctatccattccgtataggagagtttaattatattgtgattttgggggagataattttcacaatttaccccctcaaaatgtagaaagtagaaaaagggtagaaaaatcgcaccaaatttgaacaatgtagcatgcttttagagttagggatattttcttttggaaggatttcaagtctggcgtatttgcattgattgtggttatggcgcatttaacttttccaaaccagcttttttgtaccgcacataggaagacctgagggtgagtgtaaattaggattgtttggccagtggtgtgtgcaaaaatttattgtagaaccaagaattatttctttagtattttacacattttaaaaaacaggtagacatgtccattgatcccaggttgcttatggtttctagaggccccctctcattgcaacagtgctgtggggccctaggggtccagtagccccctccccccaggtcattccggtgagggagggagctgggacccctgcactgcggcaaacaagcacgcctgcgcggccgcagaggcaggctggcgcgcatgctcaggcggggatgtgtgcgaagcctgccgctgctgcagcgagtctggcgcagagtggagcggccgccggagatgcctgacgcatctgtctgaggagcggtcagtgacgcgatggagcgggcaaggtcagctgtgccggtggcttctctcaagagacagcctggggagcggccacttttattcatcagatattccaagtttttaggacttggagtactgaataaacggaatttgggccctaaagtccttt

SEQ ID NO: 13425 - DNA, 2300 bp, Homo sapien
ggggtctaagttcatatttttgttttacaaaaattgaatagccagtgtttttgagttgaatgatctatccattccgtataggagagtttaattatattgtgattttgggggagataattttcacaatttaccccctcaaaatgtagaaagtagaaaaagggtagaaaaatcgcaccaaatttgaacaatgtagcatgcttttagagttagggatattttcttttggaaggatttcaagtctggcgtatttgcattgattgtggttatggcgcatttaacttttccaaaccagcttttttgtaccgcacataggaagacctgagggtgagtgtaaattaggattgtttggccagtggtgtgtgcaaaaatttattgtagaaccaagaattatttctttagtattttacacattttaaaaaacaggtagacatgtccattgatcccaggttgcttatggtttctagaggccccctctcattgcaacagtgctgtggggccctaggggtccagtagccccctccccccaggtcattccggtgagggagggagctgggacccctgcactgcggcaaacaagcacgcctgcgcggccgcagaggcaggctggcgcgcatgctcaggcggggatgtgtgcgaagcctgccgctgctgcagcgagtctggcgcagagtggagcggccgccggagatgcctgacgcatctgtctgaggagcggtcagtgacgcgatggagcgggcaaggtcagctgtgccggtggcttctctcaagagacagcctggggagcggccacttttattcatcagatattccaagtttttaggacttggagtactgaataaacggaatttgggccctaaagtcctttgttctggagaaccagatccggaatgttcagaggcttgctgttgtgccgttctgccccgatggtatcctgtccgctcgcattggggcgcgtcccccatccgcccccaactgtggtgtcgcgacaggtcctattgcgggtgtctgcggtgggaagggcggtggtgactgggagcatgcggggtaaccgcagtgggcaagggacatgggtggaggtgggtacatcagggtgattgcagttccgtgtggcgagggtacgtggggggaccagtgcatagggattttaggcggaggtaggtatattggagtgattgtggcggggcgaaggtacgtgaagtgatcggtatttagggggtgttgagcgcaggtaggtgtataatagtgaccactgcgtggtggagcagggtacgtggggcgactggggggggaattcgtcgcagtgaccgaggcgaggaggctatggcagtggaccagggggatgagtcggtgtgacagtggtgggggttgtgttggtggtcgcggcgcggggagagtccgtaggaagtggctgggaggtagggggaaggcggcgacagtgggtattggcggcggtgggcattggcagcgggtaggcatggcggtggtggactttggcggcggtaggcatggcggcggtgggcatggcatggaggcggtgggcatggcggccgcggggcctgtcgctgtccggagtgactaagggacgctgaatgattgctgtgtagaggagggggcatcagaaggggcagtagcacagtccgcagcctttaattttcctgtgacctgcgatggtcatctggtttgcctactgtggtggtggtgcttttttattaaaactgcgcaatgcctacactgccgcaggggctgcagaaatgcgtggaatccttgcgtaccctttaggaaccctcgctttagaggctatggcataagaagactggaatgatgtgcagaacttgcatttacagatcttttgactgataggccaggtgatgcctgggggttacttttttttcattgtttctctctgttgggaaccaggtcttggaaggctatgtcgaaataacctgggggtctgtgttgcgtcactgccattgtgcagctccttcaagatggccgccgctgcagcggcttagatctgcgcaagcgcttcagcgggggggtggccgcttcctccctgtagagccgccagtggggagggggcaggtggtgtgtgttcagcttctgctgtttcggagtttcagccgtaccctctttagggtgcagtggtaaggagaggaagccggccaaggtgggcggctgccccctccccaaagtgctgcttgggaaaggatgcaggttgcgcagacgcagcagaggtgacagtcgcctccgcttgcagtggggcgagacgtggggcaggggagcgagggcttacgcagctt

SEQ ID NO: 13426 - DNA, 2300 bp, Homo sapien
gatgtgtttcatacctctggaccgctaagcttgtgggagttatttatatcctattgctcaaggtcattgccaaggtctgatttttcacaaaaaaattccaacctctggcataaatgggttaaaaacggctttagtgatgtagtgctgataaacataaaattcacccaatttaagtgcatgaagcaatgatttaagtaaatttacagaactgtgcaatcattgccatgaactactctggaaacattttcatcaccacagtaagatctgtcttgctcattcacagtcatgatccttgttgtctctttggatggctgaaggtcccaagtgttgcagtgctataaaaatggatattgctggctgggcgcagtggctcatgcctgtaatcctagcacttggggaggctgaggccggcaggtcacctgaagtcaggagttcgagactagcctggccaacgtagcgaaattccttctctgctaaaaatacaaaaattagccgggtgtggtggcgggcgcctgtaatcctagctactcaggaggctgaggcaggagaaccacttgaacccgggaagtggaggctgcagtgagccgagatcactccattgcactccagcctgggcaacagagtgagactctgtctcaaaaaaaaaaaaaaaaggatattgctaatgagtctcatataccatgttttcttggatttagactgctttataaagaatcataagataatattcaaaacttctaagttatagtccttaaactcttactcatatttaggacagaaactacatttaatttttgtggaggtctttgtttgcttatttgaaaagttcttttgagatctttataggttttatttaatacattttttaatgtacagacatcagattcatggccactgaatgacagccaggcattagagtattctttttttttttttttttttgagatggagtttcactcttgctgcccaggctggagtgcaatggtgcgatctccgctcaaaaagatacttttgaatccttttcaaaagtaatttgtgtttcattttttaattagtatgataagcacttcaagaccctttacaattctggctagatttggttgccatatttaatagcattttataaataatggagaaaagggaaacattatgcatgcttgattacggtcatgagctgcattaacaattccgttcaacaacagactgcatatgtcagagcagtcccttaagattacaaaaccatgttttcattgtgccttctctctcttccccaccacccccaaccctgagatggagtcttgctctgttgcccaggctggagtacagtggtgccatctcagctcactgcaaactctgcctcctggtttcaagcgattctcctgcctcagcctcctgagtagctgggattacaggcgcctgccaccacacccagctaatgtttgtatttttagtagagatagggttttcgccatgttggccaggctggtcttgaattcttgacctcaggtgatccgcccacctcggtttcccaaagtgttgggattatgggcgtgagccaccacacccagcctcttctctgtttaacattgtattgtgagtgttcatagtatgcaggatagtaacatgatatacaggtttgtagcctaggatctaccatattgcctaagagtatagtagactctgtgtatcctctaggtttgtgtaagtacactgttcatactgtgatgaaatcaccaaatgcatttctcctaatgtgtccccattacgtgacttatttatttattttgagatgaagttttgctcttgtccctccttgttgcccaggctggagtgcagtggcgcgatctcagctcactgcaacctctgcctcccaggttcaagcgattctcctacctcagcctctcaagtagctgggattacaggcacccaccaccatgcctggctaatttttttgtatttctagcagagacgggatttcaccatgttggccaggctggtctcgaactcttgacctcaggtgatccacctgccttggcctcccctggtgctgggattacaggcgtgagccacctcacccggccgttaacgtgatttataactttgtccttcattacttgatctatgaaagttgtttatgtgagtctatatatatatattccatagtcatgtgttctcttttgacatgggaagtcttaggcaggtttataacacacttggctcttagtggggaaagattacctgccatcatcttgaagcgaatttaggggaagaaagaatattgcaaatgacaacataggtat

SEQ ID NO: 13427 - DNA, 2300 bp, Homo sapien
cttgttgattcatggttctcttcagtgataatattatatgggattcctacccacagccacccaatatctcagtggagaaatgcaggtttggagagaacatctgaatagaatcacgctaagatggtacatttgcactgagaccattgttatgtggcaggcagacatgaagtatcctaggattgatcagtatgccttaatgtaaatagctgcatatagacctgatttcttaggctccccacttcaagctcttgaatattgtgttgatatccttatcaatacactttgtcttgtgttctgtgttgtttttccaaaatataacgagctcctacttgacagggattttttctttctattgtcttacgataaaatgtcaagataaaaatgtatgagtttcattaaagtttattgaataaaatttgtgatggaatgagtgacagcgaggtcatgaatgagagagaatatggaaataatggagaatgtgatattctgatagtcatgcaatattctttttgatataatatgtaacatatattagtatgttatattctatgtattatttgtcatatattattactatatcctgttgctatatttggataatttgggaatctgccatgtttgatgatgttgaaaagagaacataaaatgtagtgatttcttaataaggtgtagaggtgtaggtattaactctttaagaatatagtgatttattttaaaataatgataggaaaggaccataaaaatgtctgaatttgggaaattagaaaatgttttctctctggggctttcatatgtctgttctatgtgaatgtcgctttgccatggctccctctttgctaactcttcttaacccctgcagagaaggaagtgtagtgatggtattttgagtccatcttcaggtttattgggaatgcaagggaaatgagttgttaccaatgggagtaaagggctagttgctatgccagtagctgctacttttgacactgcttgagcaatctgaatggctaggtttgaatctggcttctcagtcagaattttaccttcactctaatgctgctttttttcaaatcacctatatttacataaatatgaaccaacttcagtgatcttaattctttcccgaagatccaagtttctttccatctgcctgaagaactttctttagcacttctggtatagcagacctactgatgataatttttcttttagtatatggtgattagtttactttttattcaactgtgtctttttttgaagtcttcttcattgaaatatattgttactaaatatagaattaatggctttctttaagcacttcaaagataatccactgttttctggactccgttgatacttaagtctttatttttgtgtaattctttttctttaaatgtgccatttttcatttttctctgactcctacctactaagatatttttacctaagtattgagtcagttttggttatgatgtgactcagtgtgtttttatttatattgtttggttgtttgaacttcttgaatctgtaaatgttgtgctttatgttaaatttggggggatttcagccatttaaaatataacttttcagtctcttccccctgggactccaatttttacatatgtattagacctattaatatttttctatggatacctgacattctttttaaatcttatttttggtgtttttcactttgaacaacctaataatttgtttccatccatgttcactcactgtttattctattttttcccaatctgctcttaagcctatcctgtgaattttctttttaatttattttattttttagttccagatattttctgctttttgtttgtttttgagacagaatctttctctgtcacacagggtggagtgcagtgtcatggttcaccgcagccttgacctcctggtctcaagtgatcctctcaccttaacctacccactcctaagtagctagaactacaggtgcatgccaccacgctcagctaattttttatttttgtagagatggggtcgttgtgttgcccaagctggtcttgaactcccagactcaagcagtcttcctgcctcggcctcatgcccgcgccaaccagttctttatttttaatattatgttgtatttgatgtgctatcctattcatttagtataagcacatttttctttatgtcttcagcataattatatgctttttcagaattttaacatcaggactgcttccagggtagctttattgccctttgtcttaagtatggattatagttttcattctttgtatgtcaagtaattttggattgta

SEQ ID NO: 13428 - DNA, 2300 bp, Homo sapien
tcctgagccatgagttatccatggtgtggtggctcagcctgggcaggacagtaccccagagaaaaggtggtagagggctcacatggacacgcgtgtcatcagtggtcttgggctgtcatttggcagtgatgggctttccatggatttctattgtggatgacaggttagccagtggggccttcaagggcagatccaaggagcatgagtgttgggctgtagcccgtggccctcggtcacttctggtcttcccggcagaatagtgggctccaccgttgtgcacatcttcctggaaatggtctcttggccctccattgctgagcagccccacatgctgcagctcttgtgagcaaataactgctttggatcttccgtcctgctttgaaagtggcttccatcctgaagactttcagagggaatgtgccctggccctggccctggctcggaactctcctgtgggattcggtcacacttggagctgtccatgggggtctgtgtgcagtccagacaatgcatatttaatcctaggtgccttccatagagagtcccttgatttgagttgcctctactcctctgcatgttggtgatactcaagtgttggatttagctacgccctaggtgtgatgaactgtttcaaccccgttagtctcagcgtagccaggatagtcatgccatgttgaagggcatgcagatggcttaggaaagttggaaaggattggtcattctgcggctcgtggctcacttagtagccatgtgcatgtagacctggtggtggttgtcagatgtcgttgagcaggtgttggggaggatggtcctgcatccaagttggctgcgtggtgggatgttgcgtcggaggtcggtgcaaggaaggcctttgagtgtgatcgatgcaaggatgatggaaggcactgtgtcctgtctgcctggtgtttggggcgttaggcagggatgtcccatgggaaaagcagccattccctttgggtgtcctgaggacatggtgcaggtacatggactgagtggaggagaggaagcccgtgtcttgaggtcatttgcctaggttgggcagactgcctgtggccttgatgctgagtttcagagtgacgtgctggccgttgcaaaggcgccctccagtgctggttgtgtttggttttgtgccaggtgtgcctttcctgggagtgctgccagagacagtgtctggtcacgacatcagatgccccgtgaggaggagcttatgctcaggctagggatggtggctgttatgtgagggcccttgggcctatgtctgcatggcctcgaggtcagagtttacatcctgctgattgaaggccttggtcttgaattgttgggttggtaggggctcaggtctggaggccgcagactatgactgcatgttgccatgttgggaaactcgtgttgggaaacacatgtgcatgagggagatacacacacacacacacacacacacacacagccactcagcaatgtgtgtgtgcgcggtcggtctggcgccacacacagctccaagctgtttgcagagtgccactggtaaggtacattcatggaaacagaggtcactcatggaggccaacagaagcaaggcgtgcaagttgccacgcatgaaagaatggcactgaagtagtgaccagtggacctgggcctgtttctcaagcgtacatttgatttctttatacttctcaggggcagttgccgtgggaggcccgctgcctgctggaaggaagatggtcagttcttctgaaccacaaaggccctgcagagtcctggagtctgtgtggcctggcttccagggttcacctcatgctggtggattgctcaggatggtaagcattcctctgccccatgtgctgagtgacggtgtcttttggatttccaagacccataatgagctgtttctcatgaggccactaatggcatggtgagttgcattccttgagcaaatggtctctgccttttgctcagtgccatggttctatcttccccagggtgccgaaggtctttaaggtcgtcagctcacctactgcccagcctgtggtgtcaaatgtcctgcctcttcaaatgtgtttggatcgatgatgagtccccccaaaaaaacattccttggaaaagctgaacaaaatgagtgaaaactcataccgtcgttctcagcggaactgaggtccagcgcgttgcctccagcagggactgttggagtgagggagagcttccactagtccctataggttccaccacccagggcatccgcaggtaaatgtctgccatcacacgcacattaggaacattccctt

SEQ ID NO: 13429 - DNA, 2300 bp, Homo sapien
gtgtttgtgcttgggaagagagcacaaagccccacctttgctgttttttccactcattttcatcattgttcaaggacattgcagttccggttttatccataaccagggaagccagagacaggcagatagcagatatgccatagggggccagatgacacggccctcatgacctgtgaatgtgtctgcttttttgaagcacactcgtatttccgctgcacttcccaggtggtgttggcatgaggaaaggaggtatcttcgagggacaatcttcttcttgtgcgatccttggagatgccatgaggcccctggacacatgtggtgtgggctcctttggaggctgttgtatcccttctgaatgtaagtgtccactttccaaagtcctgattttcctcatttttgggcatgaataatgtgcatggatcgatgatgacttccatatatacattccttggaaagctgaacaaaatgagtgaaaactctataccgtcatcctcgtcgaactgaggtccagcacactgttcatcaggggctagagagagagacaacatccatttgttgacacaggctgcatcaatgcttgggatgggatcgtctttgggtgaagtggagtagctgggcattttggacttctgtggctgagagacagcttggttgaagctcttccctctgtgtggctatgtgtgttatcgattcataccccttggctcctgcactccccagaggaagacagttactgctgcatggggacacagcacaatgttgttcccaggcacttcttcggctcacttttatcctaagtcggggacatgggagttcctgtggtgtatgggtatcatcaagggcaggcagtcgtgaggagggtggcaatactgatttgctttctgcagagaagcccagagagggtatccacgttgaattgtatgtccataggagggggaaacccaagtcccgtggcccctgaagcatcctggcagtggaaggggagagggccgtgcatgcgtgtaccacacagccttctgtctgggtcacagagcgacgactgtgagcctctttcgggcattgtagggtgcccatagtccatttcatgatgacctcagggtgctgggatgggaatgtaattgtaggtccacgtgctcctgcatctctgcagactgacttggtttggaaggtctgtgttgaggaacctctgtgggatacttttccttggtgcatttgaggtgtctgataatgagtgtgtgggtttctgtatcctggtgacttctactcagaaatgtgacccagcaaggtctctgtgcttaaataccttagtggcttgtgatgttaggttattttcaaattcctcctaattgtgtgtgacaattcacacaagtctttgtgaaattgtccttgaattgtatgacagggctagtgtctgtaggccagtgatggataagttttggactccacagccatgttcacagccaagtggcttaagatgtatggtgttcttagtcatagtgccttggaagccctgtaggattcagcatgtcttgtgctcttctgggtccccgagctgtacctttgaggaaaacccagaggtggaggttgatttgtgattgagcatgtttctcagtgggaagagtgtcaaaggagcctggggtgaaagtacttcaggaccaaaggaaaattgcccttcactcaagaagaggctttccttgaacctgtccccactgaaatatcctcatgggcttcatcttctctgatggccaaaagcaggacttttgattcagaggtggcaaatgaatggtgttgagagagtttgttatgcttggtgctctgtagctggaaggagccctcaaaattattgtgtgcatgatagcttcatgcctgcttacacccatgcacatgtcccagtaagaggggctgcctgtgggagatacatacacgatacaccacagtgggatgaattgtatggcccttgcaatgtgtgtacctgcctgctgttgtcaaacacacctgtttttcctctgaactttccaggtggcgtgggcatagaaggaaggccagtggccacgagggacaatcttggtcttgggagatcctggaaatgatagggagtcccttgatatgtgtggcatgggctccttcaggtgctagtggattccttaggatggtaagtgtccatttctcagaagctccagatattcctcctctgcagggacaaagactgtgcctggatcgatgatgacttccttatatacattccttggaaagctgaacaaaatgagtgaaaactctataccgtcatcctcgtcgaactg

SEQ ID NO: 13430 - DNA, 2300 bp, Homo sapien
tgaattccacaaatttaagtcttctgaagaaaccaacttcctctaagggatgagggaatgcagagctaggacaagtcaaacctcgctgtgcagagacaggctgccatctaactcttcctgtgccacctgcacattcacctgctcctgcatagttatgtgtgctaccctgctctcacagaggtaaatccttcacacaaggaatctcctgtgcacaggaggccgcactcccctgtgactccctttgcccaaaggggaccccatcctaagcctggacaaacccctcaatggaacctgcgtcaacaaatggaagttttccctctctatctacccactgttggagcaatgtgctggacctcagttcaacgaagatgacggtatagagttttcactcattttgttcagctttccaaggaatgcatgtataaaagtcatcatcgatccatgcacagtctttgtacctacaaagatggaatatcagaagattttggaaaatggacatttaccatcctgagggatccaccagcacctgaagaagcccacgccacatatgctgcacgtgcccaggggctccccaccatctccaggaatctcccaagacaaagatgatccatcgcagcctctggccttcttccatgccagaccacctaggaattagaggcaaaacaggtgtgcttgagaaaggcaagcaggtacacaggtctcaagggccatgccattcattcccttgtggtgcatcctgtatctacttcccacaggctactacagaaggaaccagaggcactataattcatgggtgtggtctggtttagcaacacctaagttttgctgacagccgtgagtgacaagatacaaacaaacccactgcttcatgcagttaaaaataacaacaaacctctgtaggtctgcaatgcttgtaactaagttctggtattccaagaaccattgccagtgatcaaggaacatatttcaaaggctcactaatccaagattgggcagaaatgtagaatatgacctggcaatttcatctgtgctacaaaccacagaaagcagaatttatagaaaagaaaacggtgtcttaaagaaacaaattaaactcttgagagaaatccttgcacttaaaacctgaaggatggttccatggaagctacacatggcaggaatgaggccccctgtgtaagagaaaagttggcctgtgaatgtctgctggacataaagagtccagtgggagccttgtggatatagaaaattatccaacactgccttgatactggacacaagtccacatgggataccctaattttgtgctctccctgtcacacaacccccaggcagtgaatcctgcaataagatttaggaagaaaactgcctttgaccttaggcaggaggtcaacactgccccaaaaccgacctctaacatacttcttattaaagggccccaagagaggtatccacaatgaccagacagtgcccccaaaacaatagaaattccagtagcactaggatagcagaatgactcagacttagcactgcagggagtatgagtacaaccacaaggacataaaatatctaaaaaagacctcctgaaagtttccagatcactgagattattgcagaaagagatgcataccagacttcaaacataggagagaatagggtcacttacgtaaaccaatatattttggttttgccactgttcacttgagctaccatccacactgctgttacatcaccacacttaatgttgggataaccacaacatttttttttctgatatcgacctgatatactccaataaaatgttccctggagaaaaacacgtgtgactggggatggagcaaagactgtcaggaaacaaaagcaatctgctgaaaggccctcccatgtagacatcagatcatattccattcccagcaccctaaggccaacatggcatttgtgatgtgcagtacacaccatgcaaaacagacgcgcaaatgtggcggaccatccccatcttagggtaccaagtcaacacatgtatggcgctttctcattcccacctggagtatccatcaccagccatgggatttcagtttctccctggagacacacaaatcataaatggagccgatctacagggtactctccagaaagaaaataagcatcaccaacctcctcacaactgacttccactgctgctacgaaaacaccatgggcactaaaaagtcctcagccatgaaaaaaaatgagccaaagaacaacaaagatgtggccttgggctctcttcccaaccacaaggagctatctacctctggggaaca

SEQ ID NO: 13431 - DNA, 2300 bp, Homo sapien
actgcattccaacctggcaacagagtgagactccatgtcaaaaaacaacaacaaaaaacactccttggaaaaagtataggtacattctatataggattagtagactgtcagaatcacttgaagatgttccgaaagcatgacatatcaacaaaggacatgtgagtctagaatggtgatccctaggacaggccatattactgcatgcaaagcaagtctttgttaaccttatgacttgctcaggaagcaaagtgtttcatgtcctaataggatagtagtattttctgttatgttacattttaggaaattaggagttttgcattgtcttgtaagaaggtattttaaaaattttcaatgaaaataatgagaaataggtttccagtggttttatgcttttggggaagaggttactgatgtttagcaaaagatgcttatatattcttaatagaacaaacctgagaattagttcttaaagagttaaggcccataaaagaaactgtaagtgttggtactcttgtagctgggccacagatcagatccttagtatgataaaatttggtatttttgtgcttcaatttttggagaccattcaatgatcacttacattttatattgtctttcattgtgaaacatatattatagcagaggtgggagtcattaaaaattctacatgttgtacactacatgtataagggtatatttggcgcaatggaggtaggattgtctgtgtgcctctaaaattaacctctcaagtagttaatctgatgatgacaagtatgtcactttattgataaaagggagaattaagactattctcagtattatgttggtcagtacacaaaatatatcatttgtttttacctgtgaaatgaaatatctttcatcctattagccagaagggagaaagccttggcctgaaaataacacttatctcaaaaagttgggaaatgtggtccaactctgtgcccaggaaaagaggaaatagattttgatgactacatagtctctgcactgcttgccagctcataagtttacttctttgcactgtttgttttcattgctcaaaaactattttctgtcactctatgagatttagtctaacctgattcctggctgtggaaagcagtttctacttaagagccgatgagaaatggtatattcttctcaatcactcacagaatgactaccctggaacaaactaggaagacccaaaatgaaccagtttgattttaatacatacatagatgctgaaggagcctttttttaagaccttgccttcttagtctttggagaacagagtactgaaacaagaaaactcacagattagtagtatttctgtgtgttctacagtgaggttttaagagctgtattatgattaatcagtacatgacatattggttcatatttataattaaagctatacattaatagatatcttgattataaagaaagtttaaactcatgatcttattaagagttatacattgttgaaagaatgtaaaagcatgggtgaggtcattggtataggtaggtagttcattgaaaaaaataggtaagcattaaattttgtttgctgaatctaagtattagatactttaagagttgtatatcataaatgatattgagcctagaatgtttggctgttttacttttagaactttttgcaacagagtaaacatacatattatgaaaataaatgttctcttttttcctctgattttctagatgtgacttacttaacagaagagaaggtatatgaaattcttgaattatgtagagaaagagaggattattcccctttaatccgtgttattggaagagttttttctagtgctgaggcattggtacagagcttccggaaagttaaacaacacaccaaggaagaactgaaatctcttcaagcaaaagatgaagacaaagatgaagatgaaaaggaaaaagctgcatgttctgctgctgctatggaagaagactcagaagcatcttcctcaaggataggtgatagctcacagggagacaacaatttgcaaaaattaggccctgatgatgtgtctgtggatattgatgccattagaagggtctacaccagattgctctctaatgaaaaaattgaaactgcctttctcaatgcacttgtatatttgtcacctaacgtggaatgtgacttgacgtatcacaatgtatactctcgagatcctaattatctgaatttgttcattatcgtaatggagaatagaaatctccacagtcctgaatatctggaaatggctttgccattattttgcaaagcgatgagcaagcta

SEQ ID NO: 13432 - DNA, 2300 bp, Homo sapien
aaatacctacttacattttcaccagggaagtcactgtagtttgggagaacatgacattatctccctttctttactgaagggtagcaatatatattttaaattttctagattctgcatttccattttatttttacatgttttcactttcatattttgcatagtgctaaatctgtgataacagtttttaattttcaggtggggtttatagcttcatagatagcaaaatgtctttaagtcatgtttatgcaatttttacatgtgctttgtgggttttcttttttctctgtttgcatgcagtgagtggtaaatttgcatggaacatttgaaaaataagcaccagaatgaattgaatgtgtgtgaattatcactttttgtcacctacctggacagagagtgaaagttcttctgttgagacaaaattggatctcgtgtgtttcttcacttacttgctgccttgttaattgttgagtttctcatgattagcaagatgtaaactctggcattggtcatctagtcctacatgttagataattctgtgaatgttttgaaaatcagctgaactatttttcttataattttgattctttgtagttgttatttccatgcttgtgaatttgggaccaaaaggaatggctatgacttatgtttctttggatccagtagtttattctactgaaattatggtaattttatcagttagtagaagcatagactctttagtgttgaatataatgtcatctaacttcttacatggtcacataattcctccctcagttttggtagctctcctgaaacagccataataggacattaatctgtgtactttaagttgacagagtaaaaggaatataagatttcacgtgatggaacttaaaatattccatcttgtgacgtggaactaatgaggaggtttagtgacaagttttagatttaagattctacactttggagcctctttttctttttctttttggtttttgtttgtttgtttgtttttgagacaaagtctagctctgttgcccaggctggagtgcagtggtgcaatttcagcttatggcagccttgactctcaggctcaagtgatcctcagcctcccaagtagctgggactacaggtgcatgccaccacacttggctaattttttttaaaaaagtttgtagagagtagcctcactatgttgcccaggctggtgttgacctcctgggctcaagtagtcggcctgcctcagcctcccacagttatgggattgattacagtcatgatctgcctcactcaggctgcagccgctttctttcagtgtaacactatctttggatattccacttacaaatttatttttaagtctcccatgttgttgataattgggaaaaatagtttttattccagatagatattctgtgttaactataagtcaaatgtttacaagctgttaaaaatgaaatactgattatgtaaaagaaaaccggattgatgctttaaatagactcattttcctaatgctaatttttaaaatgatagaatcctacaactcttagctgtaaaccttgtgatttttcagctgttgtactaaacaacttaagcacatataccatcagacaagcccccctccccccttttaaaccaaaggaatgtatactctgttaatacagtcagtaagcattgacattctttatcataatatcctagaaaatatttattaactatttcactagtcaggagttgtggtaaatagtgcatctccattttctacttctcatcttcatacacaggttaatcacttcagtgcttgactaacttttgccttgatgatatgttgagctttgtacttgagagctgtactaatcactgtgcttattgtttgaatgtttggtacaggaagcgagcagctgcaaagcatctaatagaacgctactaccaccagttaactgagggctgtggaaatgaagcctgcacgaatgagttttgtgcttcctgtccaacttttcttcgtatggataataatgcagcagctattaaagccctcgagctttataagattaatgcaaaactctgtgatcctcatccctccaagaaaggagcaagctcagcttaccttgagaactcgaaaggtgcccccaacaactcctgctctgagataaaaatgaacaagaaaggcgctagaattgattttaaaggtaagatgttttattttcaattgagaattgttgcctgaaaaccatgtgggagatttaaatgtattagtttttatttgttttttcttctgtgacataaagacattttgatatcgtagaaccaatttt

SEQ ID NO: 13433 - DNA, 2300 bp, Homo sapien
aagtagtaattaatatgttacagtttggtggcaaacattttgatgccaaagttcacatattctcttgcttagggaacagaaattgggaagatagatgtagttatcatttgataatgtatttaaactctatcccatttcaggatctcaaaactttgtaacagttacatattgtacttctaagacttagatttgtttttcttcttgtgtcttacctttttgcagtaatatttttattttcctatcatcatgtcctcattttttccctctcttctctttccctgttaattttgaaagttttgctgcctacgtgtttgaaaacttctaatctgcctctcttccctcagtgccagcaggtttattttttgttttgcaagccagctctgcctccttacagtatgacatctgatgctggagggtcgcactttcaaaaatgagtcagctggtacatggggttatcatcaatttttagctcttctgtctgggagatacaagtttggaagcaatcttggggtacttacccacaaggctggtggagaccaggtgtgtcacataggtgatttgcttgctccctgggggagagggtggagtgaaatttttgcatttgtgtcacagccaagtcactgccacctccagcatgccccagtttttagttgttatgtaattttgtgcaaaattgaaaatttaaatacattgcaaagaagatctaaaataaatatttgagctgctggagtcttttttttttttttttttccttttccattcttgtccttggaatctgaatgaattgcagtgagggtaattttgagagtctgataaagaagtgaggggttgttttttgtttttgtttttgtttttagctaagaaatttagaaaacaggtttgtgtgtgtgcgtgtgtgtgtgtgtgtgtgtgtgtgtgactgattttaagattcttgttagagttgcttaaagttggaagcctaaagtcagtgagaagttcacaaatcaggactttgtaatgccaatttgaaaatttagcttttgacctcaaaaaacattttttatctagtttgggaatttctaagtgttagaaatcaatattatattgactcattcattgttgctgatgctgtttataaaagtgaatagatagggaaatactgattcatatctcgtgaaatgaaaatgaaaggctttttagtgacttagaattttaaatatttctacatgagagagcagtagtatatttagaaataacaaagtaactggcaactgtttaaaactgaagttaattcacagctatccagtgcaaaacttcacctcaggtgatacacttttgacaggtaatacatacagtaagtgtatttttagggaaacagtttcattgttgaaccaagataatcatcattagaatgttgtatctgatttaagtgtctttaaacttaccaaggtattagattttagtttgaattgtctggagtagcggtagcggttggcacatttgttcttaaagggccagaaaataaatattttaggctttatgggccatgtggtttctgccacaagtcctcagctctgttcttttagtgtgaaagcagccatagatgatacctaaatgaatgagtatggctgcatcccaataaaacttcatttacaaaactacatggctggcctaagctttagtctgtctgcctagggagtagtttactgagccactaatctaaagtttaatactgtgagtgaataccagtgagtacctttgttaatgtggataaccaatacttggctataggaagttttttagttgtgtgttttattacacgtatttgactttgtgaataattatggcttataatggcttgtctgttggtatctatgtatagcgtttacagtttcctttaaaaaacatgcattgagttttttaatagtccaacccttaaaataaatgtgttgtatggccacctgatctgaccactttctttcatgttgacatctttaattttaaaactgttttatttagtgcttaaatcttgtttacaaaattgtcttcctaagtaatatgtctacctttttttttggaatatggaatattttgctaactgtttctcaattgcattttacagatcaggagaacctcagtctgacgacattgaagctagccgaatgtaagtgtaacttggttgagactgtggttcttattttgagttgccctagactgctttaaattacgtcacattatttggaaataatttctggttaaaagaaaggaatcatttagcagtaaatgggagataggaacatacctactttttttcctat

SEQ ID NO: 13434 - DNA, 2300 bp, Homo sapien
tcccatttattggaatcccctgcaattatttttatatattcaggccaatcctcacctaatctggattttgaagccctgcgttcatagctgcataggtatgggctcaaacattcatgttttaaccgttggtattcgcagataccttgctgttttatattgggttctgaatccacactggtaaccaccttttacgcttgactattgttgctttgaggatgttaattatgaaaggtttcttcctcctaatttcctcatctttccgtagttgatgcctcagatttggcctggataggggaatcgtgaggggaaagaactagttgcacaaaatgatcttttgatactgggatatttcagatgtatggtatctttgccagaactacagtgtcagtaaagaggcctgctaaatttgaactgtgacaatcagaaaagttcagctaaggccatgtaaggggttaaaaagatatttggttgagggaggaggatatgctttcatcttttgccatactttttcatgaaattaaatcttagtagatttatggccaagaaagagtagaatatatttttatgcagtacttaaggggttttgactgatgttttttattattattatactttaagttttagggtacatgtgcacaatgtgcaggttagttacatatgtatacatgtgccatgctggtgtgctgcacccattaactcgtcatttagcattaggtatatttcctaatgctatccctccccttccccccaccccacaacagtccccagagtgtgatgttccccttcctgtgtccatgtgttctcattgttcagttcccacctgtgagtgagaacatgcggtgactgatgttaaatgactttacgtacatacagaattagtgggactagactttgtgtttatgtgtgtgtgtttatgtgtatgtatataactattccattaagcagttgccctccttggtgactgattgctctatcagcttaggaatcttttgactgaatttgtccgtatttgaaagatctcaatctgtgttctgaatctttactcatttacatatacttaaatcttgaaacccagtatagcaaaactaagccaaaacaaacaaaaaaatccatcccttgataggaagtcagtatatctgggttttagtcagtccttcaacactagttccaaaatcttgggcaagtcagttaatcactcggaggctgcttaattttttttttttttaattcttagtatattatctgtcttgattaggtaaagccaaagttgttataagactcaaggtactattgaccaaaatgcttcagaaactataacattacataaaagtacaaggaattattacattttctcaaatgaagagatcatttaagaaaaacaaaatgctggaaaatagtccttaaaaacttttctataataattactcttctgatgaattttacattgacacctaatttgaagctttgaatattattttttgaacaatgaattgggtttatatattaaagtgttctaaccaaaggtttgtttaatttattagagttattaagcctacgctcagatcaaggtagcagctagactggtgtgacaacctgtttttaatcagtgactcaaagctgtgatcaccctgatgtcaccgaatggccacagcttgtaaaaggtaattttgaattattttacagcctttaaaaggctgtcattgtaaagtgaaatacatactgtaaaaatgaagacaatgtatagttggcaggaatactgctaagaatagtgggcctgagagttgacctacttcatttaatctccttaaaatattttagtgtctttttttctcattaaaaatatcagtagccactatcaaagacctatctgtatgtataaacaggaaagtatttctcaaaaaaacttcaaggttttaaacattttactataaacattatagaaaacattaaaaatttcttaatatgcattttaaagtatgccttttatgtggtgaacgttttaactaaacatttctctagaagtttttataacattaataaaactagtatacttttctctcctagagagttacagtggaggtaaaaggagtggcttgcaggatggagaagctgcaccagtgttattggaagtgagccaccatttgaatttgctagctcatgctgcagtattcagattagtgggtgttttgtgatcatattttctgcgattcaaatcaagacctaaaattgattctcattctgagatttacattttattatccaatgttatttggttattgtttcagttttaaaatttctga

SEQ ID NO: 13435 - DNA, 2300 bp, Homo sapien
gaagaaatcactgttcacttagtagatacaaagttgtttttctgggaaaaacacacctaaaaaaaaaaaaacacatgggtctgatatgggagaatttttttatttttcatataaacaggtgtatagggaagtggaacactgctagtatcttaaggattcctgaaagtatttatgttggtaagtttgatgagcaaacatttctaaatttgaaaatggataaaacaaaaagcacagtgaaatcttgaaagaattctaatactaatgtcacacataagaatacagatttaaaattaatgaactaaaacggatatacgtaatttctccaggaggaattaagatcctccttgatctcagtaaagcaatgaatagtcattctgacatctagctaaaagcagacttatttcccttcggtctttaatctttttggaactcagggatttccgccacactttgatacaccaggccattataaaattacacttaatttattgtcaatttctacttaaaaggaagaatacctataagtatctccatatgctagatatagtagaaatggtatgctttaattagtccaacaataaagtccttaaagatttacattctttgttgcctattttgaaaacttgcgaagataaatttttttaaagattataattcttactagtcctttccatgaaatataacagcaaatagtttccaaatgtggatgtgtaatgagaggaaatgaaaagtgagtaaagagctgagttaaaacatcttaaaatcgaatatggcttaatactatcattatcatcagttgtcctggaataacttaaattcttctagcttattgttggtttttcaatggttggttatagttgtgaggcggatacacacacacacccacacacttggctatacaaaaaagatgttccgagactgacagttaaaaattacactgctggccgagcactgtggctcatgcctgtagtcccaaaactttgggaggccgaggtgggaggatcacttgaggccaggagctcgagaccagcctgggcctaacatagcaagacaccatttctaagtttaaaaataaaaataaatttaaaaaagatacactgctatgtacgactgttgatataaaaaatctgaatactagacatgggtactcatctagtacttcaagggcttatcaacaaagttgcaagttgtaacactatgaattgttagtgatactcttttggctttgctagcaagtgttgtaaagctatacacacacacacacacacacacacacatacacacacacaccttttaaaatggtgaccctggtaccaaatatgactttaaatggatttaattttaatggctttaactacgttcagctgtcatatggatcaaaattagcctctatccagctggggtcaaccagggagccacttttcttaaccgacgacctactgaacgtcaacaactgcaggagacgggactttaccttcgtctctggtaaactagttgacacatcctgtgttggcaagaggcctaagtagatgaccttggtcctctaaaatctggcctgcactctcggggcacccctgcaacatctacaaaggcagctccagatagaaaagggttggggtcgaaaagccaataacggcaggcacctgccccgcctcggggctggggggctattccagcggcttcagctaactttcagagccattcgtttcccaacaaagtctgaggcgttcctctgctgggtacaccaaggggctctgcaaccctcctgggggggggggtgcccagagggcttccggaagtcccaggtttattctttcgggtcacagacagcagaaactaaaaagagggattaccctttctgtccagtcgcaagatggcgaccgagcctggtgggactccgaggggccgcaggccacctcctcttcccaatggcccgtgcgccggcggcgacggcaagcgggagggaggcggggccggcgaaggaaggaggggcggagcgcggcgccctcccgcgcgtcttggccccgccccacgtccccgcgtcccggcctggagccctcgcccggccgggcggcgcgcgctgcctgccgggatactcggcccgcccagccagtcctcccgtcttgcgccgcggccgcgagatccgtgtgtctcccaagatggtggcgctgggctcggggtgactacaggagacgacggggccttttcccttcgccaggacccgacacaccaggcttcgctcgctcgcgcacccctccgccgcgtagccatccgccagcgcgggcgcccgccatccgccg

SEQ ID NO: 13436 - DNA, 2300 bp, Homo sapien
ttctgacaccactacagtggggacctggagtctcatccagcctcagaagggtggaattctaggctcccaacatggcctgcgagggtgggatgagtccactgtttttgctctggtgtctggcttaagtaattagtatcttaaagttttctcctttgcttggccacccctttccttgtcgtttggtgaaggaaagcaggctttcttgattgttttgtttgttgctctttgtctgcacctacaggtgttttcagttactggtttcttcagcattcaattcaggatacaggaggtaaaaagaaaatccaggtaactctctgttgtggcattcctcggatcccagattccctagctattctaccttctccccacctctcagcttcttatgttcattctatgcaaaatgtcctggatttttagtttcgatgacttggaagaatatggaaaagtagggctgggcgtggtggctcatgcctgtaatcccagcactttgggggactgaagcaggtggatcacctgaggtcaggagttcgagaccagcctggccaacatggtgaaaccccatctctattaaaaatacaaaaattagctgggcatggtggcacatgtctgtaatcccagctactcaggaggctgaggcacgagaatcacttgaattcaggaggcagaggttgcagtgagccaagatcccaccacggcactccagcctgggtgacacagcgagactccatctcaaaaaataaaataaaataaaactaaaaataatatggaaaagtaggtccattctgtcttcccagaagtgtaagccctgtgctgttgttatttttacatgtcctaatttcctactaggctcttgagtaaatgtagactcagagaggttaaataatttgttcaatattatactgccagtgattcagcaagaactggatacaaggcatttgtcaaaagctcaccctctttttcatgaccctatactgctaaataaatgtttactggaagaatgaaccaatgaaagcaagttcccttccttagtcacaatagttctgtgatttttgttttaaaactcaggatatagtgatgtatttctcgttttttatcatgatcaaaaatgcttgaagtctaagagcttagaaaccactagtcattgccatttaggaaatttcctagaatccaactgtgtggtttctgccaataatttaggttttatgaacactggttgtacagtatcgggctctgctcacctctcaacctgtagactgagactcacgtgaagttatcaggagaactaaataaagaaaactgcaggggactgtaagtgaaaatatgagagacaaactaatcctcaacactctttaatatagggctttccagatgaaagcagtaacaaatgctgtaagtgtgcaagttcctgcgatggttgatcttacgtgtcaatctggccaggctatggtgcctagttgtgtagtcaaacagtagtctagatgttgctgtgaagactctttaaaatgtgattaacatttataatcactggacttttagtaaagctcataaatgtccatggtgtggtgagcctcatctaatcagttgaaggccataagagcaaaatctgattcctcaaagaagaaggaattttgcctgaatttgcagcctgcaggcctaccctgtggatttaggacatgccagtctccacagtactgtggtgtgtgtgttgccatatatgtatctgtgtgtgtgtgtgtgtgtgcacatctgtatggagaaccctaatacagcaccttacacagcacacagtacctggtctgtaagaacaagacaataaattttagctgaatctgcatcagctttctgtttatactgctttagaagtatccactcattatttgaagaagtgtgtgttagatgcttgccttaggcagaacattatatgttctccaaaggtataaaattgttttctttccttaagtagtttccaactttttgtttccaaggcaacaaaaaacattgtctcattcagttttctgttgctataatggaataccagagactgggtaatttacaaagaatagaagtttactggctccaggttctagaggctgggaacaccaagggcatggcagcagcatctggtggggttctgtgctacattaccccatggtggaagggcagagggcagagggcagaagaggaaaggcagaagagaaagacagcatgggagacagcaagaaaatggaggccaaaacttatccttttatcaggaatccactcccacagtaagtaacccactcctgcaataatggcattaa

SEQ ID NO: 13437 - DNA, 2300 bp, Homo sapien
gatagagaaaaagtgggtgtaggagttagagagacataggcaatgtccttatttgtgactagaaaatgcaggccccagctgtaagtgtgcatggctgcaagtgcttggatgtaactacaagcagagcttctcccctgcacatggaagtggcccaagccaagcaaggccagggaggcgcggggagaggtgcaaagtgcagagaggagcagggagagagacctgggagaggagtgagcacagagagggtcccggctccctgactcattggccaggaggcacctgccctcatcgtatctgtgccttcggtaaggggccgggactcagctttgccctcctcctgctttcctcgcatctctactgaaaatgcacctgtttggacctgttacctcgaaggcatgaagactttcataagtgttcaccctgccactgctgcagagcccatgtccaggggagcttcccacactcagggtgagggcacatttgtggatcacaaaatcaactttgtcaccaccagctttttggtcccttcctttcccctcctcctctccctcccctttcccctccccttcccctttcctttccaacggggtctcattctgttgcccaggctggagtgcaggggtgtgatcacagctcactgcagcctctacctcccgggcccacagggtcctcctgccttagcctcccaagtagctgggactataggcacctgccaccatgcccggctaatttttgtattttttgtatagatgggctttcgccgtgttggccaggctggtctcaaactccgaggctcaagcaatctgcctgccttagcgtcccaaagtgctggggttacaggtgtaagccagcgccgcctgaccttgtttttctttaatgaaatgatggcctttggtggtctgagcaagctctggggaagacagcctggttgctccctccctcccagcccctggggttcatctcactcagaagggaagccatctccagggcctctcagtggtgtggctgctgttacacgggccctgagatccccacccagaggatcttcctgttgcaactccttttttatctcaacctagcctgttctcacacaacgtcaacctggtgtcttactgaatgaatcccttctcatgtttgtatttaaaagcactaaaatactttcgaactacttgaccttagtttatacctaacctggggcaagtgttttggaacaacagaagtgacaagagtgcttacaggacgcttagaatggtactgctgttctctggtcctcattaatcaaaccacagctggaggccttcgctggaaagtgtacgacatggctcagacttgggatggcacaaaccaacaccttctgagccaggcccaggctcaggcccaaccagtacacgatgtgcctccaactttgccgggagaccatccgcggcttccaaaattccccgagcagcgtgcgcacacccacagccatccagccagggcagacttcggccggctcttaaggttttcttcctaatgaggaattttcagcatcctcagttcttgtttaaaatggcacacaaagcccaggttgttccctgaactgcaaacctgtctgcttttcaccttttcccagcctctctggctggagggcgacagcaacccaggtgagactggggaggccccaggccccgggctgtcctcccatttcccttccagctttcagcacagctgccttctctaatgccacaggcagattcgtgctttactgcagaaagtggtatttcctagctcataatttaattattttagaaaaggctatctttttagttttacagatgttaactttgcatctcaaagttaaatgacaaaaaaataataaataatgtaagacagaccagctgtccagcaaataatccagagagaaatgcaaaaatgttctggacagccagggctgacccatctatgccttcagaatgaagctgtgaagtttctttttatttatttattattcccgaagccgtgaattttaaagaggcctggccagggacacaatcactaaataaaacaaagaaggggatcctgactagctgggccgtctgagttaaccagacgtcatttattatcaacagcagtccctacgctgggaagacagcagaggtgtgtagacaggtagtgccaagcgtctttctcatcctgaatctcctttgtccaagctcaaggcctgtgatgaagactcactctcaggcctttggggtacaagaggctgccatggttattctgtttggaaaacacttccagagccctgaccccacggtgcatgg

SEQ ID NO: 13438 - DNA, 2300 bp, Homo sapien
ggccttcctggaaatcctgactttgcactggggaagagcaggtggaaaaagattccagacttgaggagcattgtgactcacagaatcttggaaccttagagcggaatgtggatgggatgagtaaggactgttctgagaaggataaggagacctctcaccttggggctgggcctgaaccagggaggggctgaagaaaatcagcaagctggttcccctcagggcctcaagggacctctgcctgaggaatcagcatttggctttgtaagcaccaggagtactcctggaagctccagggtaagcaaatggaatgaggcggtaattactttggcaacagtgtggactggctgaagctgggagtctggtaggcgcggacacccctggagactttgggcgaagggtccacggggatgcctgtgaagacaggaggccgaagtgtagggaggccgaaggcctcgggggtcaccaggtgggctggtagaggaaaacacggagccatgggatgtgaggcctcaagactgcaggcgctgtgggccttcatttgcagttgatgctccgtttgggtttctgctggttgactgtgagacctgactcctttccccaacaatgcagacttcagccaaacctttccctgatctgggcctctacatgtcaaaagcccacccctgtgactgggggatgggattattttcttcacacctgtcaccactctaccttctaacactgggttctgggcaacattgtggatggtggcaaaactgggcagagatgtaagaatgtcataactggagccgggtaagccagggtgctggaggggagggcctccccaagccagggtcctggcgaagacgtgatttgagtccatccagggcagtgccttgttagcaggcacccccaggaagagcctggggccacggccaaccgcccagccacggcctcctgggcaagaaataactgcttctcatctctgtacttcttgagtgggaggcaaacagtcacagccatgaaacatctgtggggtctcactgcggacgtgggggactcccagctcctttttccatgccgtgcttattctcccaccccttctcggatgccccatgatgtggaggggagcccttcgccccacacttctgggacaccctcctgacgctcccctctcctccccacaaccatcctcgcctccccacaaccatcctcgcctcccccgccgtccgggccatgacagccacctcagagctacagcgcacaaggagcgtttcggtcctcatgatttcccagggagggaaacagacactcaaatacctgcaaaccaaattctgtctttgctatagcgatatatttctcctttccatgaagaaagaacagaaaaaagaaaaagaatttatttaggagaggaaggaaaggcagtaatgatgatggtggaaaggaaacggtctagttcgcccaacaacggaatctgaaagtggtgggggctgggaagtggggtaggaaagaagttcttagaggcaacgcggaatcgcccttcccagggctccccaggagcagaggtcctgcgtaaaaaagacttaaaaattggagcactggatgccatggatcctttggattttgattccagttgatccctggagtaaggtcctaaccggggtctcccgaggtcgtttcgccgtccaggatggagcaggtctggcccctggaagggcgcgcgggctgcttggggacgggggcgccttttctcgcgcttcgcggtttcctctctcctactgcaggcagcgcgcgtttgcagcgttttgggaccgaactgatgcttctgggaaacgaaactaaacctctctgaagtttccagctcgggctttttttgtttcccgctatccggcgtggcccagtccgggcgcggaacgagggcggggccgtggccaccgcggcggaaacgacccgggccgggggcgggcggcgaggacaagggggctctgtgcggcacccgcccagcttgcgccctggggactgcggccgggcggcggggctggacgggagtggacggggctgggcgcgggctgggcgcgctgggccggccaggcggcgcgctgaccgcggtctccgtgcgtcccgcaggcggggagctcgcaccgccgcgcccgggccgcgagtgatgataacctaagaggccggcgcgggcgggcgtgagcggcggaggagccgggcgcggcgacacgcggccatggagcgggagccggcggggaccgaggagcccgggcctccgggacggcggaggcgccgagagggcaggacgcgcacggtgcgctcca

SEQ ID NO: 13439 - DNA, 2300 bp, Homo sapien
gtttcttaaacacattgagatttctccttctttgggaccttttgacagagctgccccctctgtctggaagcctcttccacctgatcttgtcccattcaggtttcaactccagtgcctctcttcgaaaaggccatccctcatcccttccaaagccctccgtgggctctcatggtttttcgttcagttgctgcagctccatgacaacatcttgtcctctctagctctccgatgaattcctgtgcctggaacattgccgggcatacagcaggggatgagtaagtatttgccgaacaaggacacttacagtggttctcatggcctatagcaggcccttgttagagccctgtggtgcagatggccaacccagagttgaccagaccacatcagagcctcatcctcgccccagcaggccagggtctcagagtccagctggcagaagacacctgagctcaaaacccctccacgattccccagatcacacagcttggagacctttccagaggtgagctgagctaggccttcctggaaatcctgactttgcactggggaagagcaggtggaaaaagattccagacttgaggagcattgtgactcacagaatcttggaaccttagagcggaatgtggatgggatgagtaaggactgttctgagaaggataaggagacctctcaccttggggctgggcctgaaccagggaggggctgaagaaaatcagcaagctggttcccctcagggcctcaagggacctctgcctgaggaatcagcatttggctttgtaagcaccaggagtactcctggaagctccagggtaagcaaatggaatgaggcggtaattactttggcaacagtgtggactggctgaagctgggagtctggtaggcgcggacacccctggagactttgggcgaagggtccacggggatgcctgtgaagacaggaggccgaagtgtagggaggccgaaggcctcgggggtcaccaggtgggctggtagaggaaaacacggagccatgggatgtgaggcctcaagactgcaggcgctgtgggccttcatttgcagttgatgctccgtttgggtttctgctggttgactgtgagacctgactcctttccccaacaatgcagacttcagccaaacctttccctgatctgggcctctacatgtcaaaagcccacccctgtgactgggggatgggattattttcttcacacctgtcaccactctaccttctaacactgggttctgggcaacattgtggatggtggcaaaactgggcagagatgtaagaatgtcataactggagccgggtaagccagggtgctggaggggagggcctccccaagccagggtcctggcgaagacgtgatttgagtccatccagggcagtgccttgttagcaggcacccccaggaagagcctggggccacggccaaccgcccagccacggcctcctgggcaagaaataactgcttctcatctctgtacttcttgagtgggaggcaaacagtcacagccatgaaacatctgtggggtctcactgcggacgtgggggactcccagctcctttttccatgccgtgcttattctcccaccccttctcggatgccccatgatgtggaggggagcccttcgccccacacttctgggacaccctcctgacgctcccctctcctccccacaaccatcctcgcctccccacaaccatcctcgcctcccccgccgtccgggccatgacagccacctcagagctacagcgcacaaggagcgtttcggtcctcatgatttcccagggagggaaacagacactcaaatacctgcaaaccaaattctgtctttgctatagcgatatatttctcctttccatgaagaaagaacagaaaaaagaaaaagaatttatttaggagaggaaggaaaggcagtaatgatgatggtggaaaggaaacggtctagttcgcccaacaacggaatctgaaagtggtgggggctgggaagtggggtaggaaagaagttcttagaggcaacgcggaatcgcccttcccagggctccccaggagcagaggtcctgcgtaaaaaagacttaaaaattggagcactggatgccatggatcctttggattttgattccagttgatccctggagtaaggtcctaaccggggtctcccgaggtcgtttcgccgtccaggatggagcaggtctggcccctggaagggcgcgcgggctgcttggggacgggggcgccttttctcgcgcttcgcggtttcctctctcctactgcaggcagcgcgcgtttgcagcgttt

SEQ ID NO: 13440 - DNA, 2300 bp, Homo sapien
tctcattcaattctctatacttcttagttggaaagtaacacccagagtctctttttatgccctgtgtgcatctcgcgcatctaggtgcgatctcatcacatagctctaacccccaggtgtctcccagcatcccccacagctgtgtcaccagtgtggacctttgctgtcatgtccggtcttcgatacgccactgcccacttgccatctcacacttaacatggcttatgctgagcttgcattttctccttaaaccacttcatttatttttctcactgaaacatccaacctgttggccagtcacattagctctgcctggaagacgtacttccaatttgtccatgtctgtctatccaatgccaggtgtaagccacctcttaatttacacctctcctgctccaactctgctcggaatcaattttctatctattaaaagagcatataagatcttctcatctcacgcctctctgcttggggcagcccatggctccctattgcagttggagcaaatccagagacttgtcctttccaaaggctagtgaagccctaaatgctggccactctgctgctcctcatggctaccctctcctgcatccagacctgctcttgaccccagactgacatcaccactgccagcacgactcctgctcctgagggctggtgggcacctccagttctgcctcatcttctgtcttcccaactcactagatgaaacttgggtttttagctgttgggccaccctcacctcctctcttgcacatcccacaaccattccaacagcatgtcccgcatgctctgaggaggctatgtcccacatccaccatggccacccagcctgagccacagcacctttgcaggatcactgcagtggccgctcgccacgacgtctcccttcttctgccctggccctctacattctatttacattgcagcaggagtgatctctggaaacctcggtaaagccacttgatgccacttctcaaaatcctcccaagctttccctctcgctcaaaagccaaaatcctcaccgggatccacaaggccccacatgacctcactctcggccacgtctccaatctcccactcagctccagctaccccggcttccttgctgggcctgaaatccctgaacgctccctatcccgccccgtgcttaccatttcttccctaggtgcctgcacagcttgtgtccctaggcctccgctcagtgttgcttgagaagcctccttggaccgcccaattgacaggagcaagagcaggatcccacccctcccagccctggtttcaggtgtcccttcattttctgagccatctttgttgggattcccacgtgaggacttagtgttccggggagcagaaacttactgtgtttcccaggtgtccccattgcctaaagcagaagctgtggggttgaaggttttagaatgagtgtgaggcagaagccccacctgtttcttaaacacattgagatttctccttctttgggaccttttgacagagctgccccctctgtctggaagcctcttccacctgatcttgtcccattcaggtttcaactccagtgcctctcttcgaaaaggccatccctcatcccttccaaagccctccgtgggctctcatggtttttcgttcagttgctgcagctccatgacaacatcttgtcctctctagctctccgatgaattcctgtgcctggaacattgccgggcatacagcaggggatgagtaagtatttgccgaacaaggacacttacagtggttctcatggcctatagcaggcccttgttagagccctgtggtgcagatggccaacccagagttgaccagaccacatcagagcctcatcctcgccccagcaggccagggtctcagagtccagctggcagaagacacctgagctcaaaacccctccacgattccccagatcacacagcttggagacctttccagaggtgagctgagctaggccttcctggaaatcctgactttgcactggggaagagcaggtggaaaaagattccagacttgaggagcattgtgactcacagaatcttggaaccttagagcggaatgtggatgggatgagtaaggactgttctgagaaggataaggagacctctcaccttggggctgggcctgaaccagggaggggctgaagaaaatcagcaagctggttcccctcagggcctcaagggacctctgcctgaggaatcagcatttggctttgtaagcaccaggagtactcctggaagctccagggtaagcaaatggaatgaggcggtaattactttggcaacagtgtg

SEQ ID NO: 13441 - DNA, 2300 bp, Homo sapien
aggagcaataggccgtcccatacagcctaggggtgttggatgctatgccatccaggtttatctatgaagtttgcaggatgacagaatcacttaatgagcatttctcagagtgtatccctgttgttaagtgacaagtgactgtgtatacacacacacacacgcacacaccacacgcacacacacacactacaggaagatacagccttaaaatgacaatggactgctgtgtaaaaggagttttagagaaatataatgtgttcttggaattttgaaacatgataaatgaaacatgagccaaaggttagagcaggataataaattggaaatggctgaacaccaagttgcaaatctggaagctaaagctggggaaatctctcaggacttacttgaaaaagacataaatggaaactcacagaagaactggagccagaagctacggacagtggttacctcagtggagtgagaaggcctgtgatttcactgatggcccttctgaaccatgtgaatttcttccttcaccacatgcagacatcagttaataggacagattaaagttgcatgctagctgatggctgccggggaggcaggaatactcaattaagcgcggcacagttctcgtgggttcttgttgaatagtgcaagttgggagtccggtcttgttcaccgtttccctctgttctctaggagtgggcaaccactctcatggatggctcatacctattacgtgagctgccctgtgataactcactgtctcccttctgtctcagaaggcctgcctttcctttgccctagttgtgaggcatttggaattcagccaatctgcaatgctgaatgtggaggaggatccatgtgacatggttggagccaaggtgttgagcaaagcctcatctgtctggacaaacttcagtcctcacaagcaagcaagctatgcccaagcttatgtgcaatgctttgaatgggcagaggtcagtctgacagtgacagtgtgagaacgatgtggagctgggcctgggtggggagaaggtgcccgtcctccatgagtctaagtggagtgtacccttttgactcacagatccacgtattcctgtcaccagttggtgcatgaaggcaatacagtctcctgagtttctacaataccaggtctgtcatttagttgtccttgtttttaagtgagagtgaagttcactattctgaggtccagggaggggtgaggaattccagcattaggtttggcctcaggaagagggactgggagaatttgataatggggagtgcggtaggctgagttgtaacatggttcccaaagtccccaccctcatgtacatactctgaatagcatctccccttgagtgtgggatactcctgtgaagacaacagggtttcagtgtgaacaggcaaaaagggactttgcaaatgtagtgaaggtccctgatcagttcactttgagtcaataaaaaggagattatcctgagtgggcttgacctaatcgggtgatcccttaaaggagacaagaggcagcaatagacatcctccttctggccttgaggaagtcagctgccatattttgctcttttttttttttttttccttttgtagagacagtctccctatgccacccaagcaagtccggaattcctggctcaagcgatcctcctgcctctgcctctatgagtaccgggagaacaggtgtgagccgctgcccagtcatattttgattgacactctccaaatgtgagagtggcctctaggagcttggagtgacccctggctgacagccagcaagaatatacagacctcagtgttacagcccagctggatcctgccaagcaccagtgagctggaagaggatccccagcctcagatgagcctgcagcctgtgctgatgcctggatttcagcctgggagactctcagcagaggactcggctcaaggctgtctacagtcctgatctaccagaaccatgagataataaacaggcattgtttaggtagtgaaatgtggttacacataaataggaacccagtgcagcgtaagatgccctggcatatcaagggcggttcatgagtgggtgccttcagcttgggaggaagcaggcatagggctgatgcatcgcagtgtccacatatgcagggaggctggtttcctaggaagcctcccaatgaggaaattgttgggaatgtgctgcaaggcgctgcctcgctctggagccagacgagaggccggagcatccgccccaacatggctggctgtgtgagcctcaggaacgctggcagctctgcaagactctctgccatctgcaa

SEQ ID NO: 13442 - DNA, 2300 bp, Homo sapien
ttgtttactaaaaagatgtactcaaaacattgtaggaaacacaatatcatgaagatactaaaatcacaaacaactcaacaccaaaaaagaatccctcgtatcacatagatactttatctcctacgctttgtaaaaatccccgctgcatatacagatttttaggcaaaaaccgtagaactacactgttcctttacttttggtcttattgttaacactcagtactctttgatggccacgtccttacccacttctgactgccttcttgatctgctatgtccggagttggttccttccggcaggttcgtggtctcgctaacttgaagaatggagctacagaacttcacagtgagtgttacacctcttaaaaatggcccaaatccaaagagacagcagcagcaaaatttactgtgaagagcaaaagaacaacaacgccacagtgtcaaaggggactccaccgggttgccgctgctgtctgcgggtggccagcttttattcccttatttgtccccacccatgtcctgctgattggtccattttacagagtgctgattggcccattttacagcgcactgattgatccattttacaaactctagctagctacagagtgctgattggtgcattttacaaacctctggctagccacagagtgctgactggtgcgttttataatcctagctacagagtgctgattggtgcattttacaatcctcttgtaagacagaaaagttctccaagtccccacccgaactaaaaatccagctggcttcacctcagactgcctccccaacccccaaccgcctgctctatggtggcatgagccaccatgcccagccaactttagtgtttcttgtgacagagaaatctagcttaacgtttctccttggaattaaccaattggctgagcatcatttattgcatgactcttcctttccccaccagcaaaaattattacttataactccctggatacagtggggtcagtatctgtccttttatgcagttttaccgggtgccaatctatttctgtgctggaataatacttttgtaattgtaccttcgtgataaactttatgtgcactgatgcaagttctgtatcatttttctctttcaaagttttattttctattgtctcataaactttagaataattttgaaatgaaagttgaaaacaatccatataatactgtagttttttaggggtttttttgtttgcttgtttgtttagatggagtctcgctctatcacccaggctggagtacagtggtgccatctcggctcaatacaacctctgccttcccaggttcacgtgattctcggtcctcaccctcccatgtagctgggattacaggtgcacactaccatacctcgctaatttttatgtttttagtagagacggggtttccccatgttggccaggctggtctccaactcttggcctcaaatgatccgcctgtcttgacctcccaaagtgctaggattacaggcatgagccaccgcgcctggcctattatagatattttaaactcagttggctatttgtcttaatcttatccatgagaaaaaaaaattgatatttaaaaagttatagataaaccccatggatattcttctttatagcttctggctttgatgatgtgtcagtgtttaaactttggctgcttgtgaaaataatattaaaatattcacctaaattagcttgtattattttacttttataatttttttaaaattaaaatgtattttatctggagcttatctgttgcaaggaatgagttaaatattttgttttaaaaattgttttaataaaataatgatttgaggcctaacctatcttttcctcactgattgcaaagctccctttaccatatggtagattccggtgtatcctgagctggactctgcactctctggtgcctttcccagcacttttctccatgctgtgtggttactattgtcttttgaaacttcaaaacctatcggaatgtaggccactaggtcagggcgtcatggaaacccttgtgtgcagggagcagcagacagatgattccccagtcccggaacactctcggccctcttcagccactccctccccaacccacacgccatcaacctccagaccctctcgccgtggcttagaggtgtctctgacaacgtggcacactgggaaggccttctttcctgctaccaatacaaatgcattctgaatttgatatgtcattaaatgtaaaaatacagccaatttgaaacaagcaaatggaaattcccaggaaccaaaaacagaaagaaaaatcagaggt

SEQ ID NO: 13443 - DNA, 2300 bp, Homo sapien
gcaattcatctgagctgcctgaattatacacctaaagatgagctgaggtttcattttgttttgttgttgctgctgcttgtatatactcaggagattttgaaagggcagtcactatgtataaatgcttcacttgtgggtggctcatattccagaatgcctgctcccggcactcagggcttcctctacagcttctaggtccagcaatactttccttgcctcccagcggcactgtggctccaaaacagggagcctgggctagtcctcgtgtctcaccaggaaccgtggcttcttaccttcacatgaaattgtttgataatctggagtgaaacctaacaaccctttttgtcatagttttttctataggaaaacactgcagacatcctaagcaaatgatgtacaaatttgtggaactccacccactagtattgaaagcaatttgagcttgtaaaacacgcatcccatgaacttcagggttttgtgctaactgattgatacacacaccaatactgagagagattgtattttctgtggagagggcccccgatttcattagattatcaaagggctttatgatccccaaaataagccaagatgaataaatggctttttaattcaagtgattttgtttgcaaagtttttaagcaagaccctttttttaaagaaaggttctgtttttaagaaagaccctttgttttgaatgcaactcttactcgaatatttcttcatgctgattctaagttcttcagaaggcttttatgagagaaaggtattgattcaagacatcttatctaatgattttgataaactgtaatagttcaaaccactataattcagcaaaacaactcacatgctccagagagcatactccagagagttccagttcccagtagactggagaattcccttgtgttttcctcctcactgcctgagcactctccattaaatcccatatcccagggctgcaatgtccacaggaacctgtcacggtataaccagaggtgctggcagctttcccttctgtggacagctgtttcaggtacagagggactgggtagagcaggggcccagaaggtctctgcaggtgccctgggctcctgcccacccagaggaaagagcctcacctccgggagcctggccgaggaatgcaggagtccaaggataattgctccacaagggcttccccagcggccttccctggtgagggtttggggttgaaccgctgagtaaatggggtggcagaggtcgtggagggttgcggggtgccaggacctctcattgcctttacctacagccttctaagtactgtatccatccagggccagccccatctcaggattggcgctgcaccttaaccagaagccaaacgttctcagggtgcccagggctatggagacacgtgctaacaaaatacgttcgagtcagtattggtgaacacacattcagtgtgtcagttaattaatttacaggagggatattttataaatgcttgaatggctataaatctcaactcccactaagactgtagttttctaaagtcaggttacatctaattacaaccagaaggggctcggtgaactcagaagctgcaccagggctgaagagtttggtgatgtgagaagtggagtgttaccaccttcggtttgtggggctcacccacagccaaggacgaggacacttctgcatcccctggacacggggctgtgtctccgcagccccactggaagctgctatttttgcaagctctgacctctccaccaataccccctcctcctcctgccaacacattcggtctagatgtgctgataaggctggttgtgccacagccaagagccagtgccaggagacagcctgtctcttcccggtgtgtgctaatctaatcaggcccaccctcccagggcgaggttctccacgccgcacagcgccgcgcacagggaggagcttgcccgccaggctcctgagctgggccacgccttttccgctacgggccacgcccctcgagccacagaccacgcctcctccctctcggggccaagcttccgcgctgccctcctttccaggccccgcccctgattgccgccgcttcgcaaagccctccgtctcccgggagctgcttctccccacactccgcccctgcgcctccccgagcttcagcctctcctgtaaagagcagagatggagaggaagcgacagtcacaacttccggttagcgtggcggaggctctcggagtctttgggacctcagcaccgggataccgggagactccctcgtgtccccatgtgggccacctaccagacagaag

SEQ ID NO: 13444 - DNA, 2300 bp, Homo sapien
gagcaaatcccgtggcatctcagaccttgcggatatgaggtgatcatatcccatgtgggcttgttcccatgtaaagctgatcagacctcttgcagaactgggtgctgaggcagcagctggggtgataaagccaaaagctccagagaaggtgaagccaagaaggtctgatgtgatgcacggttggataataatgtttgtaatgtggctttgcaagtcttagaacatataaactggtagtaagggggctaattcttgctatgttgttggttttattaaaacaacttcttttcattgtttactttttatagccacgatccccagcagggcatttctccaaaagaactgcatgcaaataggagaaataaactgaaatatgaatgtgtgtgtgatgcaacagatataattttccagataattccattgtgcattaacagaacattgaatgcaaagcagtggtgaatagacttttccagaaaataattaggatgctatatttatctctgaatctttcaggtactgcggtcacattttctgttccaaaaataaaatagctgattttttaaaaaggcagtatatttaaaattaatgcacagaaacatgccaacgtgagatttaggatctagatttaggtatttactaatataaagtctcaacgatgttaaaagcttaagcttcatgggaaaaaaaatgagtcaatacaggaaagtagttatctattattaaccattcattaagtcctggaataatctgaagaagtctacagaacacaaaaacgagcttgatgtgtagattttgttagttggctacaagtaggattgtgtaaccatcttcttcaatattagaagtccgaggtacagataaactttattggggatcactcactaaaatataaaacctgtggccgtaggtgagtggcccctcaggtgtgcggtggtggtccagagggtggggtgcatccggtgtgcactggtacaccagggtccttgcaccagtgcgccagtagccttctaatgacagccgaaggaggcctgctgcagggaagcaaggacccttgccttatattaaggaccacggatagctctgggcggcaccaaaaaaggcacgtattttacctggaatgacaatccagtctccaagtctggctgggattccagtttgctgataacaaaacacatattcagtcctcacttaaccatccattacatttgtatatatgtgagcagaaagggctcagtgctcccaagaaatgttcaggagtgagggtaagaggtgcagtttaaggagcagctgttaaaaaaaaaaggtccaattgtataaatgaaaaatagggccgccacggcaggggctggaagacgggtcaggcgggaaagcctgggggtgggggtgggggtaggggcggggatccctgcgtcgccgtttggctgctcggagagtaggggggagagcggatcccagcaggttaggccggaggaacagcgccatgtgctccgggctcctggagctcctgctgcccatctggctctcctggaccctggggacccgaggctctgagccccgcaggtgaggcgggggcttcccggcgttctgcaggcaccgtcgggaggcggcggcccgcagtccggcgggcagaggcgcggcacccgggggctctcgggctgcgctgcagcgggcggtggtcgtcgtgcggggccaacttcggcggccggggtaggcgggcagcgtttccgccgccgcttatgccggcgccgaggctgccgacagtccccgcactcgcccggccgccgagagcccagaggagccggctcaggggacgaccccccgcccctcccgactccgcgcagccgcggctccgctcgcagcgtccggcccaggtcgcccccgcactccgcggtcccagaggtccgagtcccgtgcggcggccgccgaggcgggaggggagcgcccagggccccggcctcgggccgaggcgagcgtgggggagggcagggtgcgcggcgcggcggctccgcctccgactctccggcctcctcccccgccccgcgcccgcgcgcgctcctccctccccgctcctccttcctctcccagcgcccgctcctccccctcctcccctccccctccgccctcctccgctccgggccagcgcggcggcggcggcggcggcggcagcagcaggagcagccccggctgcgggtcgcgacggcggcggggcgccccctcccccgtgccggggcgcggcggagggatgtggggccttgcgggaggaaggcttttcggcatcttctcggccccggtgctggtgg

SEQ ID NO: 13445 - DNA, 2300 bp, Homo sapien
attactatctaagcaagagagcgcaaggatgtgggtgctggtgttcagtgcttctccacccctcccagatggctgcctatgttggagggagctgagaaaggaggaagggcggcaggctgcatgtccaccctttgttgcggatgtaggtgcaagtcgggcagcgactgtgatgtgcagtagtgtgtgggtgtgtaaggaccttatagcccatgcatcctgatcacacctttgcagtctttctctctgattttgccttttgaaagagactgtgtttttaggtgacacttctagtgacttgccgactaatttacaactcagcctaggttccccagaaaacatatcctgaggcaaaatttaggtggtgatatgttactaggatgtttgattccaatgaaaacaggagcaaaggaaaagggaattgtggcatggaaagagagggagcagataggagggttcattaccaggcagaccacccactgctgagtatgaagtacaaaagatggatccatctcacaggatcatctttgagaggccaacagcgactgcatctcaggacatttcttaggaggcaataaagggagactctttgatccatggatatgtgtccattagacaaaagtctgcctcatagacttctaacttgcctgaaatttcagattgcatatatgtgagtactgagcaaatcccgtggcatctcagaccttgcggatatgaggtgatcatatcccatgtgggcttgttcccatgtaaagctgatcagacctcttgcagaactgggtgctgaggcagcagctggggtgataaagccaaaagctccagagaaggtgaagccaagaaggtctgatgtgatgcacggttggataataatgtttgtaatgtggctttgcaagtcttagaacatataaactggtagtaagggggctaattcttgctatgttgttggttttattaaaacaacttcttttcattgtttactttttatagccacgatccccagcagggcatttctccaaaagaactgcatgcaaataggagaaataaactgaaatatgaatgtgtgtgtgatgcaacagatataattttccagataattccattgtgcattaacagaacattgaatgcaaagcagtggtgaatagacttttccagaaaataattaggatgctatatttatctctgaatctttcaggtactgcggtcacattttctgttccaaaaataaaatagctgattttttaaaaaggcagtatatttaaaattaatgcacagaaacatgccaacgtgagatttaggatctagatttaggtatttactaatataaagtctcaacgatgttaaaagcttaagcttcatgggaaaaaaaatgagtcaatacaggaaagtagttatctattattaaccattcattaagtcctggaataatctgaagaagtctacagaacacaaaaacgagcttgatgtgtagattttgttagttggctacaagtaggattgtgtaaccatcttcttcaatattagaagtccgaggtacagataaactttattggggatcactcactaaaatataaaacctgtggccgtaggtgagtggcccctcaggtgtgcggtggtggtccagagggtggggtgcatccggtgtgcactggtacaccagggtccttgcaccagtgcgccagtagccttctaatgacagccgaaggaggcctgctgcagggaagcaaggacccttgccttatattaaggaccacggatagctctgggcggcaccaaaaaaggcacgtattttacctggaatgacaatccagtctccaagtctggctgggattccagtttgctgataacaaaacacatattcagtcctcacttaaccatccattacatttgtatatatgtgagcagaaagggctcagtgctcccaagaaatgttcaggagtgagggtaagaggtgcagtttaaggagcagctgttaaaaaaaaaaggtccaattgtataaatgaaaaatagggccgccacggcaggggctggaagacgggtcaggcgggaaagcctgggggtgggggtgggggtaggggcggggatccctgcgtcgccgtttggctgctcggagagtaggggggagagcggatcccagcaggttaggccggaggaacagcgccatgtgctccgggctcctggagctcctgctgcccatctggctctcctggaccctggggacccgaggctctgagccccgcaggtgaggcgggggcttcccggcgttctgcaggcaccgtcgggaggcggcggcccgcagtccggcg

SEQ ID NO: 13446 - DNA, 2300 bp, Homo sapien
taaactttttttttttttttttttttggtatattagcccatatattttctgtgttgtacagactcatttaatctaaaatagttcttgttgaattctgggaaatttgttctaattttatcacagaacttatttcctggggagttttctttttttgcacttctgttatttcctattttccagatgttgtcacttacatattttctctctctttgctattcctaactcctgattcttcggtgctgcttttgagactccagtatgatcttccaggccactcacttgttcttcagtcatttacattctatttattcctctccacatgttctttcttaaaacagtttcatattttataactgatactttgtcatattcttttttatgtcatttcatcccatgctactaatattctcttgtgtctttgatatatttattttgcctcttttactttattgctccatctttgtcagtaatttcacttcatgtcaaaaatgttatctggtttttcctttttaattctagaagtactttttagatgtccagtaattctgtgtgaggcagcagctgacctgcctggtgacaggtgtcggaggaaggttaaaggccaggcctcaggacacattgatgtgtccttccacaacaatggcactttttttttttttttttttttactatcagttatagtttttctgccttcagttatggatttgtctttcccttgtttacttgccttagttttcttattttaaacgactctttcagcataagaaatacagtgccttgtacatagtaatcaatacataattatgatttctattgttaccattaacaataaggtttaattctgcatatgaatatccaattgttccaacaccttttgctgaaaagcttgttctttgtcaagaatgatttactgtatttctggagtcactgttttattcaattgacctatatgtctcgccctttcaccaatactatactgtctaggttggtttactgtggatttatagtaattctaaaaatgttaagggtgaatcatcattcaccattgtatgatgatggtgaagggtgaagatgttgatgatttttttctcaaaacatacttgatgcatttataccttaggaactttgaactttgtattgcctctgttttcccacaaatctcatggttaacttcttccatgcctcgggttccaactaaaaatttgttctctatggaaatttttcttttctttttttttttttaatacagggtcttacagtgttgccaaggctaacatgcagtggcacaatcttggctcactgctgccttgaccttctgggctcaagcaatcctctcaccccagcctactgagtagctggactacaggcatatgccactatgccctgttcattttgtttattttactttattcttttttgagacagggtcttactctgttgcctaggctggaatgcagtggtgctatctttgctcactgcagcctcggcctcctggactcaagtgatcctcccaccttagtctcccaagtaggtggaaccagacctgcactacaaaacccagctaatttttgtattgttttttagagacagtgtctcactatgttgcccaggctggtctcagactcctggactcaagcaattttcccacctaggcctttctaaatgctgggattacaggcatgagcctccgaacctagccaatgaaacttatttttttgcatcctatttaatatggcttctctcacatgattttctattataatattttattttaattttgttactggatataccacaattggaaattatctttattgtttgttttctgtctccttcactaaaatttaaacagtggttcagtaaccacgttagctactattggagcagaaaccagggcctaagcttatctaatacgatgtgtattactttttaaaaatgtgtgtacatttctttaaatattatttcttgattttcacaaaatgctagtcaagatatcttaaatagacagagtttgggaacatgcttattaaaggacttttagaccttagcaataatcatgaagattaccttttatccttctttgtgtttttttttttttcaggaacgcagtcaaagaacacagaacattttatgccatttatgaaaccaggtacgtccatgatgcctgcattttatcaatgaaaggttttcacttcttactaatgctatgagtattagtagtgattgtaatataagtctataacttattttatgtattttgttgttgaaatgcttgtctaaattatgttaaggaatacata

SEQ ID NO: 13447 - DNA, 2300 bp, Homo sapien
actcatggcccagcttccccaccttcagctattttaggctctgacactggaaatgaaattcttatgaagcccgggccaaggctgaggttgtgtggaactagggtgccctctactgtcttccacaacgatcacgacattgcttaatttcattcaatgaagagaaaatgctaatgaaacaaatgggaattcaacggatagcctattatttctcagcacaaatacagaattctatagtaaaacaaaaatcattgaaatggtagtaagcactcttctagcaatgtgagtttctgtaaggttctgatgggccttacgatttcactgtcccctcagggcagtccatctaaagtgaggctatgttatgttacataaacactaggaggagagagagtggcataccgtttcattacagggaagagaaaagaatttaagcaacatgctgaaatacaatgttaaagaatgactctaacttaaaatgatttttatatattcaataatatgtgttgtgtggacataaagctgatagaaagtgtaccaaaaaaagtggaagttttaaacataatccatcaaaagaacatatttccttacagctgacatttcttttattattaagaattaatgtctataaccctcgctaatacaaaaatcatcccttgtttatatacatttatttttgcaaactcacaccgaatgactttgtgtgacaagctgtgaagtttaaaatttaccaattcttccaactctttgatttgcattatgctgtttaatcctgagagaagagcagctgtcgctggtattaggtgttagaattccaacacctaataggtgaaaattatattaggctgatcataaaaccatgttgttaactttttaaaatttaatgtctcccaaggaatttcaccctagtggtacatcttttgggaaattagaaaatgaagaaatgcatacgttcagtgatccattttagaattagaaaattcaaattagcatcttatttcattcatatttcctgaagaaccactggaaacagttatttaatagtgtggctaaatgtatattcagagaaacacttcctgtatatttgcacatttatgtatatttatgtcctattcctggaatagatttacaagttttgtttttcagaaaatttcagaatttctggaatgtgcagaagtattaacaggtaacttagatttggaatacactgtattagagataactggaaaaatgagaggcttcctacactggaaggtcaaagatctttcctggaggggagttaggaatttgcctttacttaccattattctgttaaaagagattatgaataatgcagtttcacaaaaggaatgggacaatggtgtaagtaaacctccccatcacgttttcagtggctttcctttgagtcttgaacgttttccactgggtgttatagtcgagagtcccccacctcctgaggaagcaagacctggcaaacccaagacgatgcgctcttacttgtgttgtttgaaggggccctgctgccgcgcagttgtcattaatgccaccctcacctcccaggaactgcaccactaggacggacgacacaccgacgtaatgaccatagtaagaccccatgtacgtggctaatgaggcagtgacccgacgtggctcggaagccctgctggggagatcccgccccgtcaccccagaggcgctctccgacctgcagcccccagggctcctggccctttcccgtttgccactgcggcttgttgtcaagaaatggaacttcagaaaacccccagatatacactgcgttaggtaaggatttcattctaatcgagtccaatgtgaccctggctttccctcccgtagttatgcattcctgtctatgagtgagatgaaaagaatgtccacaggccagcttctttcagaagcgcctaagagatgcgcatgtaaggggtgccatggagcacccgggaaggacccaggcctgggcagggaggcgttggggccggctctagggagcaaagctgtcggagtccaggcctctatcacccgactgctgacactgccctcccatccctgctctacaagcgggcggtggtgactacacgaggcgccgaagatgctgttgagggccctggagaaacttcagcagaacagggcctctccccttgcaggccgagccgggggccctgcgccctccccctccgcccagctcggccaagggcgcatttgctgagcgtctggcggcctctaccggagcacctctgcagagggccgatcctccagcccagagacgacatgtggcgctcgggcga

SEQ ID NO: 13448 - DNA, 2300 bp, Homo sapien
tgggggaagtacttctgttctagtgttaggtataaacaagactgacttttatataccaagaatgaaaagaaaatatatgtacatgtagaaaaactcagggctaaatgaaggtgaaatcataagtgaagtggtcgatgtttataattatcttcttattctgtgaatatgtgtggaaaatcatttaaaaattcctctcccagccagatgcagtggctcacgcctgtaatcccagcaccttgggaagtcgaggctggcagatcacctgaggtcgggagtttgagaccagcctggccaacatggtgaaaccatgatttctactaaaaatacagaaattagccaggtgtggtgtcaggcgtctataatcccagctactcaggaggctgaggcaggagaattgcttgaacccgggagtggagattgtggtgtggcaagattgcgccactgcactccagcctgggcaacagagcaagactctgtctcaaaaaaaaaaaaaaaaaaaatcctctccttgcctgaatgtgagacttttgtgttgtgttctaggtcatctacacacacaagcctctgtgagtcactccatctttggggaaaccttccgtcaaaagttgtggcaacagaagatttcgtatctttgatggacacagacctcccttccactgacatgtattttagtttcattcagaaaatacatacattgactcctcagtctgcaattaccatgtgaattatgtgaccaatttaacagcaaaaggttaatctattttcacagaaggaagtagtaaaagcaaaaatggatgtttatgttttgattctcaccctaggctaatcagcgacattcagtcttatataacaaggaatgaacaatagcactactgtaaccttgaattattatttgctctaaaaatagaattataacatgcacttgaagttgaacgttttgtatcttcatctttcattgtatgtaatttcatttattttaaataatggaaagaaaaactaacaaacagaagatgggctcattaataaaatttagaatcatccgtaattggcaaaggtggtagagaaatgaaagcaccacagtgtggcggctctgggagtgcactggcttcctacacaacagagccctgcctatgccgcctgtggtggtgcctttcagggacctctgcagccagggccaggcagcctgggtgattgttattgtcatggctccaccactgagcagctctgcattctaggccccgaattccttaatatccgcacctcacttttcttctttgtaaactgagatggttatagcaccagatctccccgtgctgttagggtgagatgagtcaatgcaggtagaatccctcacaggctgcctggcacagacatgccagctcttgttaccatcattattgtagttaccagtgacagtggtagtgctcggtgatattataatttggaagactaggcctggattaaaaaataataattagggtgtaccagaagattgttatgatattacaggttcacttactatacagtttcatattggcccattacacaatggttatagccaggttccggtcaaaatttgggcgtgtaggaaaactctgcactaaatgtaccacgtgaagttataagtgaaatagtagatatttgtaattgtattacttcaactttttctgtattttcccatattctacgaatatatgtgcatttattctacatttatattttttgagcttataagcaattttagaaaatgcatgttttcagtcccgtcaaggaaagctttatgataatgctcaataagggataggaaacaaagaataaataacttttaaaggcatcttaaattgctttacaagcagtaatatatgtataggtacacaccctaagccaccgaagtgctgagtagatttgatttaagccttatttctgaatgatattcacctacaacacaaacttacgtaatttggtggggatagttcagataatctcataagagacattaatttttaaaagtacttaatatggctttctgggacacgatggtggctcagtgaatggctagagtgagagagtcgttcaaaggtcttcatcttttatttttcagcttgaccatctctgcagagtgccccatgcagcttgaggacttcccgatggatgcgcacgcttgccctctgaaatttggcagctgtaagttattttcacaagtaagagccttggacatatactttggggatcaattccacatttattcagaagaatttaggttctgcatatacataagcacaataggatgcagtctgttt

SEQ ID NO: 13449 - DNA, 2300 bp, Homo sapien
aattgtttctacttgcagcattcttgcagcacactcaggcgtggtggctcatgcctgtaatctcagcactttgggaggccgaggcgagcagattacttgaagtcaggagttgcagaagagcctggccaacatggtgaaaccccatctttactaaaaatacaaaaattagccaggcgtggtggtgggtgcctgtaatcccagctactcaggaggatgaggcacgagaatcacttgaacccgggaggtggagattgcagtgagtccagatgacactactgcactccagcctgggcgatagagtgagactcaagtctcttatgtggagacgacataagcaatgaaggaacaataaatcatcatctaactgatttttaaagtgctcagattttggtacagaaaattagagattagggcagagtatgataaaggctcatattcccctgaagcctaaaggagtggtacaggtgttggaagtggaagaatgcaggagcgtcagagtcttcatcaaagaggggaccttatagggcatgtgcacctaagtaggagggatgtgctgggcagaggaggatgagaatgccagaaagagtcctggaaaggcggggagctgggtgagttcagcacctcacagagacagaaaggtgatgccagggagatgacagctccattgttgaaaaacaatattgtcattaacaactgcactcccctccacttcatgcctatccagaaacaagggggaacacaccagaggaatacaggcccatgccaccatgcccagctaattctttactattttttgtagagacagggtttttgcacattgcctaggctggtctcgaactcctggggtcaagtgatccgcctgcctcggactcccaaagtgccggggttaccggcttgggccactgtgcctggccgaacaaagctatttgacaatattaaagaaacagttatcacacccttacataattctatgaatagcagttataaaacattttctaagaactttttgggggtgatagaaatgtaaaattcctagtggatttactacactgttgcgattgcaatacttacatggtgcaagactaactttctgaatgattatgacaaatgaaagcgtaaatgccattttcggtttttggaatatgaaaatacatggaatgaggcgcacctcatgcttccaccaaacggaacgtctttggcttcttgccttaggatctttctagctcctacctttaacatgcctttccacctctactgtttattgctatgtgttagtctctcttttctgtaagaaaggcataaatctggggtgcttttttcccaaatattcccgcagaaagccacctttccaagcacagaatcttatcagtgcctaggagttcagccgacttagcacgaagagtgcgatggaagggctgcttttggcaaaccgtctcaaccccgggcgacggcgggcacgggaggtcagggagcgctggaggaaacctgcactggggtagaaatggctggaggaaggcggaccgcgggctcgctctcatggtgccaaccccggggacctttcttcaggctccctgcgggatccccagcctcccctccccctcggagctccgcccccttcctggcctcaaactccgagtccattcaaacctcgccttcctcgccctgcgcgttgtcaggcgtgtaattggggaaactcctccccgccgggaccgcctcggaggcgctgccaggggacagccgcccagctgcccccacctcccagcacagcgcacacagccccggcctgggcacccgcgcccgctcgcggctccaggcggggtgggcggcgccgcgccagggggtccccggcgcccattgctcccgccgcccggttgcgcggaccggcgctagtgcgcgggtgggggcggcgcgccgcggtggcccggcgtcccgtgtgcgtccagtgtgcgccccgcgggggcgcggccagcgccagagtagatacctgtcccgcccgccgcggccagcagcctcggaggaagccagggcaaagagggccggcggagaccaggtccgcgccggaggaagccgcgcccggccgaggccccggaccctgcgccccgagctccacggcaccatggccccgaagctgctgctcctcctctgcctgttctcgggcttgcacgcgcggtaagtggcgcgggggccgcatccccggaggccccgagctgggcgacagggcggcggggggcgctgtctgctggagtccctggcgcgccagccgtcggctgggctgcggcacggcgggccgggaggggact

SEQ ID NO: 13450 - DNA, 2300 bp, Homo sapien
tatagaattttatgttccagccactttggaagacaatctggcagttcctcaatatgttaaatgtagttacccagactcaacaattctactcctaggtgtataaccaagagaactgaaaacatatatcaacacaaaatcctgtatacaaatgcccataacaacattcataatcgtgaaaaaatggactcaaccaaaagatctatcaactgatgaatggataaacaaaatatggtatatctgtacaataaaatattatttggcaataaatgagaatggagtactgatgtgtgctacgataggagtgaattttgaacacattatgctaagtgaaataagctatttacagaaggtcacatatcgtatgatcccatttatataaaatgtccagaatagaccaaactatagtgacagaaaatatataagtgactgcctaggactaggtgagatgggtggtggatgtgggcaggaaaggggggaaaaggggagtgaccactacttggtcaggtggttcattttggtgatgaaaatattctaaaattagattagggtgatggttccaccattcagagaatatgtgaaaaaaaaaaaaccctgatttggacacattaaatgtgtgaattttatgtatgtgcattatgtctcaaataaaggtgatttaaaaacaaagttaaaaaggaagaattgtagcatagagcaccttttgtaattatggggataggaagcaattgggacatggccaatggccaaggacagtgtttgattccttcatagaaatgcttcagactggctctgggtcccttgagcttagcattttcaagttaagggagagcatgtatccctgctgtgttgacaataatttcaccgggcaacccacaatcagaaagcagggcatgcctgtgcctgtactttattttagtctttcaatggtggagccaagccagcaatgtcaggcagagagggaaaaaaatgaagaaggcagattgcctctaagaattttgcaaactgatttaaatgtttaatcagcacatttcaaccactttattaatatgtttgcatacatatgtgtgcactaaggcagtgcttttagtattcagcataactcatcaagatggtgcatacatttcttccagagccatgccatcagtgtctgtatgaatcaatgaaggctgagaatgccaatgctgtcacgtgttgccaatgacataaggcctagacctgttcttgagagtagggcatgccctgtgaggcagacagagctgcagagcctgcagatcaggcagtaaaaagagagcaggtgcaccaggtcaaagagctccagcagagaggggatggtgttgttccaagcatggttcagaaatggggaatccaggagtacagttgcaggtagaaaagcaggcatctggcaaatagccagctctggctcagggagccagggagccctggtgacagtgcccgcaggagcgggacagagcacctgcctgatgtcatgatctaggcagtcaccaacctgggtcccaggcagcagaaacaccaggcttacccttcctggaataattaaccacatgagaaggggtccctgaagcaggtcaacattcacctatcaaagctgaagactgataggagaaagggtctatcaaatcctggagtgattaccttagtgagctcctctttcctgagatctggatggactacattttggggaaggatggaaggtgtgtgggcatgggccatgtagttagatctgcatggcgaggactcagagtctgggagccattgacaagcacctccactcctcgaaggccgacggcagctgtggctctccaaggttgaagaaatgaagacaccactccctgtgtgttgtcagtggccaggcctatgcagtggagtgcctggccattcgtgaagatctacagctggattaggtggcatttagccattcatttttcaagtttctgtgtcttggaggaaaattgagagtgcacatatggcctaaaagtttaactcctaactcctgtaattcattgatcagaattataattttcactttaatgatttataaatgtgtaccttcaagtgctaatgtttgctctgtgtttttagatggctatcccaaagaagaaatgatttatagatggagaaaaaattcagtggaggcagctgaccagaaatcatggcggctttatcagtttgacttcatgggcctcagaaacaccacagaaatcgtgacaacgtctgcaggtaggaatttactgaaagaggcacagctctcaaaagccagagaggcctaaggccatatgtag

SEQ ID NO: 13451 - DNA, 2300 bp, Homo sapien
gctaagaagcccagagacagtgagcatgtggctgtgctgggtgtgggtgcctgtcggctcgcgggggggctttgtcacccctcagctgccgccagggctgggacacatagatttggctcacccgagccagtccctggcatggaagttgggtttcctccattactgtggccactcagggtctatccctggagctggggtagggttgctccttccccatacattcagcagttacacaaaaacaactgtgacctgcaaggcacagagagccacacgcttggccgcagctgtcctgctggcgtttcaaagcccgcatttcgacagatctgcgtgcacaccaagagccttctgcccactcagggagcctcccccgggctctgtgccccagccccttcccgccctgtaacagtgtccctgaggcactgggaggggagcaggtgcagtgatgagcgaggaggagacagtatttctgggacgggaactggtgcatcggtggtcacaggctccctggagccgccatcccacaaggatgggggtcaccatgcaggctgcttgccagccatatccacacctaacgcacacggcggtctgaactgaggggtctgcacatgcgacagtgaatgtggtctcagagatctcgggctctcctgctgtcagggccctggctgggaacttcagtgtcctggagcctgccatgccgaggacatcctcggtccctgctaccagggcaacccctggcccaccctgtggctgtgcaatgtgctctgttataaggcatgagatctctttcagctctgctgttacactgtggatggagcctcttacttcctgccaattcctgtgcagggcctggccactgcagctgtgtgtgtgtctgtagctgtgttgtctccatgtgtttgtgcgtgtatctgtgtgtgtgtctgtatctgtgtgtgtatctgtgtgtgtctgtgcgtatatctgtgtttgtatatctgtatatgtgtatctgcgtgtgtgtctgtgcatgtatctgtgtgtgtgtctgtatgtgtctatgtatctgtgtatctctgtgtctgcgtatctgtgtgtctgtgtatctctgtgtgtagatctctgtatctgtgtgtatctgtgcatgtgtgtatctgtgtgtctgtatctgtgtgcctgtgtatatctgtgtctgtgtatctctgtgtgtgtccgtgtgtgtatctgtgtgtgtctctgtatctctgtatctgtatgtatctctgtatctgtatctgtgtgtctgtacctgtgtctgtgtatctgtgtctgagtatctgtatatatttgtgtgtgtctgtgtatctgtgtctgtgtgtatatctgtgtatctgtgtgtatctctgtgcctgtgtgtgtgtctctgtgtatctgtgcatgtgtctgtgtgtatctgtgtatgtgtgtctgtgtatctgcatgtgtccttgtgtgtcatctgtgtatctgtgtcctgtatctgtgtgtctgtgtattgctgtgtctctgtgtgtgtctctgtgtatgtgtatctgtgtatctgtgtctgtgtatatcgtgtctatctctgtatctgtgtgtgtgtctgtgtgtatctgtgtgtgtctgtgtatctgtgtgtgtctgtgtatctcgtgtgtgtgtctgtgctgcaggaggggctgtcggcaagtgtaaccttggcgtcctagctggagggcctctcagtgcccgctgggagagctctgaagggaacagaatgttcactgagcatttccccgttcttgttcatagggaaaagcctgtccgcagtcctgggccgcctctttagaggtaaagctggaaactatccccgcggagagcgctgtcggggacgccggggcggcgtggccttagacggagctgctctcagcccgcgccgccgggggctggggagctgaggggccgggggtgcggagcgggcgagctgtgggcggggccatgtgggcagctttgtgggcgtggccgggaggggcgtgctacgggcgtggccgcactgtgggcggggccgagtggggagtgctgtgggcggggccgggccgggggcgtgcctgggtgggggacccgctgcgggagcgccgagctccctctgagttcttacttcgaaggctgtgctccgctcaccatccagagcggaggtgcggaccttaaactcactcctggagaaagatctgcaagtgcgcaggtaaagtgcacgtgctccgcggtcgggaggaaggaggcgaggagccagactagcctgggaacaggcagggagggtttacacagccccggctgagtcgcggctt

SEQ ID NO: 13452 - DNA, 2300 bp, Homo sapien
acaaagagaagcctcggcccctgatgatgatagcgtgcagaacttgacatttaatgctcaaatgaaactggcctcgcctcttggatcagacacagagagccatgaagaacaaattctttgttcctgtacctttgtattaacacatgatttttaccctgatgttgattacaagactagaaatgttttcagagttatacttgggggcattttgaattaagacacgaaactcttgtcctttgttggacagctcatgtgaccacattgatggagctggtctcttcactgacgtcagagtgtttaatgctaagctgtacgtcagtcacgtcctcacataaataggttgtttaactaggttcataaaaaagcttttatttccctaccttggacgatggcttcagtttgctgtgcatcataaacattatagcttgtaggcaaggccagctgatggcttctgcgttgtctaacccccgcgattgagtgcaccttgacttgcacctccctcaaaaccgcacgcagactttttgggccaggggctctcagggtgggtattcaagcctgggggactctgggaatcagtgaagttttgataaactaggatgcaggttaggcacccttgtttctgtctttgtatcatctgaaatttttaagaagtcattacatgctgagcacctctttcttactcatcttgctatccccagcttgtgttacaaaaacgttcagtatgcaattgaaaaaacaaactgggtaaatggcaaacaaatttatattagtcgttggtggtggctcatgcctgtaatcccagcactttgggaggctgacgtggatggattgcttgagcctaggagtctgagaccatcctgggcaacgtgataaaaccccatctctacaaaaaatacaaaaattagccttgtgtggtggtgggtgcctgtagtcccagctacttgggaggctgaggcaggaggattgcttgagcccgggaggcagaggttgtagtgagccgagatcataccagcgtactccagtctgggcgacagagccagacactgtctcaaagcaaacaaaaaacgacaacttatatcaggccttttttttttttttttttttttttttttttttttttttgagagggagtcttgttctgtcgcccagcctggagtacagtggtgcaatcttggctcactgcaacctccacctcccaggctcaagcaattctcttgcctcaccctcctgagtagctgagattacagacgtgtgccaccatgccaggctaatttttttttttgtatttttagtagagacaatttcaccatgttggccaggctggtcccaaactcctgactgcaggtgatccactcgcctcggcctcccaaagtgctgtaggcatgagccaccgcacccagccttttttgtatttttagtggtgacagggtttcactgtgttggccaggctggtcctgaactcctgacctcaggtgatccactcacctcagcctcccaaagtgctggtattataggcgtgagccaccgtgcgtggtgtcaggccttcttaagaatcagataaacacccttcagcctagtgtgcaatgtggattgacgtctgggggctgctctggctcagccacggccccgggtgccagaggtggctccttcccgttcagggtagcatgcccctcccaaagcgaggaaattttctacagatgtagaaatagaagtgattttctgcctaaaaatgaacatggagaaaaacattgtttgaattcagggtgtgcacaggacaccagcacggagccaggaaggctgcacaggcgcctccaacccgccaccccatggctgcgatgatgggctcagggacacgcctcccaagaggatgccatgggagggactctcacagctgtctggatagtttcagagactccagaacacaggtcatcttactggaaggttttgtttgttgggaattttatttagttttatagcaggatctgaacatcactacataaaaacttttttatacttaaaaatttattacagagttattgcatgcacatttctgaaaatttagggaattcagattaaagacagttaaaatcatctgtgtttctattgagcagagaaagtgctgtcccgcaggagcctgtctgcctccagccttatggctgctgttttctgcagcctctgagtgcagacagcctctactagtgggtgtcgtcatggaggagaggcagccccgtgggcttcggggagctgggtgcacctctcctctcacacagccgccgtgacatagggcatgtcctgttctt

SEQ ID NO: 13453 - DNA, 2300 bp, Homo sapien
aaccttattttgggtttgtgtaaattgtgaaaaaatattaactagatgcagcatgggttaaatgctcacatcttcatgaagggatctttttccaggaagtagaattattcaaagaggctcgtcaggactctggcagccgtttgtttcattcactcaggagcctcttgggggtgctctggtgccgccagcctctccgctctctccatgctgtggagcaggtgagggcagcagcgaggcacagggtcagggctacgggacgttcgcatagaggaggcgacgtgattgagtgtaagagggatgggagctttcatggctggcaacatagaggattagagatgttcattccaaaatctttcttgctgtgtaatacattaaaaatctggacaaaatatcagagacaaaaataaaactatcagtactcagtttggcaatcagaaattaccctaacagaaaccctcagatagcagggcccttctgggagcaagggtccagatgaggcagccactgccttggacaggtgggaggcctcccccagtcctagaacgagctggaaagatggtgggggtgcaaagggagaaagcaagaaacgggtgtgggcaggaagggaggaggttggccatgagctcttctgaactccagcttcttctcaggtctgggaacctccaaggtgaaggttcattttaaagggcctggttgtgtttccagtctccctggcagagatcaaaagaagacgctgagcaacttgagagcagtcatgctgggagatgccgagtgtgaacaactggaaggccgtgtagagttgtccttcaggaactgagaaggactgttgtacaaaaagagaccttccgctgttttgtctccatggattctgatggagagttgttgttctcttctttttcatgaaatgtcttttttctgtggttgcttttcgtattttctattatctttggttttctgcagtttccctaagctgggctcatgtatacaatggtggcacaccccgcccaccccaccgtcctccttgaaatttgctgaagctgcttgcatctttggcttgatttttgttcccctaccaaatttggaaacttttgactattgttttttccccctgccttgctctttttgttcttttctggaaatactattatacatctgttacactgttagtgagtttccttttacgattttaatagaaagtcttctccttgttagtagcttggttagtttgtcttgatctgtttgaaaggtcaagatgctttgctttgttgggcctaatctgttgttatatccatccaagacatactttattttatatttctcacatctcttatttccatttggctctcatttaatagttttatatctcttctgacagttcctttcttcatcctttaagtctatcttttttttttttttttttgacggagtctcgctctgtctccaggctggagtgcagtggcgtgatctcagctcactgcaacctctgactcttgggttcaagtgattctcctgcctcagcctcccgagtagctaggactacaggtgcctgccaccacgcctggctaatttttgtatatttagtagagatggggttttaccatgttggccaggctggtctcgaactcctgacctcatgatccgccctcctcgggctcccaaagtgctgggattacaggtgtgagccaccgtgcctggccaaatctatcttttgctgtacattttaaaacatatttctgatagttatgttgaatttcttgtttgctaattctaacatctgcccacctgttggtctgctgctctttgcagtttttattccttgattatagtcagttattggttgttgtccttcacatatgtgagaattcttatttcattctggattctttggacgttacattgtattggctctgggttctgccgcctctggagaaaggggagttttcttctcacaggcagttcagtacctggcagtcctccttgatcctgaggtggcttggtgccaggctttctaatgattttgtatttgcccttagccctggttgtggatccttaattctcaaggatttagaatctcttctgggcgtcactggaagccttgacattctcctccccacctctagttggttgagcttgagcctcagatgctgtcctggccctgggcagctggggagcccctgcagccttccagcggtccctttgtgccgagcgcaggctcttcagtggtgcttcagtttagattcagctgtagatttgcgggtagtccgtccgcatatttcgtggttttccctctgtggtttctt

SEQ ID NO: 13454 - DNA, 2300 bp, Homo sapien
tgagctaccatgcccagccctgctttaatttaaagtgtattacatttgatattagtacagccccttcagctcttttttggttactattttaattgtatctttgtatccctttactttcaatctgtttctgtatttaaaatgtttatcttgtagatagcacattggtggatcatattttgttcttcaatcctttcagccagtctgcttttctttctttctttttgagacagagttttccttttgtcacccaggctggagcgctatggtgcgatctcagctcactgcaacctctgcctcctgggttcaagcgattctccagcctcagcctcctgagtagctgggattacaggtgcgtgccaccaggcctgactaatttttgtatttttagtagagacaggggtttcttcatgtcggtcaggctggtcttgaactcctcacctcaggtgatccaccgcctcagcctcccaaagtgcaggcattacacgcgtaaaccactgcgcccggccaaagtggtggattttttttctcagaaaatctattccattctttttccagaaaccaaatttgtacaagttaactaaaataaatatttatactctaatttttttgttctgaggtctgagtttttagaattttatctttacatgtttagaaaaattagaaaatatagatagaacataaccaagaaaataataacaactttccttctgttcaaagttcattactattagccgagtgcagtgactcacacctgtaatcctagcactttgggagactgaggcgggcggatcacttgagcccaggagttcgagaccagcctgggcaacatggcaaaatcccgtctacaaaaactacaaaaattagccaggtgtggttccatgtgcctgcagtcccagctagtggcaaggctgaggtggagaaccacctgaacccggtaagtcaaggctgcagtggtgcagcctctgtcccccaggctggagtgcagtggtgcaatgtcggctcactgcaacctccgcctcccgggttcaagcgattctcctgcctcggcctcccgagtagctgggattacagtcacgtgccaccacacctggctaatctttgtattttcagtagagaaggggtctcatcatgttggccaggctggttttgaactcctgacctcagatgatccacctgctctggcctcccaaagtgctgggattacaggcctgagccaccacgcccggccgttatttttctttcttagaggcaggatctcactctgtcgcccaggctggagtgcagtggcacgatctaagctcactgtagcattgatctcccaggctcaggcgattctcctgtctcagcctcccgagcagctgggatcacaggtgtgtgccaccacacctggctaattgttaaatttttttatttttattttttagagatggggtcttgctatgttgcccagtctggcaacatgggatcctccaactcctggcttcgagggatcctcccgcttcggcctcccaaagcgctgagaattacatacgtgagccaccacgcccggcctatattgttttatagttcttcaattttgttttgtggtcgctggaggtgtttccttcttcgattccctgcacagtgcttccacagctgctccatggaatctgcccaagacttttgctgcgttcagttgaacacacaggaggaagctcttcaggccccagccagccgaccgcacaaagatgcgttctcatacccaggggagctggtctcgccactcgacccgcgccctggatagctatagttagtgtgagcgccaccacccgccgcggcgtgatcaagagcgctccgagccaagcagtctcccgtgggagtgcgggagtgcgtgcgtgtggcggaaatcccgccttccggcgcccgctgttggccttggccgcagccagggcgctccaagtaggaagataagcgggattgctggaagcgggagagtcgggaggagcggcgaagggctcctcttccccattggctgcgcccacggagcagcctcgttgcgattggccgtacgcggggggcggcagtcccgcgtcggcccgcccctcgggccgcgagaggcgccgggatcgcgggcgccggctgagccagcggctcttgggaggctgcgtccgcgcgccggcgaggcgaggcggccgggccctgcgcgtcaggtcctggcctggggcacctgggcggccggtggcgggggcggtacgggcgcggggctggcgggcggccgagcccgggaggcgggcgtgggcgcggcggccgcaccggggcct

SEQ ID NO: 13455 - DNA, 2300 bp, Homo sapien
ctccagccaagagctggaaaatttgggtccttgttctggccccgccatagaatcctctagagtgtactaaaaatgtacaaattggggccctgcctggggaatcagaatctcaagagttagggcttaaaaatatttttttaaaggatcatggatgaaaaccattattttatagattacatttatttatttatttatttatttatttatttatttgagaagtagtctcactctgtcacccaggccagagtgcagtggcgcaatctcggctcactgcaagctccaccccccggcttcacgccattctcctgcctcagcctcccaagtagctgggactacaggtgcccaccaccacacccagctaattttttgtatttttagtagagacggggtttcactgtgttaaccaggatggtctcgatctcctgacctcgtgatccgcccacctcggcctcccaaagtgctgggattacaggcgtgagccaccgcgcccagcctatagattacatttatgtggctagctcatgattctgcttccttctgaggttcaaaaaaacactttcactattccagcagcagctgcaggcggaggctgaccacctgggtaaggagctgcagagtgtgtcagcaaagctccaagcccaggtggaagagaacgagttgtggaaccgcctgaaccagcaacaggaggagaagatgtggaggcaggaggagaagatacaggagcgggaggagaagatacaggagcaggaggagaagatacgggagcaggaggagaagatgcggaggcaggaggagatgatgtgggagaaggaggagaagatgcggaggcaggaggagatgatgtgggagaaggaggagaagatacgggagctggaagagaagatgcacgagcaggagaagatacgggagcaggaagagaagaggcaggaggaggagaagatacgcgagcaggagaagaggcaggagcaggaggcgaagatgtggaggcaggaggagaagatacgggagcaggaagagaagatacgggagcaggagaaaaagatgtggaggcaggaggagaagattcacgagcaggagaagatacgggaggaggagaagaggcaggagcaggaggagatgtggaggcaggaggagaagataagggagcaggaggagatatggaggcaaaaggagaagatgcacgagcaggaggagaagatacggaagcaggaggagaaggtgtggaggcaggaggagaagatgcacgaccaggaggagaagatacgggagcaggaggagaaggtgtggaggcaggaggagaagatacgggagcaggaggagaagatgtggaggcaggaggagaagatacgggagcaggaggagatgtggagggaggaagagaagatgcatgagcaggagaagatatgggaggaggagaagaggcaggagcaggaggataagatgtggaggcaggaggagaagatacgggagcaggaggagaaggtgtggaggcaggaggagaagatacgggagcaggaggaaaagaggcaggagcaggaggagaagatgtggaagcaggaggagaagataagggagcaggaggagaagacacgggagcaggagaagatacgggagcaggaggagaagatacgagagcaggaggagatgatgcaggaacaggaagagaagatgggggagcaggaagagaagatgcaagaacaggagaagatgcggaggcaggaggagaagataagggagcaggaggagaagatacgggagcagaaggagaagatacgggagcaggaggagaagatatgggagcaggaggagaagatacgagagcaggaggagatgatgcaggaacaggaagagaagatgggggagcaggaggagaagatgtgggagcaggaagaggagatgcaagaacaggaggagaagatgcggaggcaggaggagaagataagggagcaggagaagaagatacgggagcaggaggagaagatacgagagcaggaggagatgatgcaggaacaggaagagaagatgggggagcaggaggggaagatgtgtgagcaggaagcgaagatgcaagaacaggaggagaagatgcggaggcaggaggagaagataagggagcaggagaagaagatacgggagcaggaggagaagatacgagagcaggaggagatgatgcaggaacaggaagagaagatgtgggagcaggaggagaagatgtgtgagcaggaagagaagatgcaagaacaggaggagaagatgcggaggcaggaggagaagatgcgggagcaggaagtgaggctgcg

SEQ ID NO: 13456 - DNA, 2300 bp, Homo sapien
actgaggttttatataagtcccctgattcttagaacatgaaggtgtagtattcaagtttggtcccttgaaaccacaatttttgttaaaaaaaaattaagaaaattgtataatttcctcagcaaatacatattgatcatctgttatacagccatgagaagtggttctgttgaacacgtttattttatcagatcccaattctaaaccaggcatagaatggaaaccatgaaggtaggatgaaataacttctgaatgtttgaaaatagtgtacttaaaaataaatatcaggtgtttttgttttgttttttgttttttgtttttgagacagggtctcactctgtcacccaggctggagtgtggtggtgccatctcacctcattgcagccttgacctcccaggctcgggtgatctcccacctcagcctcccaagtagctgggactacaggcacatgccaccatgcccagctaattttttgtattttttgtagagacagggtttcaccatgttgcccaagctggtctagaactcctgggcttaagcgatcttcccacctcagcctcccaaagtgccaggattacaggcatgagccaccatgcctggctgaaaataccaggtttttaagtatcagcactgcctcttcaatcttttctattactatgttgtgctcagtggtattttttattgaattagagcagtgctgttcaatggaaccttctttgaggatggaaatcttttatgtctctgctgtgtgggtatggtattagctgggtatggggcacctgcctatagtcccagctactcaagaggctgaggtgggaggatcacttgagcccaggaggccgagtctgcaggttcgtaccactgcaattcagcctgtgtgacagaatgagactcagtctcagaataaaatgaaataaggaaataaaaatgtaattgttgaaataagaaactagtggatggattagacacgagaagaaagaattaattgtttaggcgattctctccaaaaagtaagtcagcatgtcacacagagagacatgaggatggatgatagggcagaagttggtgggcttggaggggagaggaagatcagaatgaggtccaaaatgtgtcttagtgaaatcccaggaggagatattaaaattatattagaaagtgaaagaaatagaagttttatttatttatttatttatttattttgagaaggagtctcgctctgtagcccaggctcgagtgcagtggcacgatctgagctcactgcaagctccacctcctgggttcacgccattctcctgcctcagcttcccaagtagctgggactacaggcacccaccaccacgcctggctaattttttgtatttttagtagagatgtggtttcacctttttagtcaggatggtctcaatctcctgacctcatgatccgccagcctcaggctcctaaagtgctggaattatacgcataagccactgcacccggcccaaaagctttgtgtttttacaaatattacacatgtttcttgtttaagaaaaaaagtcttcacaataacgtaggagaataagagaaacatttttccaaaaaagagaagtcattgtgattattttatcttattggaatgttggataatatagtctgcttcagtaatcatcaagcatgctatggattttccatcttcataggatctgtatctcggttaaggtaatactggtaatttttgtactctatgaaaaatataggccaaaatcatagaccttgcatagaagctggatcatgaagacagctctggaggaacacacaggtacacacacacagacacacatatatataaagtatacacatatatattttttaaaagcttttaaagcaaaagccggccctgcccctctcccagagttggcggcctctcccctctcttagagtgggtggggacagtggttgcatgggcagctttccttgtgagccaaaggtccctctggacacatgatgcctggccacgccccctttccctttcatctttctcattaaccaatgggcttggagcattaaggccacgcccctattctgccttctactgcatccctggttacgcctcctctggctcagtcgcacagctacctggtaggtgactggaggtgttgatcagtgcttggtgggattttgctgatgtggccccaagcccgcctccctccccaccctgcgatggcagaagaaactcgacaaagtaaattggcagcagccaagagaaaggtaaaaacacaccaggtcacggacccccaacccagccatagatcctctccaacg

SEQ ID NO: 13457 - DNA, 2300 bp, Homo sapien
ggcaactgaggttttatataagtcccctgattcttagaacatgaaggtgtagtattcaagtttggtcccttgaaaccacaatttttgttaaaaaaaattaagaaaattgtataatttcctcagcaaatacatattgatcatctgttatacagccatgagaagtggttctgttgaacacgtttattttatcagatcccaattctaaaccaggcatagaatggaaaccatgaaggtaggatgaaataacttctgaatgtttgaaaatagtgtacttaaaaataaatatcaggtgtttttgttttgttttttgttttttgtttttgagacagggtctcactctgtcacccaggctggagtgtggtggtgccatctcacctcattgcagccttgacctcccaggctcgggtgatctcccacctcggcctcccaagtagctgggactacaggcacatgccaccatgcccagctaattttttgtattttttgtagagacagggtttcaccatgttgcccaagctggtctagaactcctgggcttaagcgatcttcccacctcagcctcccaaagtgccaggattacaggcatgagccaccatgcctggctgaaaataccaggtttttaagtatcagcactgcctcttcaatcttttctattactatgttgtgctcagtggtattttttactgaattagagcagtgctgttcaatggaaccttctttgaggatggaaatcttttatgtctctgctgtgtgggtatggtattagctgggtatggggcacctgcctatagtcccagctactcaagaggctgaggtgggaggatcacttgagcccaggaggccgagtctgcaggttcgtaccactgcaattcagcctgtgtgacagaatgagactcagtctcagaataaaatgaaataaggaaataaaaatgtaattgttgaaataagaaactagtggatggattagacacgagaagaaagaattaattgtttaggcgattctctccaaaaagtaagtcagcatgtcacacagagagacatgaggatggatgatagggcagaagttggtgggcttggaggggagaggaagatcagaatgaggtccaaaatgtgtcttagtgaaatcccaggaggagatattaaaattatattagaaagtgaaagaaatagaagttttatttatttatttatttattttgagaaggagtctcgctctgtagcccaggctcgagtgcagtggcacgatctgagctcactgcaagctccacctcctgggttcacgccattctcctgcctcagcttcccaagtagctgggactacaggcacccaccaccacgcctggctaattttttgtatttttagtagagatgtggtttcacctttttagtcaggatggtctcaatctcctgacctcatgatccgccagcctcaggctcctaaagtgctggaattatacgcataagccactgcacccggcccaaaagctttgtgtttttacaaatattacacatgtttcttgtttaagaaaaaaagtcttcacaataacgtaggagaataagagaaacatttttccaaaaaagagaagtcattgtgattattttatcttattggaatgttggataatatagtctgcttcagtaatcatcaagcatgctatggattttccatgttcataggatctgtatctcggttaaggtaatactggtaatttttgtactctatgaaaaatataggccaaaatcatagaccttgcatagaagctggatcatgaagacagctctggaggaacacacaggtacacacacacagacacacatatatataaagtatacacatatatatatttttaaaagcttttaaagcaaaagccggccctgcccctctcccagagttggcggcctctcccctctcttagggtgggtggggacagtggttgcctgggcagctttccttgtgagccaaaggtccctctggacacatgatgcctggccacgccccctttccctttcatctttctcattaaccaatgggcttggagcattaaggccacgcccctattctgccttctactgcatccctggttacgcctcctctggctcagtcgcacagctacctggtaggtgactggaggtgttgatcagtgcttggtgggattttgctgatgtggccccaagcccgcctccctccccaccctgcgatggcagaagaaactcgacaaagtaaattggcagcagccaagagaaaggtaaaaacacaccaggtcacggacccccaacccagccatagatcctctccaacg

SEQ ID NO: 13458 - DNA, 2300 bp, Homo sapien
agccaagagctggaaaatttgggtccttgttctggccccgccatagaatcctctagagtgtactaaaaatgtacaaattggggccctgcctggggaatcagaatctcaagagttagggcttaaaaatatttttttaaaggatcatggatgaaaaccattattttatagattacatttatttatttatttatttatttatttatttatttatttgagaagtagtctcactctgtcacccaggccagagtgcagtggcgcaatctcggctcactgcaagctccaccccccggcttcacgccattctcctgcctcagcctcccaagtagctgggactacaggtgcccaccaccacacccagctaattttttgtatttttagtagagacggggtttcactgtgttaaccaggatggtctcgatctcctgacctcgtgatccgcccacctcggcctcccaaagtgctgggattacaggcgtgagccaccgcgcccagcctatagattacatttatgtggctagctcatgattctgcttccttctgaggttcaaaaaaacactttcactattccagcagcagctgcaggcggaggctgaccacctgggtaaggagctgcagagtgtgtcagcaaagctccaagcccaggtggaagagaacgagttgtggaaccgcctgaaccagcaacaggaggagaagatgtggaggcaggaggagaagatacaggagcgggaggagaagatacaggagcaggaggagaagatacgggagcaggaggagaagatgcggaggcaggaggagatgatgtgggagaaggaggagaagatgcggaggcaggaggagatgatgtgggagaaggaggagaagatacgggagctggaagagaagatgcacgagcaggagaagatacgggagcaggaagagaagaggcaggaggaggagaagatacgcgagcaggagaagaggcaggagcaggaggcgaagatgtggaggcaggaggagaagatacgggagcaggaagagaagatacgggagcaggagaaaaagatgtggaggcaggaggagaagattcacgagcaggagaagatacgggaggaggagaagaggcaggagcaggaggagatgtggaggcaggaggagaagataagggagcaggaggagatatggaggcaaaaggagaagatgcacgagcaggaggagaagatacggaagcaggaggagaaggtgtggaggcaggaggagaagatgcacgaccaggaggagaagatacgggagcaggaggagaaggtgtggaggcaggaggagaagatacgggagcaggaggagaagatgtggaggcaggaggagaagatacgggagcaggaggagatgtggagggaggaagagaagatgcatgagcaggagaagatatgggaggaggagaagaggcaggagcaggaggataagatgtggaggcaggaggagaagatacgggagcaggaggagaaggtgtggaggcaggaggagaagatacgggagcaggaggaaaagaggcaggagcaggaggagaagatgtggaagcaggaggagaagataagggagcaggaggagaagatacgggagcaggagaagatacgggagcaggaggagaagatacgagagcaggaggagatgatgcaggaacaggaagagaagatgggggagcaggaagagaagatgcaagaacaggagaagatgcggaggcaggaggagaagataagggagcaggaggagaagatacgggagcagaaggagaagatacgggagcaggaggagaagatatgggagcaggaggagaagatacgagagcaggaggagatgatgcaggaacaggaagagaagatgggggagcaggaggagaagatgtgggagcaggaagaggagatgcaagaacaggaggagaagatgcggaggcaggaggagaagataagggagcaggagaagaagatacgggagcaggaggagaagatacgagagcaggaggagatgatgcaggaacaggaagagaagatgggggagcaggaggggaagatgtgtgagcaggaagcgaagatgcaagaacaggaggagaagatgcggaggcaggaggagaagataagggagcaggagaagaagatacgggagcaggaggagaagatacgagagcaggaggagatgatgcaggaacaggaagagaagatgtgggagcaggaggagaagatgtgtgagcaggaagagaagatgcaagaacaggaggagaagatgcggaggcaggaggagaagatgcgggagcaggaagtgaggctgcg

SEQ ID NO: 13459 - DNA, 2300 bp, Homo sapien
atctgtagtgttttagagtgtatctttttgtatagcttttttagtggcttttctaggtaatatattacatacagattgagcatctgtaaacccaaaatccaaaatctgaaatgccccaaaattcgaaactttatggcactccagcatgacgcccccaaattgaaaattccattcataagtacttagcatgaactttgtttcatgcacaaaattactaagcatgctatataaaattaccttcaggctctgtgtgtaagttatatataaaacataaatgaatgtatttagacttgggtcctatccccaaaatatctcattatttatatgcagatattcctaaatctgataaaaatctgaaatttggaacacttgtgctcctgagcattttataagggacactcagcctgtgtatgtatgaacacttatcagattttacctgatgttgtcatttaccagcttcagggatatagaaactacctcctttgatgttcctttatgttcttctgttcataatatacttgccttaaatatttcatttacttacattgataaccacatatgacaatgttataatttttggttgaaccttcagacataatttagcaaagtcaagaggtgagggaaaagtctattgtatttatgcgttggtgtgcttgtcatctcctccttccagaagttccagggttttcttctttgatggttgccattctgcttagagaacttccattagcctttcttttggtgtgggtcttctggtgacaaattctgtttcacttcctctgagaatgttttgctttccttttcattcctgaaggacatttttgctggatataagaattctgggttaatggttcttttcatcgcttgaaaaatattttgtactttcagctgggctccatggtttctgatgagaaattcgctgtcatttgacttgttaatccacgatagttaaggcactgtttttgtttagtggcttttgaaatgttttgtcttttgttttttggagtttgattattatatgtcttagtttggatttctttgggttcatcctgtttagggtttgcttaccttagatctgtagatttatgtctcttgccaaatttgggaacttgtaagccatcacttcatagagtacagtttcagccccaccttctttctcctgtcccttcgtgagttcagtgaccggagttgttatagtcccataggtccccgagactgtttttttgtttgtttgtttgttttgcgggtacattgctttctttctcccttcccgtcccgtcctatcccatcccgtcctgtcctatcccgtcccatcccgtcccttcccgtcttcggagtctctgcctgtttcccaggctggagtgcagtgcacgttctcagctcactgcaactgccgcctccctagttcgaatgattctcctgtctgagcctctcgagtagctgggattataggtacccgccaccatgcccagctcagttttatatttttaatagagatgaggtttcaccatgttggccagggtggtctcaaagtcctaaccttgtgatctgcctgcctcggcctcccaaagtgctgggattacaggtgtgagccaccatgcccagcctattatttggcagtctttaaactaatgataataggggtcttctgcctttagaagaattagaactgtgatttaatttgcaaatgaaagtaggtgttctccagagtggattaaaataaaggttttggttttagatttcaaggccagcttgagatgctgtgctgggttcccacagaggtggttctgcctttctccaggggtcctaggcttgtagagtggtttggtcatgttagtaatctgtgtggattcaacttacctatggtatcataaatgtatacatgcacagtcaatgttgtgtacatgtatacagcagatttagagatttatacagtttatatgctgcataaatatatagacgtatagtataactgtatcatcaacattgtcatttgatgggtcaagtgagtcaataccaaaatataaagcgtgggtaaaaaactgtgttactttagtttttcccaccagttctgaatttttgtttacttttcctttctagcttttgtgtggtcctctgagccccagtgagagtttcctgaggtacctcacccttccacaagacaacaggcttgccattgatctgcaacaaacggcggttgttgtcatggcccatttagaccgtctggctacaccctgtagatgcctcctctgtgtagctctccgacgtctcataaggtgtgtgcaagaaccgtgttctcc

SEQ ID NO: 13460 - DNA, 2300 bp, Homo sapien
tgagtttctttgactctaatccaacatgatgtcacctaaattcttaccttaatgacgtctacagagacctcattaaataagatcatattctgaggttccgaatgtatgtgaagttggaggacaggcacagtttaatccataaagtgtttgtgtgtgtggagagtaagtatgagaaatgtgagctgagggagtggggtgagtgtgcatgtgactgcgagtgagcacatgtgagtgtgggtgggtatgtgggcgtcctccagtgtgtgtgtgagagcatgcgtgtattagtggtgtgctggagcgtccgcacatattgatgagagtgagtgtgttagtggtcgatgggcaagtggctgagcgtttgtgttgcaagtgtgatggtgtgtttgtagcatgtggttgtgtgggtgtgtgtccatgagagcatgtgagtgggcaggtgactacattcaggtgaagtgggagtgaaagcgtcagtgcattgagccagtgtgtgtgtgagggtgagcacgagggaggcatgagtgtgagtgtgaggggattactgggtgtgcgaatgagacacccagtgtaagtgtaagtcagtgagggttggtgagtgtgaggaagtatgagtgggtggcaggcacaagtgtaagtgtgcgattgagtgcgagcatttgtgtaaatgtgtatgagtgccttgtgtcagtgtgagcacgagtgatgttattgtgaatgcgtgtgagtgaatgtgagcattttgcttgtgtcagtgaatgggaggttataacagtataggtgtgagtgtaaagtgagaaagtgtgtgggtaaaggtgtgagtgggtgagtaatcggtcgttactagtgttgaggagtgtgagtgcatatgtgagtttttgtatgcattgggaggggtaagtgtatgtgagagtgcatgggagtgtgtgtcagcttgcatctgtttgtgcatacgtgtgactgggattgtgtgtgtgttagtgattgcgacagtggtgtgagtgcacctgaaagtgtgagggtgggtgtatgagtgcccatgagtgtgtctgaataacttagtatcagtgtgagtgtgaggatgcatatgagggtgtgagagtgagtgtgtgtgtgtgtgagcgcatgtgagtgtgctgaaggaaggcaggtgtcctcataagcttggatagctgagggcagggtgggggaggtgggagggagagcaggtcctgtggggctgtgggcggggtccctcagggggcccagcctccaagcctcagcctccattcagggagtagtggagtcctggagccaggcggagcagaggtgggcccactggtgctagaatccagtggtgtaaacctagtgaaaaactcattttgttaatgcagatgcattaaacttggattggaaactgtctctactaaaattacaaaaagagtatttaagtggtgcagattaaatataagcaagattgtggagatatttaaaacacgaaattaaaaatataatagatgcactgttgcaaattactatttgaattatagatcattttcctattgcctagaaacaatacatagctaaaattccctaactacttttacgacacatatttagaaggttttaaaaatgcctgtagtcccagctattcggcagggcaaggcaggagaatcacttgagcccaggagttttagaccagcctgggaaacacagtgagggcccatctctaaaaaaaacaaaaaaaaaagaaaacttcggaaatgtttcttgaactaacttaaaagccgccttccacttctcactttgaattagtttgaattaatttacaaactgcaatatattttaaaggagcttattgtagaaaataagttgataaaaaaataaggatatatctttagggatttgtctttagggacttgttaccaagcatgtctattttccctcctgcagcttctccaaacaggctggtgtacagggagcaacaccggagctggtgcacgctggggtttgtgcagagcatcgctctcacgctgcaggtgtgcggcgccctcagctccctgcagtggatcacgctgctcatgaaggtcgtggaagggcacgcacccttcactgccacctcgctgcagaggcaggtaatgtgctgccaggcaaaaccagttccctgagagaggcctccatgtactgaagttccctgccctcagagtcaggggcctttattcagtaacgagtgcagaaagggtctagaagtgacagggtagattttctggaggcaaggggcagaggtccttgataattggtaagttgctaaccttcagttt

SEQ ID NO: 13461 - DNA, 2300 bp, Homo sapien
tctgttgaaactgctagtcataaattatgtgtttaaatgtagtagataatgataattatttttccaaaatgattgtatcaacttaataactcattcaaatatgtgaagacctcctaacaatctaaaaagatggacctccaatttcaaataataaataaaaagagtaagtacttgaacaggcagtatatgcacattttttaaaataaaagattgagttaaattttgtaaaatgtaggccgggcgtggtggctcacgcctgtaatcccagcactttgggaggcagagacgagcagatcacgaggtcaggagatcgagaccatcctggctaacactgtgaaaccccgtctctactaaaaatacaaaaaattagccgggcgtggtggcgggcacctgtagtcccagctacttgggaggctgaaacaggagaatggcatgaacccaggaggcagagcttgcagtgagctgagattgcgccactgcactccagcctgggcaacagagcgagactccgtctcaaaaaaaaaaaaaaaaagaaatgttaagtaagaatctcatttgagctacatgtgtgaaaatatgtcttttacattattatataacacagattttggatatgacgagtgctgaactgaggcttttcacttgatatgcattacaaattagaatttttcactcacaaaacatgcttatgacaattttatatgtgaatagaattgtaaaaattgccttaagagttattgaataaaatgtttaaagtaccccataggatgaggaaaaaatggaagagttaatttaacaaggatacaaagcgtaaaagatagagaagaataagagttcaaataaaatcgaatgaaaagacaccatcttgtgtaactctgtagttaattgtgcatgtgtgctatttttcatgacttggagcacgttatttttggccaagagcttccattctatctatggatatgccaaaattttcctattttagatcttctagtctccaactctcaagataaaaaacaaaaatcattaaaacctctgactgatattgaatgcctgcataaaaatctcctcccatcaccttgcaacagatgacttgctcatacacctttttgactaccactccccatcaagggttctctccttcgagacggcagtaattctctatgtatttcatgttatgtgcaaactttactttcaaagagttgttacctatattaatgtatttacatcattcacttaatatattttctctatcagtaaaattggtttagatatattggattaggatagaacacgtcacaatttttctcacctttatgattttttttttttagttggaccctttttcagttggtgacagtgtcagaaatgaattaaagttgttaagaataggtaagggtaaagagaagggtgtccttatgtatcaactttgcttatttagttttttcaagttcagtaagaccctcctctcccttcaaggaagatgattcctaggcacgtttgttatttctatcaaaacagctgaggtttttttttttcattcatattgttaaaataccaattgtggagcgaaaaatgcttcacctgggactgtcccctgacaggcggtgcgacgaggtcaggcccgcgcccgccaagccctagggccgctgccgccgacggccatggaggacgagcagcccgacagcctggagggctgggcgccgctccgggagggcctcttcgccgatccccagaggcaccggttgcgcttcctggtggcttggaacggcgcggagggcaagtttgctgtgacttgtcacgaccgcaccgcgcagcagccgcagcggcgcgagggggcccggctggggctggagcacaagcccgaggccgccgtgtccccgcccagctgggccggccggctctcggccgcggggttccgcggcgcgcgccggcagccagcggcgctgtggccgcctctggaacactgcttcccacggctgccgccggagctggacgtgggcggcggcggggcctgaggtctggggctcgggcggtgggcgctgctctggccggcgcgcgtgggccccggcgaggcggcgctgcaggagctttgcgggcagctggagcgctacctgggcgcggcggcccacggctgtggcggcgccaccgtgcgcgacgctctcttcgcggctaagggccgcgcggccgactgcgagagcccgcgcgagtttcgggagcgggccctgcgcgcctgatgggtcgaggcggacgcgcggctgcgtcaggtaagcgaggccgggccgccggcgtttgaccgcgct

SEQ ID NO: 13462 - DNA, 2300 bp, Homo sapien
tgaacaggcagtatatgcacattttttaaaataaaagattgagttaaattttgtaaaatgtaggccgggcgtggtggctcacgcctgtaatcccagcactttgggaggcagagacgagcagatcacgaggtcaggagatcgagaccatcctggctaacactgtgaaaccccgtctctactaaaaatacaaaaaattagccgggcgtggtggcgggcacctgtagtcccagctacttgggaggctgaaacaggagaatggcatgaacccaggaggcagagcttgcagtgagctgagattgcgccactgcactccagcctgggcaacagagcgagactccgtctcaaaaaaaaaaaaaaaaagaaatgttaagtaagaatctcatttgagctacatgtgtgaaaatatgtcttttacattattatataacacagattttggatatgacgagtgctgaactgaggcttttcacttgatatgcattacaaattagaatttttcactcacaaaacatgcttatgacaattttatatgtgaatagaattgtaaaaattgccttaagagttattgaataaaatgtttaaagtaccccataggatgaggaaaaaatggaagagttaatttaacaaggatacaaagcgtaaaagatagagaagaataagagttcaaataaaatcgaatgaaaagacaccatcttgtgtaactctgtagttaattgtgcatgtgtgctatttttcatgacttggagcacgttatttttggccaagagcttccattctatctatggatatgccaaaattttcctattttagatcttctagtctccaactctcaagataaaaaacaaaaatcattaaaacctctgactgatattgaatgcctgcataaaaatctcctcccatcaccttgcaacagatgacttgctcatacacctttttgactaccactccccatcaagggttctctccttcgagacggcagtaattctctatgtatttcatgttatgtgcaaactttactttcaaagagttgttacctatattaatgtatttacatcattcacttaatatattttctctatcagtaaaattggtttagatatattggattaggatagaacacgtcacaatttttctcacctttatgattttttttttttagttggaccctttttcagttggtgacagtgtcagaaatgaattaaagttgttaagaataggtaagggtaaagagaagggtgtccttatgtatcaactttgcttatttagttttttcaagttcagtaagaccctcctctcccttcaaggaagatgattcctaggcacgtttgttatttctatcaaaacagctgaggtttttttttttcattcatattgttaaaataccaattgtggagcgaaaaatgcttcacctgggactgtcccctgacaggcggtgcgacgaggtcaggcccgcgcccgccaagccctagggccgctgccgccgacggccatggaggacgagcagcccgacagcctggagggctgggcgccgctccgggagggcctcttcgccgatccccagaggcaccggttgcgcttcctggtggcttggaacggcgcggagggcaagtttgctgtgacttgtcacgaccgcaccgcgcagcagccgcagcggcgcgagggggcccggctggggctggagcacaagcccgaggccgccgtgtccccgcccagctgggccggccggctctcggccgcggggttccgcggcgcgcgccggcagccagcggcgctgtggccgcctctggaacactgcttcccacggctgccgccggagctggacgtgggcggcggcggggcctgaggtctggggctcgggcggtgggcgctgctctggccggcgcgcgtgggccccggcgaggcggcgctgcaggagctttgcgggcagctggagcgctacctgggcgcggcggcccacggctgtggcggcgccaccgtgcgcgacgctctcttcgcggctaagggccgcgcggccgactgcgagagcccgcgcgagtttcgggagcgggccctgcgcgcctgatgggtcgaggcggacgcgcggctgcgtcaggtaagcgaggccgggccgccggcgtttgaccgcgcttgggtggcctgggaccctgtgggaggcttccccggcgccgagagccctggctgacggctgatggggaggagccggcgggcggagaaggccacgggctccccagtaccctcacctgcgcgggatcgctgcgggaaaccagggggagcttcggcagggcctgcagagaggacaa

SEQ ID NO: 13463 - DNA, 2300 bp, Homo sapien
ccatatgagcctgtctgtctagctagtcatagaaacaatatggaagcaagtgtgccaaaatataagaagcagttgcctcaactaggtgagatcatgacttattattgtccttttaaaaattgaatacctaaaattgtatattaatgaccatgtattatttttataataataaaaagttaataaaacaaaatttcttttaaaaaagatgttctgcaggtagtatggaggcaataaaaaaagaattagctcatgatcaatgtttccctttttaatgaggtgtaattatattttatttttataatccaacaggaatgcaaaaagaaatggaacaggatgtgaagagacttggccaggctgcctgggccacagcaattcccaggttggaaaaacttaagctaatgctagctcaagagactctgcaactcatgagagcgaaagaattgtatttaaattgcaaaagagctgaaattcagggaaaggtaagacaaagataaacgtaactttgttttaaaaatacacttttatttattttttatttttatttttttttttgagacggagtctcgctcttttgcctaggccggactgcagtggcacgatctcggctcacagcaagctccgcctcccgggttcatgccattctcctgcctcagcctcctgagtagctggggctacaggcgcccgccaccgcgcccagctaattttttgtatttttagtagagacggggtttcaccgtgttagccaggatggtctcgatctcctgacctcgtgatccgcccaccttggcctccgaaagtgctgggattacaggtgtgagccaccgtgccccgccccacttttattttttaaaaattttgtataaataaaggatacaagtgcagttttgttccatggatatattgtgtagtggtgaagtttgggcttttagcgtaatcatcacctacataatgtaattgtacccattaaatatttctcatcccccctcccaccctcttactcttctgagtctccagtgtctgttattccacactgtctgtgtatacactacttagctcccacttataagtgagaccatgtggtaaagcacacttgtatttttagatagcacttttctttccaggcattgttaaagagctgcttttcttcacttattccaacaccatctcctatggaaggttagacataaagttttcctttggttaagatgtttcaaaataccacactgtaggattcactttatagtaacaccaagcccagtattgaagtgggtactgtacttgaaaatcaatccagcaatgttttcagtacagctctaaaataatcaaagagatacttccctgaaggatcttagacacttaagttttttcctataatcttatgactttaaagcagaaaacactgtaaacacctgtcttagttggctaaggctgctataacaatattaaatatcacagattgggtggcttcaacaacggacatgtatttctcacagttctggaggctgggaagtccaagatcaaggtgcctgcagattcactgtctggtgcggatcctcttcctgtctagtagacagctgccttcttaactgagtgctcatatagcctttcttctgtgtgtatgtttggagagaaagaaagtgatccctgtctttctcttctaataagggcactaatcccatgatgggggtgctatccttttgacataatctgaacctaattacttccaaaggacccacctccaaataacatcacattgggagttacagtgtcaacatatgaattttggggggacaccgatatgcaatacataataatacctcattgccatttatgtttctcaaaacctaaatgtttttctctgtttcaaggatgggataaagtattagcatcactagatgaaatgaaaaagtgtttctttcctatttgctcttttatatttagtacggaacaaggaatagaaaatagctagaatgcttctaaagtttgtttttaatatactatttgttttaacttatttttcttttttctatgaaaataagatggaagatcttccagaacaagaaaaaaatataaatgttgtagatgaattagaaatacaattttatgaaattcagttagaactatatgaagttaaatttgagatattaaaaaacaaagaaatactgcttactacacagttggactctcttgaaagacttataaaaggtaaagtttttatttaagtatatagattacaatgtttataaatttaaggaaatacagaccatattatcaattactttttgtaaactgtaacatct

SEQ ID NO: 13464 - DNA, 2300 bp, Homo sapien
accattaagtgtaatttagtggtagttttgtttgttttttttttgtttgttttgtagatgccctctatcaggataagttcccttttctcattttgctgagagtttttataaagaatagctattgaattttgtcaaatgcttttgctgcatctgctgaaatgacacgtttattcttcatctacctaataatgttgcaatttatatctgttgagctttgaatgttgaaccagccttgcattcatggtataaatcacttgtttgtaaagtattgtttttaaatattgctagatttgatatcttagtattgtatttttatatttgtcttcatgtgtttttgttttctcataagtgtctgtacccccctttttttttctttaaagagaaataatgagagagattgtctctcttgaagttctcagtgcctgtgcattgctgccactacacagctagtatcatgacagcagcttcagaaccagagctggcttccaggcaaggctgggtggggaagaaagagaaaaacaaaagaattatttctctatgccgagaccagctcggtcagggagaccctaacctagcggtgctagaggaattaaagacatagacacagaaatatagaggtgtgaagtgggaaatcaggggtctcacagccttcagagctcagccacaaacagagatttacccacgtatttattaacagcaagccagtcattagcattgtttctatagatattaaattaactaaaagtatcccttatgggaaacgaagggatgggccgaattaaaggaataggttgggctagttaactgcagcaggagcatgtccttaaggcacagatcactcatgctattgtttgtggtttaagaatgcctttaagcggttttccaccccgggcaggccaggtgttctttgccctcattccagtaaacccacaaccttccagtatgggtgttagggccattatgaacatgttacagtgctgcagagattttatttatggccagtttatggccagattttggggggcctgctcccaacactctacatatgctccatcttgcagaggcttcattcttggttctctagctaaaaacagtagaaattttgcacacctgggttagaaaaaaaaaaaatagccattaaacccacccctgttacaggtcactattggtattttgattttgccttcaatccatctgttattgtttacttttaagagtccttgatagttgctttttatgtccagagttttaatttcagtcagaaagagaaataggccttggtgagcatgctttgtcttggctggtgccagaagtcagtactcaaatatttttaaaataatttttagttgaataacaagttagacctgtgtttagctttctcattgttttcctaaaaatagaagaaaaggttttaaatactttaaccacgaaataatttaaagcaggtttaaaataaactccttcattttgcctgttctattactctgttctcacactgctaataaagacatacccaagactggtaatttataaagtaaagaggtttaattgactcacagttccacatggctggggaggcctcccaatcatggcagaaggtgaatgaggagcaaagtcacatcttacatggtggcaggcaagagagagagcatgtgtgcaggggaattcccctttataaaaccatccaatctcatgagacttatgcagtctcatgggagcagcatgagaaagactcacctccgtgattcagttacctcccactgtgtccctgccacaacatgtgggaattgtgggaactaaaaatcaagatgagatttgggtaggaacacagtcaaaccatatctcctatatacattcacactagcattttagttttagaactagttctatgttactatctgaattaatttttccacaattttgtaaggaaaaataatgcgttctttgaatttcatgtgtaaatgatatttttagttttgtgtcattttgtcaaataaattctgaaaatctttgtattgacagtgtgttatctctgcataaccatatatgtataagagtgctcaataaaaagaataaagaggaaacagcactggatctatacctatacaaaacaagctaccagcagagcccactgggagtggtcatgatataatcaggaatgttatattcacacgttgtagatctgcatatgagaggagggtttgcagatagcagattctagaaaagttgtctaatcagacagtaaatgaaggtgttgaagcactgaacaaaaataagctgctttaattactcataagagg

SEQ ID NO: 13465 - DNA, 2300 bp, Homo sapien
ttgagacggagtctcgctctgtcacccaggctggagtgcagtggcgtgatctcggctcattgcaacctctgcctcttgggttcaagagattctcctgtctcagcctgcgagtagctgggactacaggcccatgccaccacgcctggctaatttttgtatttttagtaaagacagcgtttcaccatactggtcaggctggtcttgaactcctgacctcaggtgatgcacccacctcggcatccgaaagtgctgggattacaggtgtgagccaccatgcccgggccaacccatagccttttggtcttctctcagccaaggcatccagtgaaaatgcaatttatttttcagattcctctggagaattaaaaagtctcttttgcggctggacacagcaactcacacctgtaatcccagcactttgggaggctgaggcaggcagatcacaaggtcaagagatcgagaccatcctggccatggccaacatggtgaaaccctgtctctactaaaaatacaaaaattagctgggtgtggtggcacaggcctattgtcccagctacatgggaggctgaggcaggagaattgcttgaacccaggaggcggaggttgcagtgggccaagattgagccactgcacttgctctggtgaaagagcaagactccgtctcaaaaaaaaaaaaaaaaaaaaaaaaaaagtctcttttgcatcaaattgccatactctctgctcttggtcctcttttccatgtactcattcttcaagcatttattttctcattgcctgatccagatcattgcaatgaccaaaaaattttcgaatgctatgatttttgtgatattcttttagcaagttaatcacgatgttgcattcttgagtgtgcaagtgtggaggtaagtcaggatgcatctttaagacaaaaagatgggtcacggcagtgccacaccactcacggccacaccaggagagctgaaggggcagtcaccaacgaagatgcctgacccagaagctggctgccagggagccaagagccaggtcactccacaggtggccaatgcccgggggtggccctccaccgccgaagctgctgctgctgctgctgctgctgcttattattattttgagacggagtctggctctgcctcccaggctggagtgcggtagcacgatctcggctcactgcaacctccgcctctggggttcaagcgattctcctgcctcagcctcccgagtagctgggaccacaggcacgtgccacctcacctggctaattttattttttgaatagacagggtcttgttatgttgcccaggctggtcttgaactcccgggctcaagcgatcctcccacttcagcctcccaaagtgccaagactacaggtgtgagccaccacacctggccaagttctacttttctaatatttaaaatatgaaataggccgggcacggtggctcacacctgtaatcccagaactttgggaggctgaggcgggcagatcaccagaggtcaggagttcgtgaccagcctggccaacatgatgaaaccccgtcactactgaaagtacaaaaattagccgggtgtggtgacagatgcctgtaatcccagctactcggaaggctgaggcacctaaacccgggaggtggaggttgtagtgagccgataccatgccactgcactccagtctcggcgacgcaatgagactctgtctcaaaaaaaaaaatagatgatgtcagtgatttctattacatgagatctggaagcactctgtacctgattgctccacgtttagtggtgctaagttcaaataattcaggtggtgagaaactgacttccgtaggagtgcgggtgtgcgtgcgtgccgcggaaatcccgccttctggcgcctgcggttgccccctggcctcagccggtaggctcccaagtaggaagataaaccgcattgcacgaagcgggagagtccagaggagcggcgaagcgctcctcttccccattggctgcgcccacggagccgccttgcgattggccctaagcgcgggtggctggggttgcgagaggcatcaggatccctggcggcgcctgagccagcggctgctaggaggctgtgtccgcaagccagcggggcgaggcgcctgggccctgcgcgtcaggtcccggcctggggcaccggggctgccagcgtcggaggaggtgcgggcgcggggttggcgggcggccgaacgggggcctgcgcggaccgcccgcggctcagcctccggtctctctccgtctctaagtggtggtggctgtgggtttttctgcaggtgatc

SEQ ID NO: 13466 - DNA, 2300 bp, Homo sapien
gagcacttgggaggcataggctcggcgggaagggaaggcctgcaggctgaggtggtctgctttgagttttgcagcgttgcctgcggtctccgtgggtgagggaaaaggcacagggaggtgcagaagcgttcctggcgccacggagccggtcagtgacagagccgggtctcaacccaggccactgccctcggcagccaagccccttctttattttggaatggccacctggccaactggcacacagggagaactcatgaaaggaggcgtggctcactcctgaagggagagggacacaggagcagccttgatgcgcaacgccccctccaggccccgagtccctgtccttggaggaagcaggactcccaggtgggagaggtgaagcagatggcttcccccactgcaaggaggaatcccggtgctcttctccaccagccttccctttggtcgccccctggcgtccgcgtcattgtgggaacactcgggcgggatgtattttaaaggagtgcctgatgcgtgtgggtgtggtggggttgggggtgggggtggggctgggggtggttgcagcggggcctatgcaggatcccggttggagggggctgcagaggctactgctgggcctggtgtcgccatggcagctggagagcgggcgaccggtcgcttggcgtcctgcttggggttgttgcccacatcaccgagcgaacgttcctgtcccgcccactcactgcgaggctgggcagggccgcttgccagttaattgtggggattattatttttttttttttgtagacggagtcgcgctctgtctcccaggctggagtgcagtggcgctatcttggctcactgcaagctccgcctccagggttcacgccattctcctgcctcagcctccggagtagctgggactacaggcgcccgccaccacgcccggctaattttttgcgttttttagtagaaacgaggtttcaccatgttagcaaagatggtctcaatctcctgacctcgtgatccgcccacctaggcctcccaaaatgttgggattacaggcgtgagccactgcgcccggccggttgtggggattatctgagagttgctggagtgttctgcacttccttgcgaaccttttacctgggtgggcagggggagaggccgagtcaagggaaggaggcaggatgccacacacgccctgcagggagagtcatctgctgggcactgcgacacacagaaagccaggagcctgagccccgcccgcggttgttgaacggagggagaatgaacaaccgctgacttcctggttcctgggtgccgcatcactgcccctctgctccgggtcaaaccggctgtatgcttagcttcaggaacatgtggcaggtggcagcccccggccccgtggcaggtaacggtggttttgcagtgtggcgtgctgtgggggccggcaggggcacagctgggcaggccaggctttctctggctcagtatgcagggctggttcttcccagaggaggcagaggtcagggaggagctctttccctgtgtctcctgaacagcttcatcagcacaccctgcagcggggactcagtgagcatcctgcagctgtcttgtcccagaagggctgtgtacttttggccctgagggcaacctctgcatttcctttctgggggctcccagatgagccccgctcccccaggtcatcctgatccatattgatgtgataaccccctcctcagtccgaaacatctggaggccccgtttgtccgtgggataagaatgggcttgagcatggctgtgggtgctccgtgtggcgacagtggcatgttctgtggcagcttgcttcctctgtagcccgatgtctttgactcccagcccgatgctccctcctcacccagcagaggcccctcctcggcctttgcatttgctttcatttatcttccttctttaaggctgcttttgagggtttactggccagcagcatcatgtgcagtctataaactgtgtgccctctcggggccaggtaggagcctgagagggaatgggagaagtggtcacgaatgattgtgaggactgcagaaagaagacagggctgagaagagtgtgatttcccctagaattcagagatgcctgcaccagctgggttttgaagaatgaataggagtttgccaggaagattctagaggaacaacagcaacaaaaagatttaaacatgggcacagaagaggtgaggcacagatggcacagggatttggggtgtgatggggcaaggaagccatgggcagggtctaggcccaggacctcaggtgctttgc

SEQ ID NO: 13467 - DNA, 2300 bp, Homo sapien
aggctttctctggctcagtatgcagggctggttcttcccagaggaggcagaggtcagggaggagctctttccctgtgtctcctgaacagcttcatcagcacaccctgcagcggggactcagtgagcatcctgcagctgtcttgtcccagaagggctgtgtacttttggccctgagggcaacctctgcatttcctttctgggggctcccagatgagccccgctcccccaggtcatcctgatccatattgatgtgataaccccctcctcagtccgaaacatctggaggccccgtttgtccgtgggataagaatgggcttgagcatggctgtgggtgctccgtgtggcgacagtggcatgttctgtggcagcttgcttcctctgtagcccgatgtctttgactcccagcccgatgctccctcctcacccagcagaggcccctcctcggcctttgcatttgctttcatttatcttccttctttaaggctgcttttgagggtttactggccagcagcatcatgtgcagtctataaactgtgtgccctctcggggccaggtaggagcctgagagggaatgggagaagtggtcacgaatgattgtgaggactgcagaaagaagacagggctgagaagagtgtgatttcccctagaattcagagatgcctgcaccagctgggttttgaagaatgaataggagtttgccaggaagattctagaggaacaacagcaacaaaaagatttaaacatgggcacagaagaggtgaggcacagatggcacagggatttggggtgtgatggggcaaggaagccatgggcagggtctaggcccaggacctcaggtgctttgcatgccatgacttggaggcaatggccttgtcatgcagaactgtgcctccctgggccccattagagtccctggctcttggtgtgcctttcatgcccacaccacggtaggagcaggcaggtggggtttggcctgggtttccccaaaatggacactactccttcttgtgcttcagtatcagagtgggcccgtggagtgggaataaatgtttgggtttaggaggcctccagctgggtggcctgctcccaggcaggaaacacagattagaggaagtatcaagttggaaggcagcagccgtggatgttaaagctggaggaacctcttaaggaatggctgtcagctccctcgtttggtgtggtaggaagatgagggtgagaggggttgggagcaggtgctggagctggagcctgaacccccatatctcagtgctgccatcatccttcataataaggaaactgaggcacaggcaggttacatagtcttctcaggatgtcagtggcagagctaggacgtctatctctgcagctcagttctgtgcgaagtccaggcagatggtgctgatcagtaaggggtgctggctgagcgctgatggccacctgcatctcaaggagaaacagtgtcactggctaatctgatggcttctctgggcaccagcacgtgggcaccatcaccctttctctgcagggggtttgtttagtgtatttggtagaacatcccccagcctactaggtgtggcatgctctatgccacaagctctgtatctcaggcagcattttgtactttgaaaaaacaagttgggaacagaaccctgatgaatgtgtttcatttcctgtcagagcaaatgaaacctgaaatattaatggcacgagatttcccttatcttcctacaaaatcttcctacattgaaaaatgtactccccacaagcttagcatgcagctctgctacctgtggcccgaaatcattagttgtccatactcactgacctttggaaataaacacgaaggttcacttgaagacttgggggagaatcacggtcaacttgtgacgcttggtttttcagatattcagctgctctggagagccttggagttccagctgctctagaggttctggggagggagctgttagcctcccatatgagcgtgtggcccatcgttgccatccacacctgcccctctgtgggtgaataagtggtttcctttctcagctggttgacgcttcatttgtttgtgttctttttctttacagtctcctgaatatttacgcgttgctgaatctcctgtggacaaaccaccaataggccaggactgtcctgtggacagacggggtgagcctcttcttgtgtctggagattctgagtgagtagaacccgttatgatccccactgcacttaatgtggcattcatgaatgagtctgggctgatgtgctaattgggggccgtaagaagagttatagcc

SEQ ID NO: 13468 - DNA, 2300 bp, Homo sapien
gcggagctcccaccttccccacaaatggacacagaatggcacctggtatgtgaggcaggtgcaggtgaccaggagaaggggctgtcagtggttgatggacagctgcctctgctgcctggatgacccaccccctcccctggaccatctcccactttgcctgggtgtcagtcactggagggttagctcagtacaagctggcggatgacctccgtagagcttaggtgaaggggctctcacagggcagtatgtttgagacccttagagggctctctttactcttgcttctcctattatttttaaactgtagtaatacacacgtaacataaagtttaccattttaaagtgtacaattcagtggcatttatcacaatgttgtgcaaccacctctgctctttagttccagaacattttcgctgcccccagaggagaccctgtatttattaagcagtcactccccattcttccctccgcccccagcccccacagtgaaaaatctgttttctctcactttggatttgtctattccggatattccataaagataggatcagacaatatgtgccctttagtgtctggcttatttcatcatcatgttttcagggttcatccctgttgtagtgtgtgtcagtactttgttcatttttgtggctgaatgatattccactgaatggctattttacattttattaatccactcatccactgatggacatttgagttgtttctaccgcatgattaatgtgaatagtgccactgtgaccatatgtgtacaagcttttgtgtagacacttgctttcagctcttttgggtgtatcactaggagtggaattcctgggtcatgtggttattcagtgtttaccgtttttaggaaccacagatgttttccacagtgacagaacattttacattttcaccagcaatgcatgagggttctgattactttcaaaggaaaaaaattaagcagccctgtcaccttgatggtttggtctctggcctcaccgcttcagctcctctggcctgatctcccagggcctgcttttgttcatgtgtgtgtctgtttataccctggctcatcctgtggagggtctgaggctggcaggatcactgggttctgtctccacattggaaggtgagctgtcctaggtcagggtctttgttgcatgcatcgtcctgtccttagcaagagctaccctgtgccatatgggacatacaacaggcacctgttcaggcctggccatgtgggcccacctttggatggtacttgacaaagcctcaaaatgcagtgacaagtttagataaatatgattctgttctgaaatgctgcactggacacagccatccactgcctgccctttacagggctctgtgaagagacagtgaacaatgaagtggaggacgtgtgcaggtggccccagtggtcggtgatggaggagagatttcagcagaccaagcacggagaataaagccaggccagagtgtgctatcagcctgtctgccccctagagctgatggactcagcaaataacagtatagggtacccagttacattcgaatttagacgggtataggattttggtttttcaagatgaaaaaacttatagtggtgagggttgtacaacattatgaatttaataacactgaactgtacactcaaaaatggttaagatagtatattttattgtatgtgtattttaccataataagcaattgaaaaaataagttgtatttcaggtagatagcgaataattttttagtataaatatgttccatgagatgtctggataccgggatgcaggagggactccccttcctcctcccattcacaggcctgcctagagatttgtaagtacagactgactggctgtttttcccagtgtgtcttgtcgtgatacttttaagccacagatccgctttgaaaagatatgatctcccccaggggagtaactattataagaacaaatactctatccaagcttccattctcctcaagataaacatcacaggagtgacctgaattgtaaagaggagtggaaggaaaagaacaataccgtaatgttttctgagccacgcagatgtcaggggacggatccaagggcgtctgaaagaagacgtccacgctgctgagtgagaccttcctctgtgctgctgagtgagaccttccatctgaccagggggtcatgctctcactgctcctgcttggagttctggtgctgtagcgggtctcggccgccccttctgagctgggtggaggaagaagtccctgttgaaatatcagatgagtagggatgatcgcctctttt

SEQ ID NO: 13469 - DNA, 2300 bp, Homo sapien
taaatcattgaactgaatatgtttgctttgtgcactttttgtgtatgtgtgttaggtttcacaatatgaacggttaagaaaatgaggaaagatgaaaacaaacccacccacccccaaattagatactattatattagttactgcatggacaaaaatgtctaagtccaacattagcaagcattggtgaggatgtggattagcctgaattcacaccctattggtgggagtataatttgtttgaattatttgaaaaatggtttgatcttacctagtaatgttgtgtgtgcatgtaccatagggcagaacagttctgcaggggtgctccacgggtttcctgctgggactggagagctggcagctccctggaatctgttcttttcctgctgtatattggaagttccagggagagggtgcagaaacatgaagcctgtggaggtcttaagttcagaagctgcaagctgacacctctacccatattctcctgctgaaagccactcgcaaagcccacctgacatggagcagggggtggcaggggctaagtcttaagctaagctgagttcctctggtgaatatcagcacatttcttggctctgaggatgctccattacccctcccccagtatttaggagaggcggacatgttgatacctggaggttttataagtatggcctcagtctcagcaatattcatgcaatgaaaaattatttgttatggttataaatggccaatatttgtctgaaaagtatttgtacttcgagttggctgctgtaaacatattatctattggaaagcagggcacttcttagtctaaggaaaataacttgtttcatgttcagtgttattttgaataaaattgcatagattttactgatttttttttttttttgagatggagtcttgctctgtcatccaggctggagtgcaatggcatgatctcagctcactgcaacctccgcatcctgggttcaagcgattctcctgcctcagcctcttgagtagctgggattacaggtgcatagcaccacgccgagctaatttttgtatttttagtagagacggggtttcactgtgttggtcagactggtcttgaactcctaaccttgtgatctgcccgcctcagcctcccaaagtgctgggattacaggtgtgagccaccgcgcctggcctgattttcttttttagtagttttacatctaggactttattattttttatttacgtatttttgagacagagtctcagtatgttacccagccaggctggtctcaaactcctaggctcaagcaatcctcctgccctggcctgccgagtagctgcaaatgcaggtggtgtaccaccacacctggctaggactttacttttttaaagctgcttttctcctaggcactggtaactctgttctcttccctctcactgagactctcatactctctcttcgtctaacactgctttttaaaatacttgaaatgcatttttttcttccatggttttccattttccaagccgtttttattcattcagcatttattgaacacctacaacttgttgccattgtcaatactgtggtgataagatgcacctgtagctggataaagtcagtcttcagtagcagtgaggcaggaaaaccagacaaggcctcgagggtggcgctggagttgggtcttgatggatgagcaggagtttgataggccatgaagtgaggcaggaaatttctgactgtggaaggagaatgagccaaggcacagagctaggatagcacatctccgtgcatacatcagcatgagtgactttcaatctatttacctttatctcattttgtaatccacctgccattttctctaatgtatagcttaagtttcttcaaatgtacttttgctttttctatacattgctgttaagataggaatttgaagtcctcctgatggcctgggtcaatagaaattgtttttgctgtactacttaaacacactgaaacaggctcctttgaactgagccattttcctgtgttctgaactgtgtcactcacgcgtaccctcgggggtcgaatgcctgttaacggtgaggtctgtctgtgttcctctgtctagattaagtttgacagtgtggaggtgtgtgtctgctgtgagctgcagcaccagtcgtccggctgcagcaacctcggggagacgctgaagctgaacccgctgcaggagaactgcaacgctgtgaggctgaccttgaaggtgaccccgctgggcgctgcttgtgcatgcatttcattccatgccttacagacagtttaggaagccttattaacatat

SEQ ID NO: 13470 - DNA, 2300 bp, Homo sapien
gcttttatctaattttccactttccccttatatctcggtcactgaacttttttgactcaaggcactgtagcaggacgagccgcagacaaaatctctcagacaccgagttgcacaaggaagggctttattcagctgggagcatcggcaagctactgccttaaaatccgagctccccaaatgcacaatttctgtccctttaaagagctcacaacactaaagattttacatgaaagggtcgtgattgatcagagcaagcaggcggtatgtgacaggggctacatgcaccggtggtcagagagaaacagaacagggcagttctgttctttatacaatgttcttctatacaatgtctggaatctatgaataacatcggtttctaagttatgagttgatttttaactactgggtttaggccaggcaggcccaggcctggttttgggcctggcgctgggctgcctgtatttggttttacttccttgttgttttttcttaaaacaggtactgagtataaaacaatataaaacaatatgagacggtctctctattccctcaatacaacatccacatcctgcagtagggaccttttgcagaattctagatggcaggaagcttctatgaacctaagtccagattttaatttgcaaggaaactgaagcagatgaattttctcattgtaaaaaaatgaatgccttgataatatatttgtttttcatagtaggcctttgtcattaaaattgatgcctgaggatatagttgcatcttgtgtggaacagtaagttattactcattgcataccagattttagcatacttgcattagttcatggaatatgattttacatttactattgcagttccagtgccattatcagattgcattttcctactgaattacaaacaaaagtgttatgctactaacaattaacaaaattttaataaggttgtgtttgatgctattactcagataatgtgttctaaattgctttcctttgaatatatttgcattaaagaggaactcaatttggttctttgaagagtttatccactttctgggtagctttaaaaagacacagggaaattcagtttcttctttgcaagtaaatagagaagaaacaaatttgctaagatctgtagaagtcatggcagcagactgctgatggtttgagttaatgaaatgactcattttggctacttgagttgcacaattaaaatatacagtagagactgtatatcacatcatagatgagagataaatcccccagtgttctcttttttttcctcaaagctaatatattatgaattaagaaatttaagagctccacattattgcaattcttgatcagtgatgccccaaattaagtagtaatctcttgagagtgcacgtttgtttgcagcattcctcttacccatttctgctaaaattgtggttgtgacgaaagcagttgttttccaaaagataaacccatgtgaccaagctaaaacatttacctaatactgacacgttttttgtggtcttctcatagttgtctagctaaaggagtttaatgcagagaatataaatacggaaatagtgaaactgaagtcctgcttgcgcagaaagcctgcagccgactttggtttttaacagactccacggggcattagagaaagtaactgggggcagtgggatggagggtatgaaattgggtggagggacgaaaactaagagccctctgggtcttttatgtccttctacattttgtgtagaaataaatgtttttactttacttccacggtcggcccttcctcttcaccttttttttttctcacacgttcatcctctgaattctttccgtttacaaatgctcccgatttagaaactcataatactgtctgtaaaacttgcctgagcctgtgtggtctgaatttagcgacacacttgtttaggagtttcggttctcgctctctgtttgcatggtttggtaacaacacttcactatactaaaaatcatcgcccggacctgcagggctgcacggaaaacgctgttccttttggtacccgccgcagccgcgcaggcgcaccgcccagccgccctgacgcaaggcgcaggcttcatgacgcagcacgcagtctcagccgacactgcgcgcgcctccaggcaccggcgttagcgggtcgccgacccgcaatccccgccgcggctgcttgcctaccggagtgtgcgccggcacctgccgccggagacatgttgcaaaaaccgaggaaccggggccgctctggcggccaggccgagagggacagagactggagccatagcggaa

SEQ ID NO: 13471 - DNA, 2300 bp, Homo sapien
gcaagtccatcaagttggtgactccataggcagggcagtggcatgagctgctcgagggagtatacttagttacttcttgattatatgctaaacaagcggtggattatacacgagttttccaggaaaggggaaggcaattccaggaactgaaggttactccctcttttagaccatagggggtaacttctggacgttgccatggcatttgtgaaccgtaatggtgctggtaggagtgtcttttagcatgctaaacattataattagagtataataagcagtgaggatgaccacagctcattatactctaattattaaaagacgtcgccatcttggttttggtgggttttggccagcttctttaccacatcctgttttatcagcaaggtctttatgacctgtatcttgtactgacctcttacctcatcctgtgactaagaatgcctaacctcctggggatgcagcccagcaggtctcagccttatttcacccagcccctactcaagatggagtcgctgtggttcaaacacctctgacaaaatcacggaaagtcgaagctgtcctcttttgctgaatcagttcctgggtagaggccacaggatcccatgtggtgccagctgatcatcgatcatcatgtgcagggtctacaaatcatctcaagcactgatcttaggccttaccatagtgagtttattctcaggagcaatttgggatggctcagaatcttggagtctccagatgcatgactcctaaaccctaatttctaaccttacagctaatttgttagtcctgcaaaggcagtgtagtccccaggcaagaagggagtttgttttgggaaagggctgttattgtttttgtttcaaagcaaaacaataaaccaagttcctcccaaagttagttcatgcccaggaatgacaaggacagcttgggggttggaagcaagatggagtcagttaggtgagatctctttcactgtcatagttgtctgttataattttgcaaaggcagatctaccatttctctgaaggttgagtttgggatgtggtagcctttgagtacccgtcctgttgctgtgtgtgtgttcagggcaatccaggaaatctggagaaaccagagtgtgtggtcccccttccccatttctctagtggatcaggtaggagggtgactgaggaaatgtgtcctgggatacttcctgcctcccagggtgtgtgggactcagcccttccccagcctgcagaggatgggggggggggggggctttgccagcagtcaagtcctgtgccccaggggaccaggaagcctgtatcaactcctcgctaccccagccagaagcagcaaacgctccaccctgtcctgctgcctgatgggcagagttgttttttttgtttttgtttttgttttcagacacagtctcattctgtcgcccaggctggagtgcagtggcgcaatctcagctcactgcaacatctgccttccaggctcaagcgattctcctgcctcagcctcccgagtagctgggactacaggtgcccgccaccatgcccagctaatttttgtatttttagttgagacggggtttcaccatgttggccaggatgttctcgaacccctgacctcgtgatccgcccgcctcggcctcccaaagtgccgggattacaggcgtgagccaccgcgcccggcttgagcacagacttttaatcagattttttctttctttaaattcctgtgagaccagccgcctgagggattaagaatatcgagggatggaagggagagtaaaagaacgggcacttttccctagggaaaaggaggcatgccgggggggcggagggaaggagggggtgtggaggagggaaggagggaaaagggggagggaggagagggaggagggggcgcggaggaaggggcgggcttccccctgccggcctcccttccttccccgctgcctccgcctctcgcactagcgccccgcacctgtggcgcccctgctccgcccagtcccgcggcctcctcgcccctagtccccggcgctccccgccccttcccgtgggatccgcccctccgccagccccgctggcttcccctctccgccaccccggactcagaacctcccctcccccgccggggcctgggcgcgcctgcccttcgctccccgacctcctgctgcagctctgggcccctcggccgctccctcccctcctcccttgctcaccccacggttggccgcggatctccagcacgccgccccagtcctcggcgtcccgcagcgcctgccagggtcgccgagcctcccctgcctcctg

SEQ ID NO: 13472 - DNA, 2300 bp, Homo sapien
tgatgctctgaacagggaaagttgagagtgagggttgacatttcacatttagcatgttgtttaacaacttttcacaagccaaccctgactttcaggaagtgaaacgaaaatggcagaatttatctgaagatccacaatctagaaatggaaccactgctcttttgacaggtgccatctcagtggcatcactggaaagtccagattgcctgacacactggtaaccaatgactaggggtcaggtctcaacagatgtctgggcttaagggagttaagtctatgctgaaacgtggaaagggagaagaggacataaaaacaaatttgtttttccatagcacaaggcttttgtgccaaggtggccatgtgtgtcaaagtcaaggaatccctcctcctgggagccaagaggaagtctctcaaaactggaagggaaaggtgttttctccacatcaatccagttttggagacattctattagtgacatatgccccttcccccaaaaacaacaatgaagtgttctgtgtgcgaacaacatagcttaaaaaaaaaaaaaaaaaagtaaaacaaaattctgcatttttataaaacttgataaaagtatttcaaactgtacagtcaccagaaatacacagttatcaaaaatgcacacacttcacttggcatctccagcaccttcagctttctgtgcctggtctgttttggcatctccattttctgcagggttattcccctccttgccagcatcagcttttccctttttccctttgggtaccttctctcccttctttgcaggggcctttttaggcttgggctctggctttggaggagcaggtttagcagacaacctcgcggatcttctctgtggttcgtccttcaccttggctttatctcccttagcatccccttcagcctttctcttgggcatggtggcggtggcgacaggacgtaggtgctggacgtgggatgcagcggcacgcgggctttggtcggtccgggggtcgttctcgcctcttcttcacactgctcctcttttttttttttcagagacagagtctcactcttgcccaggcaggagtgcagtggttagatcattgctcactgtagtcccaaactcatgggttcaagcagtccacacacctcggccttccaagcagctaggactacaggcacatgccaacacgcctggctagtttattattattattattattattatttttgtagaaacagggtctcactaggttgtccaggctgaacctgagctcctgggctcaagtgatctctggccttggcctcccaaagtgctgggattacaggtgtgagccactgtacccagttttgttttatttttaaactgtttttgtaattataaaagtgccattctgtgtttggaaaagttggaaagttaatttttacacatatcaccaccctaaattttattccattgtattttcttccactcttttaagcatattttggcaaagttttatttatactgtttagaaaagtttatatccaatttttctttttcataggtaatggcatattttcattttatcctgcaatttttggttcagttaggctttttttatatcgtttgtttcgaatttatattactattacaaaagatacagaaatctgtccatattttgtttgcttgtttatgccctgctttgtttcccaaaggatttaaatccttaagaatatagctgttcccataattatgatgaagtttctgctttccagagagttgtgctggggattttgttcccactggcactatatgaccctcagtaaccttttttttttttttttgaaacagagtctcgctctgtcgcccaggctggagtgcagtggcacgatctcagatccaggctccaagtttcacctcctgggttcatgccattctcctgcctcagcctcccgagtagctgggactacaggcacccgccaccacgcccggctaatttttttgtttttttagtagagacggggtttcaccgtgttagccaggatggtctcgatctcctgacctcgtgatctgcccacctcggcctcccaaagtgctgggattacaggcgtgagccactgcacccagccgaccctcagtaacatctttaaactgcatagtgttaatttaaagaatcagaacatcatcttttttttttaatatattgcttttcatttcattgccaatgaagttgaataaggatatttattttctgaacatcagaagatttgcagacaaatgatttgagtaaaatctgagcaagttagaaaatgtttatttcttagttttttcagaa

SEQ ID NO: 13473 - DNA, 2300 bp, Homo sapien
tgcaagatgtgtggcacttcgaagccttaattgatacttatgtatcacctacacatacttctttgttaaatttgttcttttcatacagttgaattctaaagagaaaaccattgtctaaagcctgatgtttatgatttcttccatttcttctgtgccggttgtggcactataccagatactttaaagatgttatcattgatgttactaaggatttctggcattttttgaagacctttacatttacaagtgtagattagtgagtctaggattggtttcttaccatgttccttggtgtttagcaaagccgtcaacattgtgggaagtttgtgtagtggctgattaaactggaccatggactgcacgtgtttacacccttttctgcccaactttgagttggagggacagcattggaatgcagggcagcttgacccgttcggtcaacaagaatttcagcaatcttgatggccaaaaataaacttttcaagattcctgtctagatgggcgggaaagagactttggatatatcttgaggtctaatgtggggtgtgggccgagatgtcacaggtctctagggtgtttctcaggctgctgcctccgggtgcccatgacctcatcaccagtttcagccttggcagtcggcgccggtgaacgagagcaacgcttctgaccctgccggagctcctcggagatgaaagccatgacgcgccttgcagaaaatgcattccgccttccgtgggaacaacgccgaggcacgcggtgacagccgtgaccatgctgtttgcccagtgaaggaaacaactgtcgggtatcggctctgccggcctttccagccgcactcatgcatggggctcaccccatgatgtgcgtggcttgtcgaggagcaagtggacaagtctcttaaggaaagctttggtgcacaggcgctttctccttgggggcgaattctgccagaccttggataaaaacaaacaggaagactcgcacggcagcggaaactgtcttccaagttacttgggttacccggcttttccttccgcgcttggggtcgggaccccggccgctcgtcccgccccctcccccgccgcggccccgccccctccccgcctcgcctcgcctcgcctcgtccagccccgcccccgccgggccgggcatgctcagtgggccgggccggcaggtttgcgtggccgctgagttgccggcgccggctgagccagcggacgccgcgttccttggcggccgccggttcccgggaagttacgtggcgaagccggcttccgaggagacgccgggaggccacgggtgctgctgacgggcgggcgaccgggcgaggccgacgtggccgggctgcgaaagctgcgggaggccgagtgggtggccgcgctcggagggaggtgccggtcgggcgcgccccgtggagaagacccgggcggggcgggcgcttcccggacttttgtccgagttgaattccctccccctgggccgggcccttccggccgcccccgcccgtgccccgctcgctctcgggagatgtttatttgggctgtggcgtgaggagcgggcgggccagcgccgcggagtttcgggtccgaggagcctcgcgcggcgctggagagagacaagatgtccgccagagctgcggccgccaaggtgagcgcctccgcggccgccagggccagaccgggccgaccgtcgccgcccgcccaccggcatctggcccgcgtcccgccctccctcgctggcggctgtctgggccccggggcggcggggtgggcagggctggcgcggggccgcgggccgcgggccgcgggccgcggggagcccctcgggcgggggcggcgcgggccgcactgggggcggccggggagggggctgcgggcgcccggccgccgtactgggcaggtgcatagctgccggcgcctgtgcctggctgcggctcgctgagggcggggacacgcaacaggtccctcgcggagaaactcggctccagtgagggttcgggggctggaagccggctctcagcgggtcggggcttggggtgccacctcctgctggccgggagctgctgtctttggaggagtggttggtccccggcgaaaccctgtagtttcgatctgatgtcactccctgcggtatgcgcacgccagcgataaggctttgagactgcaaaacactccactcagcctgtgaggcgtagtaggtcgggttttctttcatgctgtattacttatttaaggtaactttgaaaataacctctttaacatttaataatttaacttgaattaaactttcacaagtaatac

SEQ ID NO: 13474 - DNA, 2300 bp, Homo sapien
gtttgcatatgaagaaatttaatcacaattttttttttttaatggggtctcactgtttcccaggctggtctcaaactcctggcctcaaagaatcctctggtcttggcctcccaaagtgctgggatgatgatgatgatgatgatgatgatgatgatgatttgagacggagtttcgctcttgttgcccaggctggagtgcaatggcatgatctcagctcattgcaacctccgcctctcgggttcaagcgattctcctgcctcagcctcctgaatagctggcattactggcgtctgtcaccatgcccggctactttcctatttttagtagagatggggtttcaccatgtcggccaggctggtttcgaactcctgacctcaagtgatctgcctgccttggcctctcaagtgctgggattacaggcttgagccactgcgcacggccccaagtgctgggattataaacgtgagcaactacgcctggccaccattttttttttttttttttttttttttttttttttttgagacagagtcttgctggttgcccaggctggagtacagtggcacgatctggactcactgcaacctccgcctcctgggttcaagtgattcttctgcctcagcctcccgagtagctgggactacaggcacgcgccacaccaggctaatttttgtatttttaataaagacggagtttcaccatattggccaggctggtctcaaactcctgacctcgtgatccgctcgcctcggcctcccaaagtgctgggattacaggcgtgagccaccacgcctggcccacaattcttaaaagaataaataatactttgtccaaaagcaaaacaattacaacatgactttaaaacaaaaatgacttcaaccatttttatgaagaacaaaaaggaataagggtttggtttgcagaaggctcttttctggttcagacagctttgggttgcaagatgtgtggcacttcgaagccttaattgatacttatgtatcacctacacatacttctttgttaaatttgttcttttcatacagttgaattctaaagagaaaaccattgtctaaagcctgatgtttatgatttcttccatttcttctgtgccggttgtggcactataccagatactttaaagatgttatcattgatgttactaaggatttctggcattttttgaagacctttacatttacaagtgtagattagtgagtctaggattggtttcttaccatgttccttggtgtttagcaaagccgtcaacattgtgggaagtttgtgtagtggctgattaaactggaccatggactgcacgtgtttacacccttttctgcccaactttgagttggagggacagcattggaatgcagggcagcttgacccgttcggtcaacaagaatttcagcaatcttgatggccaaaaataaacttttcaagattcctgtctagatgggcgggaaagagactttggatatatcttgaggtctaatgtggggtgtgggccgagatgtcacaggtctctagggtgtttctcaggctgctgcctccgggtgcccatgacctcatcaccagtttcagccttggcagtcggcgccggtgaacgagagcaacgcttctgaccctgccggagctcctcggagatgaaagccatgacgcgccttgcagaaaatgcattccgccttccgtgggaacaacgccgaggcacgcggtgacagccgtgaccatgctgtttgcccagtgaaggaaacaactgtcgggtatcggctctgccggcctttccagccgcactcatgcatggggctcaccccatgatgtgcgtggcttgtcgaggagcaagtggacaagtctcttaaggaaagctttggtgcacaggcgctttctccttgggggcgaattctgccagaccttggataaaaacaaacaggaagactcgcacggcagcggaaactgtcttccaagttacttgggttacccggcttttccttccgcgcttggggtcgggaccccggccgctcgtcccgccccctcccccgccgcggccccgccccctccccgcctcgcctcgcctcgcctcgtccagccccgcccccgccgggccgggcatgctcagtgggccgggccggcaggtttgcgtggccgctgagttgccggcgccggctgagccagcggacgccgcgttccttggcggccgccggttcccgggaagttacgtggcgaagccggcttccgaggagacgccgggaggccacgggtgctgctgacgggcgggcgaccgggcgaggccgacgtggccgggc

SEQ ID NO: 13475 - DNA, 2300 bp, Homo sapien
ggacttggagccctgagtatggcttttcagacgcggcttctacaccgcttagactcaaagatctgcctccccaccgcccttttctcactcagatagggacactgaggtccaaaggaaaagtcacctgtccaaggtcacacatctgggaggggacccaggacctatcatgccaccaggacaccggtctactcagtttcttaaaaatgttttttggagataggatcttgctctgtcgctaggctggaggacagtgggcgagatcaccactcactgtagcctcaacttcttgggctcaaagtgatcctccaatgtcagcctgtcgagtagctaggactataggtacgtgccaccaccaagcccagctatttttaaaattttagtgtagagatcaggtctcactatgttgcccaagctggtctcgaactcctgggctcaagctatcctcttgccttggcctcccaaagtgctgggattacagacatgggccactgtccccagtcccacgttatatttctatgagacagctctggtctggactgtgcctccctccctggaccttggtcccatagggctggtcagcatctcccccaggccaacatggccacctgcatccccagtgctacaggagccccctgcccctatgaggcggtgcatgcacgttgttgatcatgacgtgcatgatggtcttgggcatgacaccaaccatgaggtcccacacggtcttgttgacaatggccatgtaggagtccacaaggttctgggtggtttccatttgccgctccagctatgggtccatggagtgcatgaagctgtcggagccattctcctcagccttgctgtcctgtcatggagaacacagtggcatcagggtggccaggccatgcagccaggctccaggaatccctaggatctcagcacctccaagggtacctggaacattgaggcacagagaaaaacaactggcgtgaacatgcaccgagctccccacacgctctagacggtttcaggtatctgcctctcaggaccccagactcccctgattcagtctcctcttagttctgactctagtgcccagaatctgcctcaagttaccaatccagaaactggaaaaaaacatctccaggtcccctgttggagacctggccagagcttgtgccaggctgcagacgcctggcagggggcaagaaaggggcatactcactttccccttgtcctgggaggcccatgcaccaacactgccaccgccgccgccaccagggaacacggcaaagtagacacacacagagaggaaaacgggaagggttgagtgaacctgggacactgcaccccaactttaatgtgttgtggaattcagttagctaatattttattgaggatttttgcatcaatattcatcagtgatattggcctgtagttttcttttttggtctgtgtgtttgattttgttatcagggtaatgctagccctgtagaatgagtttgcaagtattccctccttctctatttttggaatcgtttgggtaaggttggtattagttcttctttaaatgtttgctagaattcagcagtgaatcatcaggtcccaggcttttctttgctgggagactttttattaccactttgatcccattatttgttattggtttgttcaggttttgggtttcatcatggttcaatcttggtaggttagatgtgtctggaaatttatccatttttggtaggttttcctatttatttgcacacagttgctgaccactagtgatcctttgaggttttttttcttttctttttttatatggagtcttggtctgtcgcccaggctggagtgcagtggcgcgctctcagctcactgcaagctctgcctcccggtttcacgccattctcctccctcagcctcccaagtagctgggactacaggcgtccgccaccacgccctgctaattttttgtattttttccgtagagacggggttttaccgtgttagccaggatagtcttatctcctgacctcctgatccacccgccttagcctcccaaagtggtgggattacaggcgtgagccacgcccccttgggacagggacacacacacacacacatagacacacacacacacacacacacacacacacacacacacacagagttggttgttgtgccgtccagtcgcgagtgtgaggaagggaccagatcggtcgggcagaaaggtgctgggtcaagagaggagggggcagccggtagcgcgggcacgccgggtgcgcgcggggcgcgccgggttgaggggtgaggggtgaggggtaaga

SEQ ID NO: 13476 - DNA, 2300 bp, Homo sapien
tctactcagtttcttaaaaatgttttttggagataggatcttgctctgtcgctaggctggaggacagtgggcgagatcaccactcactgtagcctcaacttcttgggctcaaagtgatcctccaatgtcagcctgtcgagtagctaggactataggtacgtgccaccaccaagcccagctatttttaaaattttagtgtagagatcaggtctcactatgttgcccaagctggtctcgaactcctgggctcaagctatcctcttgccttggcctcccaaagtgctgggattacagacatgggccactgtccccagtcccacgttatatttctatgagacagctctggtctggactgtgcctccctccctggaccttggtcccatagggctggtcagcatctcccccaggccaacatggccacctgcatccccagtgctacaggagccccctgcccctatgaggcggtgcatgcacgttgttgatcatgacgtgcatgatggtcttgggcatgacaccaaccatgaggtcccacacggtcttgttgacaatggccatgtaggagtccacaaggttctgggtggtttccatttgccgctccagctatgggtccatggagtgcatgaagctgtcggagccattctcctcagccttgctgtcctgtcatggagaacacagtggcatcagggtggccaggccatgcagccaggctccaggaatccctaggatctcagcacctccaagggtacctggaacattgaggcacagagaaaaacaactggcgtgaacatgcaccgagctccccacacgctctagacggtttcaggtatctgcctctcaggaccccagactcccctgattcagtctcctcttagttctgactctagtgcccagaatctgcctcaagttaccaatccagaaactggaaaaaaacatctccaggtcccctgttggagacctggccagagcttgtgccaggctgcagacgcctggcagggggcaagaaaggggcatactcactttccccttgtcctgggaggcccatgcaccaacactgccaccgccgccgccaccagggaacacggcaaagtagacacacacagagaggaaaacgggaagggttgagtgaacctgggacactgcaccccaactttaatgtgttgtggaattcagttagctaatattttattgaggatttttgcatcaatattcatcagtgatattggcctgtagttttcttttttggtctgtgtgtttgattttgttatcagggtaatgctagccctgtagaatgagtttgcaagtattccctccttctctatttttggaatcgtttgggtaaggttggtattagttcttctttaaatgtttgctagaattcagcagtgaatcatcaggtcccaggcttttctttgctgggagactttttattaccactttgatcccattatttgttattggtttgttcaggttttgggtttcatcatggttcaatcttggtaggttagatgtgtctggaaatttatccatttttggtaggttttcctatttatttgcacacagttgctgaccactagtgatcctttgaggttttttttcttttctttttttatatggagtcttggtctgtcgcccaggctggagtgcagtggcgcgctctcagctcactgcaagctctgcctcccggtttcacgccattctcctccctcagcctcccaagtagctgggactacaggcgtccgccaccacgccctgctaattttttgtattttttccgtagagacggggttttaccgtgttagccaggatagtcttatctcctgacctcctgatccacccgccttagcctcccaaagtggtgggattacaggcgtgagccacgcccccttgggacagggacacacacacacacacatagacacacacacacacacacacacacacacacacacacacacagagttggttgttgtgccgtccagtcgcgagtgtgaggaagggaccagatcggtcgggcagaaaggtgctgggtcaagagaggagggggcagccggtagcgcgggcacgccgggtgcgcgcggggcgcgccgggttgaggggtgaggggtgaggggtaagaggtgaggggcgacgaggaccggggcggggtaggggcagccctttcccaggcggtagcgggggcagtggtgctgttgcccttttaaactgcggcttgacgggagccgcgcctcctgtcggtggagtcggttataaagggagcagccccgcaggccgccacatagctcccgccaagtcctcggtgc

SEQ ID NO: 13477 - DNA, 2300 bp, Homo sapien
agacagagaccttactccagaagccggggactgcagtgctgcagcagccgcggctcctggccggcatggagcctctcttcagaagggcagcagctcgcttgtcacagaccctggacggcagaaaagctgattcagggatttccgggcggctcctcctgtgggggagtgtgcatctgcatacctgggtgttgggaagggtgtgtgcgtgtgttcatgtgtgggctgggggagaggacccatgcctgagaccctctagtcaggtctgctgatccctcactgttcttcagatggaaagggggagctggggtaaagggctcaaggtcagatgctcagcaggagggcaccaggggtttccccccactctgctacactccggtaacctacccccaccacgtcgccccacactgaggaggggacctgtcacctgagatgggtgtgtgggctgaagagcagtacctgctgctcctcttcggtttctccctggggagagaagtgcttctgttttgaaatctcccccaaaccttcttttgctagaaggagggaggatgggactgaaatttcattcagcaggctggattcaggtttgactttggggtttcctgatgctaagggtctggggcagcatcctgcttgacagggaaagcttatgccttcacgattggaatgtagtgctgcttagatgaaaagggatggatgaaatgacccccatggttccttctgataaaatggaccaagagacgcctgaaccttatacaaagctgcctccagtaaaacaaaatctagttacagaaaataaagcacttctgtaaggttatgtctgctccttctgaaaataccgtgtttaatgtctgtgctgcctccaatgtgtcctttcccctcttgggtggaagtggaattctgatggcctgtggaaggattgggtgacacttgcacaggcagtggctgggccacaatggcggaggatgggaacacggtgggtccctggagaaaacacagctgtgcttcacccaaagccccttcaggccccagaggacccttcccctgatagggatgacaatgacagcctgacagtcttaatttcacttgattcttatcaactttcccaggaggcagcaaggcgaggaagggataattcttcactccactgaggcacagggagcccccaaagggtggatgactcacccaaggttctcaggtaggttcctaccttaccctggggttttatgtttctattctcaacactaacgtttctcattcctccacaagttaaattgctcactccagccaactgaagcatgcttttcttgacacagttagctcgaggcacacggttggtgttaaaaaaaaaaaaaaaaaaaaaaaaaaaaaaaaaaagagcgttatgtcaatttcattgatcaacaaaagtgatggctccactgcaaattcaagttgatagtgcctgggcctcttgagttcaagagccttctagacaaagggctctgagctgaaacatgagcatgcacacatatgcctgtcgctgggtctgatgagataatttgcatacttggttgttatccctgagcattttcctgcctcaatgcacgtgtagccaacacaataataatcatagctgataaaggctaaagctgaggactttcctgagccaggcagtggctttaaaacctttaaagtggcttttaaaactttaacagctaaagctgaggactttcctgagccaggcagtggctttaaaaactttaaagttttcacatagactctcactaaataatttctgtttttcagatcaacaaactgagactatcacatttgggattaagttaaaaaaagaaagaaagaaagaaactgaggcttaaatacttgcttaaagcaagtatttcacagccagcaagtggctaagttggaacttgagcccaggcagtctagccccgggatcctgtgcccggcagaaaggtgctgggtcaagggaggagggggcagtcgggagcgcgcgcacgctctggacttgtgcacccgcggaaaagggtgcgccgagggggtaggggcgacggggatgggggcggggtaggggcgacggggacgggggcggggtaggggcagccctttcccaggcggtagcgggggcggtggttctgttgtcctgttgcccttttaagctgcggcttgacaggggccgcgcctcctgtcggtggagtcggttacaaagggagcagccccccaggccgccacacagctcccgccaagacctggtgccccttgccattttccagccgcgctcccaggagagtggaggctgcagg

SEQ ID NO: 13478 - DNA, 2300 bp, Homo sapien
cacaacatggatggaattgcaagacattatgctaagtaaatatgtcagatgcagaaggaaaaatattgcataatctcactcatatgtaaaatcttttaaacaaattcaaatatacagaaatagagaattacaccgtggttaccaggggcagtgtggcaggaaggaattgcagagaagtaggtcaagggttacaaagtcgcagataaagagggcggacaagtctagagatctaatgtaaaacatgaggaccgccaatactaacagtgtcttgtattcaggatttttgctaaatgagttgattgtagatacttcagccccacacacaaaacatgggtacattaatttgcttcactatattaaccaatttactatatatatatatatatatatatatatatacatacatatatatatacacatatatatatataaacatcatgatgcttaccttaaacatacacaattaaatgtatttaaaaaatccatcatgatgtacaacttatatacataaaataactaaaataaaatttaaaaaataagattctccccctcccacaacaagaaaggctttggaaggacttgaatataagatggcagaataatttggtaataaatgccaacgactgagatctgggacatctgttgactgagatgccaggtgccatgttgcatggcatggcatgaggccagagccatggggcaggcattgtaggatatgtaccaatgtccagtctcctccacggtgactctctatgtgctcagaccatcaggaattattttcttttgctcttttggtgtctctgtaaatcccatcttatctcccaaaaatttcctcctctcctctgctttaaatgcaatgtcctttgaggcccagctcacaggccacatcagctacgcagcgacgcagccctggaggaacgagcccagagcctgggctgtatctcatgttgcagatttctggcatcttgaatcttcttatcctgacctctccaatcgctgccacccttcatctttgatcccattggtgggcttgtgcaagtgtgcaggatggaacctgagttccagccccttacgctgacaattacagtagttgcttaccagcatcctatgtctgggccctcttcccctcagaggcaggttgcctggaaagaacagaaagaacaaagggatccatttctgtctttctccgagggactgtctggagcatctccaaagatggggactacaaaatgcgatttgcatcacagcccacagcaaacacaaaactgcacacatctgtgtccagtggcgtattagccatgtggctccacctccagaggaggatatctgatcagcctccagggcttcatcccctaagtccctggcaggtgttgcagctgttcctttcctcaggctgcaggtgaacaagtgggtggccacgctttgttaagtggcatggccatcgagagtcatccggctctgttgaggcatcattgtcctttctgctggaaaagttgagtcttcctgaaccttgaagacaaaccacaagctcatcggttgttgtttgtatgcatgtgtgacagaagaaaaaaaatttctcttgagagaggtgttcagtgctcccctcatcctcttgcccagaaggtgcccctgttagcacagaacgcccagtatctgtgagtggagcaggggcaggtgctatgcgcctggggacaggccacttcatctttatgtgcctcgatctccccacccacaatgagatctggatcacacttctgagtgactgctaccaggtagccactggcccatgtttcagtggaaaggagaacaggagcccaaagatgacaaaagacacagccccactgtccagaagctcacagctaggaaatgagatgccctttccttagttcctaatcaaaattcccatttcaggccaataaccatgagctgctctgttggggtgatgctgcagttagcaagacgtgcatcccaccctctggaaattcatggcaccaaaagttgtcacagagtgagttgggggcaaaatgacactaaatggtgcatctttaaccttatgtcacagatgttagcaaactcagtccaagaaaaaaaaggcaattagtgctcgcttcggcagcacatatactaaaattggaacgatacagagaagattagcatggcccctgagcaaggatgacacgcaaattcgtgaagcgttccatattttttattcacaatagcaaagacttggaaccaacccaaatgtccaacaatgatagactggattaagaaaatgtggcacatatacaccatggaatact

SEQ ID NO: 13479 - DNA, 2300 bp, Homo sapien
tgcctccccaccgcccttttctcactcagatagggacactgaggtccaaaggaaaagtcacctgtccaaggtcacacatctgggaggggacccaggacctatcatgccaccaggacaccggtctactcagtttcttaaaaatgttttttggagataggatcttgctctgtcgctaggctggaggacagtgggcgagatcaccactcactgtagcctcaacttcttgggctcaaagtgatcctccaatgtcagcctgtcgagtagctaggactataggtacgtgccaccaccaagcccagctatttttaaaattttagtgtagagatcaggtctcactatgttgcccaagctggtctcgaactcctgggctcaagctatcctcttgccttggcctcccaaagtgctgggattacagacatgggccactgtccccagtcccacgttatatttctatgagacagctctggtctggactgtgcctccctccctggaccttggtcccatagggctggtcagcatctcccccaggccaacatggccacctgcatccccagtgctataggagccccctgcccctatgaggcagtgcatgcacgttgttgatcatgacgtgcatgatggtcttgggcatgacaccaaccatgaggtcccacacggtcttgttgacaatggccatgtaggagtccacaaggttctgggtggtttccatttgccgctccagctatgggtccatggagtgcatgaagctgtcggagccattctcctcagccttgctgtcctgtcatggagaacacagtggcatcagggtggccaggccatgcagccaggctccaggaatccctaggatctcagcacctccaagggtacctggaacattgaggcacagagaaaaacaactggcgtgaacatgcaccgagctccccacacgctctagacggtttcaggtatctgcctctcaggaccccagactcccctgattcagtctcctcttagttctgactctagtgcccagaatctgcctcaagttaccaatccagaaattggaaaaaaacatctccaggtcccctgttggagacctggccagagcttgtgccaggctgcagacacctggcagggggcaagaaaggggcatactcactttccccttgtcctgggaggcccatgcaccaacactgccaccgccgccgccaccagggaacacggcaaagtagacacacacagagaggaaaacgggaagggttgagtgaacctgggacactgcaccccaactttaatgtgttgtggaattcagttagctaatattttattgaggatttttgcatcaatattcatcagtgatattggcctgtagttttcttttttggtctgtgtgtttgattttgttatcagggtaatgctagccctgtagaatgagtttgcaagtattccctccttctctatttttggaatcgtttgggtaaggttggtattagttcttctttaaatgtttgctagaattcagcagtgaatcatcaggtcccaggcttttctttgctgggagactttttattaccactttgatcccattatttgttattggtttgttcaggttttgggtttcatcatggttcaatcttggtaggttagatgtgtctggaaatttatccatttttggtaggttttcctatttatttgcacacagttgctgaccactagtgatcctttgaggttttttttcttttctttttttatatggagtcttggtctgtcgcccaggctggagtgcagtggcgcgctctcagctcactgcaagctctgcctcccggtttcacgccattctcctccctcagcctcccaagtagctgggactacaggcgtccgccaccacgccctgctaattttttgtattttttccgtagagacggggttttaccgtgttagccaggatagtcttatctcctgacctcctgatccacccgccttagcctcccaaagtggtgggattacaggcgtgagccacgcccccttgggacagggacacacacacacacacatagacacacacacacacacacacacacacagagttggtggttgtgccgcccagtcgcgagtgtgaggaagggaccagatcggtcgggcagaaaggtgctgggtcaagagaggagggggcagccggtagcgcgggcacgccgggtgcgcgcggggcgcgccgggttgaggggtgaggggtgaggggtaagaggtgaggggcgacgaggaccggggcggggtaggggcagccctttcccaggcggtagcgggggcagtggtgctgttgc

SEQ ID NO: 13480 - DNA, 2300 bp, Homo sapien
agaaggcagggaaacgaagagcataaaggggtcttggagggaccacagagaaaggtggcaaaatgggtgcagggggagtcaggctcaccatggcctccctgctctccgggtcctctgggacactcggcatgggctgaggtgcctcctccccctcactgtccagatgttctcctccgtgtcctgtggggggtggccagaggggtcttcagacaacccaacaagggaggtactgtgggcccacctctacctccaccctcactgtgtaaccctgagccagcccctccccagagaggaatgagctgttgttctttatttttacttttaagaatcaagatcttgctattccgcccaggcacactcccactactggtcgatgtgggagttctgacctgctccctttctgaccttggccagttcagccacccttaggcaacttggtgaccgcccgctcacaggaggtcaccacactgatgccgaacttagtgcaggcacccggtcggcataatgaccagctgctctaaaggtctcttccaactcctcaatcctatgctgctagcagtccccccttcctcctggggctctctcctcttcctctgagcggtctcccgtaccttccccagggagagccatgaggctcagctgggccgttagctgctggttctgctggctggccacttccaggtgctcctaaggggccaggaaagagtgagaagggatggagtttgccaggtcgtccccctcacagccccatcctcggcagctccctcccctgggtctcctgcaacttttggcaggccatctcggccactgctttgccccaagcttcctactgctgcagctggttcattagctgggtctgttgcagtcactgcctgtacagcgcctccttctcacaggtcagctgctgataggcggccacctgctgctgataggtggccacgtactgctgcaggtgacccaggtaatggtctggctgctgctgcagactctgaacctcttggctcttcagctccacctgcaggaagaccctgggtgtgagggcacgtggtggctggtttccagattctgggcccattaatagggtagcgagggcactgtggggctctgtcagctacccaggcccctgtccccttactccaggcctaagtgactgcctccctttcctagaaccccatgcctccttccccagcctcaaatctcataccctcttctcatttaatcctcagcacctctgtaaggaaaatgctaacttccctttgaagttaaagaaacagagacttagagatgcaaagtacttgaatggtgaccagtggaaccgaggctggaatccagtttcaatctaaggagtctttttgttttgttttcagacaagagtgtcactctgtggcccaggctggagtgcagtggtgcaatctcagctcactgcaacctccacctcctgggttgaagcaattctcgtgcctcagcctcccgagtaggtggaattacaggcatgcgccacaatgccctgctaattttttttttttttaattttagtagagatgaggttttaccacattggccaggttgatctcaaactcccgacctcaagtgattcttctgcctcagcctcccaaagtgctgggattataggcatgagccactgcacctggtataaggagcctgttatagcactgtctcttcccctgtgattgggggctccatgcctctagctgggatgatgatgtccagacctgagaggagcccagggctacccacctttaaaagtcagaggcaggaagtgagaaacagtcgcaggactgccctgcggggtgctgtggtcaccagcccccaggctggaagctgcctctgacctggcacctcccctcccaagaggctgctgcccgcctcccagcccttcttggatggggtggaggtttccgtctccttcacctcgccaagcttctcctgtagctcctttacttgctgctccaactgcagtgtgctcttgttctcattgttctggacagagagaagcaatcagcagccacccactgcagctggagaccccagaacttggtgtctgcctcccatggcactgggaaggctggaggcaggttagaaaaatcaccccctctctcccacagccacctggctcacaggtgcctttagaagtaacctttcacgcgagggctacactgccccattttagaggtggggaaacaaaggcccggagggctagggaggagggcaggctccccagttggggcaacgcaccagctcctcgaagacgctctgtggcttggccagctgccgaagct

SEQ ID NO: 13481 - DNA, 2300 bp, Homo sapien
tctagttccttcctcaggtgctgcagctccacctcagagggcactgctgggggctccgggggcaagggttcagctgagaaaggaagcagataataagggcctctggattctcggaaaagaaaaaccctcctcttggcgcacagctcctctcaggctcctcaaacttggcctcactgctaatgattcctcgcacccagatggtagccagtcttccaaagcactttcagagaaagagcactgcgggtggctgacaacgggccctctttgctgatggggacactgagacactgagactcactgagatgacaagacttgcggtctcctggcacagatctctttccctctgcctcaaagcccttccatccacccacctccctggggcactctaagccaccctcacagccctctgatgccagtcctgctcccaggtcatgccagccccatcttacccgtctggtttttgagtttggacaagctccactccagctgctctacccaacgcatatcctgcttctctttctttaatgtgcaaatctgcccaaagcacagggggaaagggccctggagagaggggctggtggctggacaggctgccctctccttctctgcccccacccccacaaagcccagacccatgaccacctctggctctactattcccattttacagatgcccagaaagatccagtgacctatctaatgtgggggggctgaagggtcagatctcacctcctgcgacattttactcatcctctgatgccaccgggccctctctccttctatatgttcagcacactcatctctttctaattggagttgttgaaatgactccttcaactgcaagaatgggcacagaagttaggaagggctgtcactggtcctcacctgctcctggccacctggggtcatcgtccttccacatccctccctcggaaaacctcacctgtgtcagctgcgctttcagcagtgcctggtcctgtagggactgctctaactcccactctgtatgtgctttgctgcagctggacaactggatggtgaagagtgagaagtttcaatctggagagcctgggcatttccacacagtgccccttaacagggctagggctaggcccaatatacaactcggtcagtaaagatcaaggcatttcccagcccgtggtctggtttttaaaagaacacagtaaagttggaacggacagggaatgagactgagtttatagctggctaacagaggcccagagagatcagataatattgctattgttattattgtcattattaccactgtttgaacctttgtggaatgcttcaccaggtaccgtgctaacaatcccatttaatcctcgcaaccaccataggagacagttactatgattccctctattgtggagatgaaaaaacatggagtatttgaggttaagtgcttgcctaagttcacttaggcagagctgggatataaacacccaggtctatccaattctctaagcccgtttttcttgctggggatgggggcacagataggaaggggaaaattaatcttttgttcactttttgacaggatgatacattcacatagtccaaaactcagaaggtacagaagggaagtatctcccagccatcttgttctctctcctgaattttttatgaacccttgcagacatgttttatgtatattatcacagtatgtacacacacacacacacacacacacacacacatgcacgcgtttcctctttctacagaaatggtaacatactaaaggtactcttctgtaccttcacagtacaagtacccaataccccacctaggacttgcccaagaccacagccaggtaagggcggggcaggcacttggcctccaagctctgcctccagtgctcactccccacagtaccccccaactcacccacagcagctgactcggccccaggctgccactaaaaaccatacaaaaaagtagcaagaaatggccatgctgccttctgggcaggacacgccatcctgcagaagggacctttaggctcactcttccatctgcaaaaccaggctcccaggggatggggcaggtggctggactcacctggtttgccttcttcttctctgtggcgatgacagcagacagagccctctctaactctcctttacactgcaatgaatgttgcaggcggacagccaggtccttggactcttctgtaatgagagagttgagatggggcccaaaggactccccctgaagacctgtcaaagtgccaggttgaaggatgacagggtgcccagattcccaccttcaaagtatct

SEQ ID NO: 13482 - DNA, 2300 bp, Homo sapien
ttcttctaagtcagccagtaattcctccttctcacttaatcgttgactacaaagaccaagccattttgactctgccaccgatgagctttcacatttctttcctccttccattcccatgactaccaaaccagtgcaggttctcctcacttcactctaagacaacagcgtggccctcaaatactgtcacactcttcaaggctctgtgagcacaatctgtctcatattctcttctgctgtcaccagatttattctaagaccgtttcttcactgttactcccctgtttctcaaccagttacacagaaagacgaatatccaggcatggtgtcatgtgcctgtagtcccagctactcaggaggctgaggcggcaggatcgcttgagaatgtgagattcagactgcagtgagccatgatcatgccaccgcactccagcctgggcaacagagtgagattgtctcaataaataaataagtaaataaataaataaataaatgaataaataaatgtggtctatccatgcaacggaatactataaaattatcagccttaaaaaagaaagaagccctgtcacatgctgcaatatagatgaaccttgaaaacattacactaattgaaatcagcccatcacacaaagacaaatgctgtacaatttctcttacattaggttcgaaattagtcaaactcatagaaacagaaaatagagcggttgtttccataagccaggggatagagaaatggggagttgttgtatagtggctatagtttcagttctccaagagaagcaagttctagaaactcgttactcaacgtatatttttaacactactgcactgtatacttacaagtggctaatatggtaaattttatgttgtgccttatcaccataatgtttttaaaagaaggggtttgtgtttcccttcgttgtgatcacccatttttcacttcagcattttgaacttgagatttcctgtagcggttttactgagccctgcagttaccggctcagaatgtctccaccgccttgtaaccttgtaggcagacacttttcagcatcttattgggctccgtgtgcttgatgcttaaagtgacatggagacatgccacttgctgagaagcaaagaaaggcaaaaggtgactgctttcctggcatcgatgaaggcagagagaagggatcttggaggcacagatattaagccataagcaataacatgggttgccaaaaagagaactaacccctctcctggtaacatttccaggtgtttttcacagggccagtggatttcacaatgtgagtgctgtccagcaccaaagggaatggccaacaggcatggagcagcctacagcgtccagcacccagtaggatggccaggaggcacggagcagcctgcctgtcccaggaaagcaggagtcacaggacacaactggacccaggtaggcatgtatgttactttcctgtggctgttagagcaaattaccaaaaatgtggtgacttaaaacaacagaaatttattttctcacagttttggatatcagaagtccaaaatcagtatcactgggctgaaatctaggtctcagcagagccagtgctctcagaggctgaggggaaaatccatcctttgacttgcgcagcttctgatggctgctggcattcattggcttgcagctccaccactccaggctctgccttcttggtcacagggcctccttctcttctgtctgaagttaaatctcctttatctccctcttataaggatatatgtgccaggatttaatgcccacggagacaatccaggataatctctcctcaagatccttaacttaatcatacctgaaaatatgctttttccaaatgaggtaacatctacaggttctaggagttccagaccagcctggacgacatggtgaaacacggtcttttttttttttttttttttttttttgagcggagtttcgctcttgttttccaggctagagtgttttccggtctcgactcaccgcggcctccacctcccggttaggtggttctcctgcctaagcctcctgagtggctgggattgcaggcatgagccaccatgccagctaattttggtggttttttttttgtacagacggggtttctccgtgttggccgggctgatctcaagctcctgacctcgggtgatccgcccgcctccgcctccctgggtgctgggattgcaggcgtgagccaccgcgcccccggtccaatttagtaaccagaaaggaatagatcggcctggcgtggtagctcatgcttgtgatcccagtactgtggacggccgag

SEQ ID NO: 13483 - DNA, 2300 bp, Homo sapien
acattcttaaaattcttctatttccatccttctgcttaaagataaagtgatctactttcagctgtattttttatccaggtaataatattatgtttttttttttaagtgaaagccccactgaacaaaattaaaacacacacgcaaaagtaaacttaaggcaagtgatacacttcagccttatttcttagactattcagaaaaattccagagttaaaacattcagcttcattttatatatgctagcaatgctagcaattaatctaattctagaatcaattgcttttctattttaaatataaagtaaaatattaaaattatatatttggacatgttttgaattttagcttcccctctcaacccctcatttttgagttccagataaatatgtgaactacactaacatgaacaactagctcaacagaatgaactacattcacgctatagtaccccagagtgaacttaaatttgggaaaactaacttttctgatagtaactacagtaaaatgcatcatataaatgttcgattttaaggagaaaccacctatctctgtgagaaaccaagagtgtaaaaaacaagtctgatacaaaatgataccatttttgaaactccggtgggctcgtcatatcctaaggtgaaagttataaagttgaagatcaaaagctgactggcctgaaactcccctgtggtttcctcatagtctaaagtgaaatcaacacatgttaagtgggtgtgtagacatttacacataaagctcacagtacaaaaatgaccccactaacaagctccttttataaaaccattttaatttagaaagcttattctatatttagcttaggctgaattcttcttttcacctccccttcctcaaaagaatgcacagaaaaaaatcattcaggttaataagagcagtgagctgagactccagcctggctctgcttagtaaaccgtgggtgtggatttagaaggcatactttctcctaaacccttctatgaacatgtacttccccgtcccctaagttcagtaagtttaccactcaattactctctcaaactacctctttcaagcttaaaagagcactaatgcggttaaactgatgaataaagctcactttctaccggctttccatttgaccaagtctgtattacttaaaacaaaacaccctaactcctaaaagccatttcttcctttaaaccattttatcccacttgcgacgtccccgcagacacagacttggaattgcttacgtgtagtccgtgttattctttcctacatggatgggttgttttcagtttgcttgcagtatttctgacatttcccgttacaacatcctgctctgccagcatcttcagggcaaaggttgggggcctagcccagctcccagcggcaagtacactaggctcttaacttcgcttgtcctctctgcaggccctgccgaagctccccctggtttcccgcagcgatcccgcgcaggtgagggtactggggagcccgtggccttctccgcccgccggctcctccccatcagccgtcagccagggctctcggcgccggggaagcctcccacagggtcccaggccacccaagcgcggtcaaacgccggcggcccggcctcgcttacctgacgcagccgcgcgtccgcctcgacccatcaggcgcgcagggcccgctctcgaaactcgcgcgggctctcgcagtcagccgcgcggcctttagccgcgaaaacagcgtggcgcacggtggcgccgccgcagccgtgggccgccgcgcccaggtagcgctccagctgcccgcaaagctcctgcagcgccacctcgccggggcccgcgcgcgcctgccagagcagcgcccacagcccgagccccagactccaggccccgccgccgcccacgtccagctgcggggagcagcgttccagaggcggccacagcgccgctagctgccagcgcgcgccgcggaaccccgcggccgagaaccggccggcccagttgggcgggaacacggcagctgggcggggacacggcagctgggcggggacacggcagctgggcggggacacagcggccttgggtttgggctccagccccagccgggccccctcgcgccgctgcggctgctgcgcggtgaggtcgtgacaagtcacagctaacttgccctccgcgccattccacgccaccaggaagcgcagccggtgcctctcggcatcggcgaagaggccttgccggaccggcgcccagccctccaggctgtcgagctgctcgtcctccatggccgtcggcggcagcggccctaggactcggc

SEQ ID NO: 13484 - DNA, 2300 bp, Homo sapien
ctagttccttcctcaggtgctgcagctccacctcagagggcactgctgggggctccgggggcaagggttcagctgagaaaggaagcagataataagggcctctggattctcggaaaagaaaaaccctcctcttggcgcacagctcctctcaggctcctcaaacttggcctcactgctaatgattcctcgcacccagatggtagccagtcttccaaaggactttcagagaaagagcactgtgggtggctggcaacgggccctctttgctgatggggacactgagacactgagactcattgagatgacaagactcgccgtctcctggcacagatctctttccctctgcctcaaagcccttccatccacccacctccctggggcactctaagccaccctcacagccctctgatgccagtcctgctcccaggtcatgccagccccatcttacccatctggtttttgagtttggacaagctcctctccagctcctctacccgacgcatatcttgctgcttctctttctttaatgtgcaaatctgcccaaagcacaaggggaaagggccttggagagaggggctggaggctggacaggctgccctctccctctctgcccccacctccacaaagcccagacccatgaccacctctggctctactattcccattttacagatgcccagaaagatccagtgccctatctaatgtgggggggctgaagggtcagatctcacctcctgcaacattttactcatcctctgatgccaccgggccctctctccttctatatgttcagcacactcatctctttctaattggagttgttgaaatgactccttcaactgcaagaatgggcacagaagttaggaagggctgtcactggtcctcacctgctcctggccacctggggtcatcgtccttccacatccctccctcggaaaacctcacctgtgtcagctgcgctttcagcagtgcctggtcctgtagggactgctctaactcccactctgtatgtgctttgctgcagctggacaactggatggtgaagagttagaagtttcaatctggagagcctgggcatttccacacagtgccccttaacagggctagggctaggcccaatatacaactcggtcagtaaagatcaaggcatttcccagcccgtggtctggtttttaaaagaacacagtaaagttggaacggacagggaatgagactgagtttatagctggctaacagaggcccagagagatcagataatattgctattgttattattgtcattattaccactgtttgaacctttgtggaatgcttcaccaggtaccgtgctaacaatcccatttaatcctcgcaaccaccataggagacagttactatgattccctctattgtggagatgaaaaaacatggagtatttgaggttaagtgcttgcctaagttcacttaggcagagctgggatataaacacccaggtctatccaattctctaagcccatttttcttgctggggatgggggcacagataggaaggggaaaattaatcttttgttcactttttgacaggatgatacattcacatagtccaaaactcagaaggtacagaagggaagtatctcccagccatcttgttctctctcctgaattttttatgaacccttgcagacatgttttatgtatattatcacagtatgtacacacacacacacacacacacacacacatgcacgcgtttcctctttctacagaaatggtaacatactaaaggtactcttctgtaccttcacagtacaagtacccaataccccacctaggacttgcccaagaccacagccaggtaagggcggggcaggcacttggcctccaagctctgcctccagtgctcactccccacagtaccccccaactcacccacagcagctgactcggccccaggctgccactaaaaaccatacaaaaaagtagcaagaaatggccatgctgccttctgggcaggacacgccatcctgcagaagggacctttaggctcactcctccatctgcaaaaccaggctcccaggggatggggcaggtggctggactcacctggtttgccttcttcttctctgtggcgatgacagcagacagagccctctctaactctcctttacactgcaatgaatgttgcaggcggacagccaggtccttggactcttctgtaatgagagagttgagatggggcccaaaggactccccctgaagacctgtcaaagtgccaggttgaaggatgacagggtgcccagattcccaccttcaaagtatct

SEQ ID NO: 13485 - DNA, 2300 bp, Homo sapien
cagaaggcagggaaacgaagagcataaaggggtcttggagggaccacagagaaaggtggcaaaatgggtgcagggggagtcaggctcaccatggcctccctgctctccaggtcctctgggacactcggcatgggctgaggtgcctcctccccctcactgtccagatgttctcctccgtgtcctgtggggggtggccagaggggtcttcagacaacccaacaagggaggtactgtgggcccacctctacctccaccctcactgtgtaaccctgagccagcccctccccagagaggaatgagctgttgttctttatttttacttttaagaatcaagatcttgctattccgcccaggcacactcccactactggtcgatgtgggagttctgacctgctccctttctgaccttggccagttcagccacccttaggcaacttggtgactgcccgctcacaggaggtcaccacactgatgccgaacttagtgcaggcacccggtcggcataatgaccagctgctctaaaggtctcttccaactcctcaatcctatgctgctagcagtccccccttcctcctggggctctctcctcttcctctgagcggtctcccgtaccttccccagggagagccatgaggttcagctgggccgttagctgctggttctgctggctggccgcttccaggtgctcctaaggggccaggaaagagtgagaagggatggagtttgccaggtcgtccccctcacagccccatcctcggcagctccctcccctgggtctcctgcaacttttggcaggccatctcggccactgctttgccccaagctttctactgctgcagctggttcattagctgggtctgttgcagtcactgcctgtacagcgcctccttctcacaggtcagctgctgataggcggccacctgctgctgataggtggccacgtactgctgcaggtgacccaggtaatggtctggctgctgctgcagactctgaacctcttggctcttcagctacacctgcaggaagaccctgggtgtgagggcacgtggtggctggtttccagattctgggcccattaatagggtagcgagggcactgtggggctctgtcagctacccaggcccctgtccccttactccaggcctaagtgactgcctccctttcctagaaccccatgcctccttccccagcctcaaatctcataccctcttctcatttaatcctcagcacctctgtaaggaaaatgctaacttccctttgaagttaaagaaacagagacttagagatgcaaagtacttgaatggtgaccagtggaaccgaggctggaatccagtttcaatctaaggagtctttttgttttgttttcagacaagagtgtcactctgtggcccaggctggagtgcagtggtgcaatctcagctcactgcaacctccacctcctgggttgaagcaattctcgtgcctcagcctcccgagtaggtggaattacaggcatgcgccacaatgccctgctaatttttttttttttaattttagtagagatgaggttttaccacattggccaggttgatctcaaactcccgacctcaagtgattcttctgcctcagcctcccaaagtgctgggattataggcatgagccactgcacctggtataaggagcctgttatagcactgtctcttcccctgtgattgggggctccatgcctctagctgggatgatgatgtccagacctgagaggagcccagggctacccacctttaaaagtcagaggcaggaagcgagaaacagtcgcaggactgccctgcggggtgctgtggtcaccagcccccaggctggaagctgcctctgacctggcacctcccctcccaagaggctgctgcccgcctcccagcccttcttggatggggtggaggtttccgtctccttcacctcgccaagcttctcctgtagctcctttacttgctgctccaactgcagtgtgctcttgttctcattgttctggacagagagaaacaatcagcagccacccactgcagctggagaccccagaacttggtgtctgcctcccatggcactgggaaggctggaggcaggttagaaaaatcaccccctctctcccacagccacctggctcacaggtgcctttagaagtaacctttcacgcgagggctacactgccccattttagaggtggggaaacaaaggcccggagggctagggaggagggcaggctccccagttggggcaacgcaccagctcctcgaagacgctctgtggcttggccagctgccgaagct

SEQ ID NO: 13486 - DNA, 2300 bp, Homo sapien
cctgagtatggcttttcagacgcggcttctacaccgcttagactcaaagatctgcctccccaccgcccttttctcactcagatagggacactgaggtccaaaggaaaagtcacctgtccaaggtcacacatctgggaggggacccaggacctatcatgccaccaggacaccggtctactcagtttcttaaaaatgttttttggagataggatcttgctctgtcgctaggctggaggacagtgggcgagatcaccactcactgtagcctcaacttcttgggctcaaagtgatcctccaatgtcagcctgtcgagtagctaggactataggtacgtgccaccaccaagcccagctatttttaaaattttagtgtagagatcaggtctcactatgttgcccaagctggtctcgaactcctgggctcaagctatcctcttgccttggcctcccaaagtgctgggattacagacatgggccactgtccccagtcccacgttatatttctatgagacagctctggtctggactgtgcctccctccctggaccttggtcccatagggctggtcagcatctcccccaggccaacatggccacctgcatccccagtgctacaggagccccctgcccctatgaggcggtgcatgcacgttgttgatcatgacgtgcatgatggtcttgggcatgacaccaaccatgaggtcccacacggtcttgttgacaatggccatgtaggagtccacaaggttctgggtggtttccatttgccgctccagctatgggtccatggagtgcatgaagctgtcggagccattctcctcagccttgctgtcctgtcatggagaacacagtggcatcagggtggccaggccatgcagccaggctccaggaatccctaggatctcagcacctccaagggtacctggaacattgaggcacagagaaaaacaactggcgtgaacatgcaccgagctccccacacgctctagacggtttcaggtatctgcctctcaggaccccagactcccctgattcagtctcctcttagttctgactctagtgcccagaatctgcctcaagttaccaatccagaaactggaaaaaaacatctccaggtcccctgttggagacctggccagagcttgtgccaggctgcagacgcctggcagggggcaagaaaggggcatactcactttccccttgtcctgggaggcccatgcaccaacactgccaccgccgccgccaccagggaacacggcaaagtagacacacacagagaggaaaacgggaagggttgagtgaacctgggacactgcaccccaactttaatgtgttgtggaattcagttagctaatattttattgaggatttttgcatcaatattcatcagtgatattggcctgtagttttcttttttggtctgtgtgtttgattttgttatcagggtaatgctagccctgtagaatgagtttgcaagtattccctccttctctatttttggaatcgtttgggtaaggttggtattagttcttctttaaatgtttgctagaattcagcagtgaatcatcaggtcccaggcttttctttgctgggagactttttattaccactttgatcccattatttgttattggtttgttcaggttttgggtttcatcatggttcaatcttggtaggttagatgtgtctggaaatttatccatttttggtaggttttcctatttatttgcacatagttgctgaccactagtgatcctttgaggttttttttctttttttttttttatatggagtcttggtctgtcgcccaggctggagtgcagtggcgcgctctcagctcactgcaagctctgcctcccggtttcacgccattctcctccctcagcctcccaagtagctgggactacaggcgtccgccaccacgccctgctaattttttgtattttttccgtagagacggggttttaccgtgttagccaggatagtcttatctcctgacctcctgatccacccgccttagcctcccaaagtggtgggattacaggcgtgagccacgcccccttgggacagggacacacacacacacacatagacacacacacacacacacacacacacacacacacacacacacacacacacagagttggtggttgtgccgcccagtcgcgagtgtgaggaagggaccagatcggtcgggcagaaaggtgctgggtcaagagaggagggggcagccggtagcgcgggcacgccgggtgcgcgcggggcgcgccgggttgaggggtgaggggtgaggggtaaga

SEQ ID NO: 13487 - DNA, 2300 bp, Homo sapien
tcttaaaaatgttttttggagataggatcttgctctgtcgctaggctggaggacagtgggcgagatcaccactcactgtagcctcaacttcttgggctcaaagtgatcctccaatgtcagcctgtcgagtagctaggactataggtacgtgccaccaccaagcccagctatttttaaaattttagtgtagagatcaggtctcactatgttgcccaagctggtctcgaactcctgggctcaagctatcctcttgccttggcctcccaaagtgctgggattacagacatgggccactgtccccagtcccacgttatatttctatgagacagctctggtctggactgtgcctccctccctggaccttggtcccatagggctggtcagcatctcccccaggccaacatggccacctgcatccccagtgctacaggagccccctgcccctatgaggcggtgcatgcacgttgttgatcatgacgtgcatgatggtcttgggcatgacaccaaccatgaggtcccacacggtcttgttgacaatggccatgtaggagtccacaaggttctgggtggtttccatttgccgctccagctatgggtccatggagtgcatgaagctgtcggagccattctcctcagccttgctgtcctgtcatggagaacacagtggcatcagggtggccaggccatgcagccaggctccaggaatccctaggatctcagcacctccaagggtacctggaacattgaggcacagagaaaaacaactggcgtgaacatgcaccgagctccccacacgctctagacggtttcaggtatctgcctctcaggaccccagactcccctgattcagtctcctcttagttctgactctagtgcccagaatctgcctcaagttaccaatccagaaactggaaaaaaacatctccaggtcccctgttggagacctggccagagcttgtgccaggctgcagacgcctggcagggggcaagaaaggggcatactcactttccccttgtcctgggaggcccatgcaccaacactgccaccgccgccgccaccagggaacacggcaaagtagacacacacagagaggaaaacgggaagggttgagtgaacctgggacactgcaccccaactttaatgtgttgtggaattcagttagctaatattttattgaggatttttgcatcaatattcatcagtgatattggcctgtagttttcttttttggtctgtgtgtttgattttgttatcagggtaatgctagccctgtagaatgagtttgcaagtattccctccttctctatttttggaatcgtttgggtaaggttggtattagttcttctttaaatgtttgctagaattcagcagtgaatcatcaggtcccaggcttttctttgctgggagactttttattaccactttgatcccattatttgttattggtttgttcaggttttgggtttcatcatggttcaatcttggtaggttagatgtgtctggaaatttatccatttttggtaggttttcctatttatttgcacatagttgctgaccactagtgatcctttgaggttttttttctttttttttttttatatggagtcttggtctgtcgcccaggctggagtgcagtggcgcgctctcagctcactgcaagctctgcctcccggtttcacgccattctcctccctcagcctcccaagtagctgggactacaggcgtccgccaccacgccctgctaattttttgtattttttccgtagagacggggttttaccgtgttagccaggatagtcttatctcctgacctcctgatccacccgccttagcctcccaaagtggtgggattacaggcgtgagccacgcccccttgggacagggacacacacacacacacatagacacacacacacacacacacacacacacacacacacacacacacacacacagagttggtggttgtgccgcccagtcgcgagtgtgaggaagggaccagatcggtcgggcagaaaggtgctgggtcaagagaggagggggcagccggtagcgcgggcacgccgggtgcgcgcggggcgcgccgggttgaggggtgaggggtgaggggtaagaggtgaggggcgacgaggaccggggcggggtaggggcagccctttcccaggcggtagcgggggcagtggtgctgttgcccttttaaactgcggcttgacgggagccgcgcctcctgtcggtggagtcggttataaagggagcagccccgcaggccgccacatagctcccgccaagtcctcggtgc

SEQ ID NO: 13488 - DNA, 2300 bp, Homo sapien
ggaaaaaagaaccaatattttcatcttaagagaaaggaagggccggatgtggtggctcacacctgtaatcccagcactttgggaggccgaggcgggtggatcacgaggtcaggagttcaggaccagcctggccaaaatggtgaaacaccgtctctactaaacatacaaaaattagccgggcctgctggcagacgcctgtaatcccagctgcttgggaggctgaggcagagaactgcttgaacgtgggaggtggagtttgcagtgagccgaaattgtgcaactgcactccagcctgggcgacagagcgagactccgtcacaaaaaaaaaaaaaaaaaaaaaaaaaaaagagaaaggagacgaaaaacaaaaagagctcagctttaaaaaaggattatgacgtagaaaaagacacaacactgaagattgtcatgggtctttaagaaaaggaaatttgagacggctaaaacgcagaacagtgtggagtttggggaagagatgtggctaaagacagcgtaagcaattttttaaagttatgtctgaagcaagaagaaaagacaaggaataggttcagtttcatctctgatacactgtttcttgttaaaattgatgtttttttctgcaggcatttgcttcctgaatgatggtcccactcagccatccacctatactttctacaaagtcaatttatactgattcttcagatcagttaatcactggtacgtttcccctccccggtcaaggatcttttattatacgctatcatagaatcatattcctttccttagcgcacttctctcaactgataagtgccgccattaatgtacttacttgataaatatatgcctgcctttcctcttccagggccgaaactgtgcctggttttgctcatcattctacagtatatagcacgagttcaataaacagttgttaaagcaacatatttaacttacattttgttcccatctcttcactcagagacttttctttggattgggaagggtaaaatatccgaagatttgaactccaaaagaaacaaaatgattctatgcaaacgtttcctacttaaaactcattcattgggcaaatattcacttagtccctggcactatttggtaataggaatacaggagtgcatatggcagataaagttctgttgctgcccttaccaagtttcgtgggggtgagatgtggtgttagtaaatgcatactattttgtctgtatttaaatcgagtccaaatctctcgctctacagcccgccttgggatgtttcttatatcccaagaaacagaatattttgatgggatcgctgatgtttcagactgcaaaagcagctcagggcgtttgcagtcgtgcaagtcaacaagataaccgtctggaccggaagctgggctcctcccggtctcctaactccaaatccaacaccaagcttctgcagctgccacctcccgtagacttcgcatttcttccgcactctcctctcacgacgggtcttctttgttgtacttaatttcctacgcaataagatttcagcatcaccatcagtcccccaaagactaattcccacagagccgaagttcccaccaaaggccgagggttaaggttactaaaatcagcgtttctgaatcctgtctcaagttgtctcaactgggcttccgtagaacggtttcttcgtaagagggccttcagcgacagccgagctcggaaaagaacgggaataagttgtctcttacatttcctcaaatactgtgaatggtctgaggcgcaggtcaggtgtatttaaaaacctttaaacagtattcccccgccccaaaaactggccttgaaggaacaagtgaaactcatcctgcttttcatgtttgctgggtttgcccgttacaccccttcgcccgcacctatctagacaggcagctctcggccaccctccggggtcctgattttgaaaagaggagtggaccaatcagatgtggagcgctgtttggcgctgccatttgagcctgggctgaaactgcgggtgtgacccccccgtggtggctccgggtgtctgcagtggagctgggggcggaagcatgaggctaacggcttggcttcagtgaacgcaccgggatgtgcaggccgggaggtagaggcaggctgatgggggagggaacgagcagcctgtgagacggggtgacggcggctaccagcccgggcgggcaccgggactggaagagttgcctgagcagccggctggtccggcggccaggctagggcgggggcgagcgcccagttgagcctgctggggctggaggagcgagaagg

SEQ ID NO: 13489 - DNA, 2300 bp, Homo sapien
cacatattacttttgttagtggttttcttctccaagcacttttttttagaaaccataaactattaaaagcaacgtatattaactttattagcttgtctccaagtactaggaagtaccatataaattaggcacataaatttaaaataaaatgctttacattcagcttatttttcacaatgcaattcctgattatgtggcagagctattaaaatctcattcaaaatccctttatttcaaccaccaaaacatcaacaacttctcaattattccactctggcttctcaatttactcatacaaaaaaaaaaattgctgtcccaaaagtatgatatggccaagcagcaaatctgtttcccaaattagtgaatatgcagtcatcatttgaagcctatttctaatgttctgtcatacttcatctacagattcatgtagaaaatgcactggtctcccttgtccctctacaaccttactctaaaacaagggtggaggggtagagtttttgtccctcccaacgtactacctgttccaaatacagtaagctggcaatatccggagacatttttaatcgtcacaactgagagatgctaccagcatctagtgggtaaaagacagacatcccgctaaacatcccacaattcacagaacagcatttcgtcttcccctaacaaaaattatctaatccaaaatgtcaatagtgctgaagttggaaaatcctgcaactttctctcaatgatcaaaaatccttggggaaaaaaaaaacaagaatgtcactttttaaatatcagcaatcgatcatctgaactgaattacacacctaaccattctttttgatacacagagtgaacattttagcacgatctgctaataagtgatgataaagggtgtgccctttcttttaaacctaaatcccttttcacagaacttacccctatttccgtggctgctgtttcatgtctcctgcgatcgcactgcccacggacacccttcaccttaataccatagaaggcccgcagatgctgcaacagggccaacttcaccagcctctgatcccacattccggatacgtcgataactctgaggcaggatgcaggtcctgaccctcgttcgccaccaagtcttccaatttccaaacgctctcaaatttgaactccgctcggctgctttccggccccgtctggcacttctgcggccccgacccccggccacttccacggcttttccttgatcctcactcacatccacttacacagacccgcttctcttagccctttgatccagccacacctcactcttccttcacttacagcgaccttctttctggtcacccaatgctttcagctactcacatagacttctttctgattctttcggtttctcgcctattgccagattctctccacttcctgctacttccaacgatcccccttcctccaaaccttactgtccgtctggttcgctctgaaatgtgaagagaacccttctcgctcctccagccccagcaggctcaactgggcgctcgcccccgccctagcctggccgccggaccagccggctgctcaggcaactcttccagtcccggtgcccgcccgggctggtagccgccgtcaccccgtctcacaggctgctcgttccctcccccatcagcctgcctctacctcccggcctgcacatcccggtgcgttcactgaagccaagccgttagcctcatgcttccgcccccagctccactgcagacacccggagccaccacgggggggtcacacccgcagtttcagcccaggctcaaatggcagcgccaaacagcgctccacatctgattggtccactcctcttttcaaaatcaggaccccggagggtggccgagagctgcctgtctagataggtgcgggcgaaggggtgtaacgggcaaacccagcaaacatgaaaagcaggatgagtttcacttgttccttcaaggccagtttttggggcgggggaatactgtttaaaggtttttaaatacacctgacctgcgcctcagaccattcacagtatttgaggaaatgtaagagacaacttattcccgttcttttccgagctcggctgtcgctgaaggccctcttacgaagaaaccgttctacggaagcccagttgagacaacttgagacaggattcagaaacgctgattttagtaaccttaaccctcggcctttggtgggaacttcggctctgtgggaattagtctttgggggactgatggtgatgctgaaatcttattgcgtaggaaattaagtacaacaaagaagacccgtcgtgagaggag

SEQ ID NO: 13490 - DNA, 2300 bp, Homo sapien
gtctctattgagaaaaaaaaaaaaaaaccctacaaaaatcagcctggtttggtggtgcatgcctgtagtcccagctactggggaggctgaggtgggaggattgcttgagttgaggagacagaggttgcagtgagtagaaatagtgccactctactccagtctgggtgacagagcaagaccctgtctcaaaaaaaaaagttatgtttatactattctgtagtctactaagtgttcaatagcattatatctaaaaaagtacataacttgatttgaaaaaatactttattgccaaaaatgctaacaatcatctgagccttcagtgagtcataatctttttgctggtggagggtcttgcctcaatgtttatggctgctaactgatcagggtggtgattgctgaaggttggggtggctgtgacaattttttaaaataagacaatcatgaagtttgatgcatttaattgactcttcctctcatgaaagatttctctgtagcatgtgtgatgctatttgatagcattttacccacagtggaacttctttcaaaattgaactcagtcctctgaaaccttgctgctgctttatcaaatgcattttgtaatttctaaatcctttttgtcatttcagcaatgttcacagcatctttaccgggagcagattccatctcaagaaaccacttcctttgctcatccataagaagcaactccccaacttgagattgtagcaatttagtcacatcttcagactccacttctaattccagttctcttccacgacatctgcagttaattcttccactgaagtcttggaccccacaaagtcatccatgagagttggaatccacttcttacaacctcctgttaatgtcgataatttgacctcctcccatgaatcatagatgttcttattgacttctagagttgtgaatcctttccagaaggttttcaatgtactttgcccagatctatcagaggaatcactgtctatggcagttatagccttataaaatgtatttcttaagtaataagagttgcaagtcaaaattactccttgatccgtggagtacagaatggatgttgtattagcagacatgaaaacattgatcttgaacatcttcatcagagctcttgggtaactaggtgcattgtcaaatgagcagtaatattttgaaagaaatctttctttctgagcagcatgtctcagcaatgagcttaaaatattcagtaaaccaaggtatcaacagatgtgctgtgcccaggcttctttgttcctatagagcacaggaagagtagatttagtgtcattcttaagggcactagaactttcagaatgataaatgagcatttgtttcaacttaaagtcaccagctacaattgtccctgtctgtagaagctttgaagccaggcagagacttattctcatctagcctagataacatcttcttccaatagacggctgtgttgtctacattgaacatctgttgtatagtgtagccaccttaatcagcgatgttaactagatcttctaagatctagagatcttgctgcagcttctccatcagcacttgccacttccccagtgctataacataaaacttttatgttattgaagatggcttttttccttaaacctcatgaaccaacctctgctagcttctaacttttctattctttttttttttttccatttgaacaacttgacattttagggttgttaatagcctaactttaatatgttgtgtctcaaggaatacggaggcctgaggagagggagaccggagaatcactggtcagtggagcagtcagaacacacacaacgtttattaagttcatcggtatgtgtgggtgtggttcgtggtgccccagaaccagaactgttgtaattacaacagtaacatcaaagatcactgagcacaggtcactataacaaatataatcctaatggaaaagtttgaaatactgtgagaattcccaaaatgtgacacagagatgcacagtgagtgcatgctgtttgaaaaatgatgccaataaacttgctcagcacagggttgccacaaacctttaatttgtaaaaagaaaatgcagtatcttcaaagggcaatacagtaaagcacagtaaaatgaggtgtgtctgtatggacacgtgtcagcttctcaaattgtaaactttaaatatgtgcattttatttggtgtcaattgtataaagcgattaaatttttaaaaggactgatgcagacagcacctggcatctgggataaagtgtatcattttcctctttatggcaggaactgccacgccccc

SEQ ID NO: 13491 - DNA, 2300 bp, Homo sapien
gcctggctaatttttatacttttagtagagacggggtttcaccatgttggccagaatggttttgatctcttgaacttgtgatccacccgcctcggcctcccagagtgctggtattacaggcgtgagccaccacgaccagccccaagctctattctgaatgcaacagggaaaggggtccttttagagcttatgctcaaaatctttgtctcccctcctcccatctcactcaaagtcaatgctcaaatccatacaatgacctgcagggtcatacatcaggtgctggcaaacagtagctggatggcaagttagccagctatttttgtaaataaagttttattggaacaaaaccacactcatatgttacatattgtctatagctgctttcacactaaaatagctgtgttgcctagttatgatggaggccacatggtcccaaaagcctcaaacatttactccctggccctttacggaacaaatttgctaacacttgccctccatggtctggctctctgctgcctccctggctttgttttcttctgcctccttggggttcttagagcctgctagataatcttctgcctgacggcttttacatgtgctgttgctgtttcctggcctaccatggccttctctcagtccacactgttacctccttcaggccaatgtcaatcttcaaatgtcatcttttcagtgaggacttcccttaccactctttcaaattgtaacctcaaccctaagatgtttctggctttacttgtcttcaatttcaccacatagtttactttttatatttctctatctccttccaccagaatgtatccttcatgaggagttcccctccctcccatgaagaatttcctcccattcctcattgttcactgccacatattttcagcatctaaaatgctgcctggaatgaggtaggcagtcaatacattcttgttaatgaactccctatttatgtccttattctctttagtttgctcatttatgcactcattcagtgtatatttatcaataattacacaacgctagccactgctgcaggcagcagcgattttatagtaaaggcaacaagcacaaccgcctgatgttaagaagcttgcattctaggtcattcatggtgggctggaacacgctggtgtcagtgcttcagggctgattgttaaactttcaggtgttaggctgggcatggtggctcacgcctataatcccagcactttgggaggctgaggcgggcggatcacgaggtcaggagatcgagatcatcctggctaacacggcgaaaacccatctctacgaaaaatacaaaaaattagctgggtgtggtggcgggtgcctgtagtcccagctactcaggaggctgaggcaggagaatggagtgaaccctggaggtggagcttggagtaagctgagatcgcgcccctgcactccagcctgggtgacagagcgagactccatctcaaaaaaaaaaaaaaaaaaaaaaaaaaattcagctgttaaacacagccattattgaaagttaaataaatcatatagctttacaaataaattacattaaaaacagaagtcataaatactcaagacgcatcacttcctagtcgccacattttatttcttggttcttgatgttattatttcaagggtatcagataaccggtgattagtactatcttttggaaaacccagctcagtggttttccaactgaaactccctctcgcttattcgcaggagtcagcttaagtagagctccgcgtgttggttgcagaagtcgcctgtcttccccgcaggaggctgtttgctcgctttgacactgaatgctcccccaacaaacacgtttagcttgcttgcccttctcaccgactgcggagaggagtctcagagtgcacagtcgcagagaaggcgtgcgggggcgtgcaggggcgcacaggcgcctgcctctgcgggtgggaaaggaaggaggtgcccgggtttccgctcccagggctcagcctgccttgggcacctacggtatgggagcctttaacgtggaaaggaaaggagatcgatcactcgagcctccacttgccaagcctgtggaagcgagacgcggggatcggctgggaatgcctggaagcgccggcgcgcggagccaggtgggaggtgcgaggtggccgcgcggggatcttgggtgacagggcaccgagggaaggaggacgcgagggcagccaggccctagggagcagggagagtggctcgggctcagtcgcgtggccccaggtgcgcgtcccaggtgcgcggccttgacccagcagcgtcc

SEQ ID NO: 13492 - DNA, 2300 bp, Homo sapien
gtcaatcttcaaatgtcatcttttcagtgaggacttcccttaccactctttcaaattgtaacctcaaccctaagatgtttctggctttacttgtcttcaatttcaccacatagtttactttttatatttctctatctccttccaccagaatgtatccttcatgaggagttcccctccctcccatgaagaatttcctcccattcctcattgttcactgccacatattttcagcatctaaaatgctgcctggaatgaggtaggcagtcaatacattcttgttaatgaactccctatttatgtccttattctctttagtttgctcatttatgcactcattcagtgtatatttatcaataattacacaacgctagccactgctgcaggcagcagcgattttatagtaaaggcaacaagcacaaccgcctgatgttaagaagcttgcattctaggtcattcatggtgggctggaacacgctggtgtcagtgcttcagggctgattgttaaactttcaggtgttaggctgggcatggtggctcacgcctataatcccagcactttgggaggctgaggcgggcggatcacgaggtcaggagatcgagatcatcctggctaacacggcgaaaacccatctctacgaaaaatacaaaaaattagctgggtgtggtggcgggtgcctgtagtcccagctactcaggaggctgaggcaggagaatggagtgaaccctggaggtggagcttggagtaagctgagatcgcgcccctgcactccagcctgggtgacagagcgagactccatctcaaaaaaaaaaaaaaaaaaaaaaaaaaattcagctgttaaacacagccattattgaaagttaaataaatcatatagctttacaaataaattacattaaaaacagaagtcataaatactcaagacgcatcacttcctagtcgccacattttatttcttggttcttgatgttattatttcaagggtatcagataaccggtgattagtactatcttttggaaaacccagctcagtggttttccaactgaaactccctctcgcttattcgcaggagtcagcttaagtagagctccgcgtgttggttgcagaagtcgcctgtcttccccgcaggaggctgtttgctcgctttgacactgaatgctcccccaacaaacacgtttagcttgcttgcccttctcaccgactgcggagaggagtctcagagtgcacagtcgcagagaaggcgtgcgggggcgtgcaggggcgcacaggcgcctgcctctgcgggtgggaaaggaaggaggtgcccgggtttccgctcccagggctcagcctgccttgggcacctacggtatgggagcctttaacgtggaaaggaaaggagatcgatcactcgagcctccacttgccaagcctgtggaagcgagacgcggggatcggctgggaatgcctggaagcgccggcgcgcggagccaggtgggaggtgcgaggtggccgcgcggggatcttgggtgacagggcaccgagggaaggaggacgcgagggcagccaggccctagggagcagggagagtggctcgggctcagtcgcgtggccccaggtgcgcgtcccaggtgcgcggccttgacccagcagcgtccgccgtgctggccggggcctcggctccgcagcagaagccgcggtggtggcagccggcgcgggcgcagctgcccgcggctggggcgtttcatctgcgccggcctatggtgcgggcatcgccctgggccacgcgctgatcgtctccatctcactcagaaaaagttactcatacagtggtcttgtaaagggtctgaagtggtcaaattgtccctttttagaaacggatagttttaggtcttaaagatgtcctagaaattacccttacaagcccagctctgtcattttatagtaagggacactaagatcgcgtacagagcttgtcggaggggcttggtcttctgtctcacgctcagggttgtctcctcgttacaggagaccttgctcttaaacgtttcagagttcgcttttccccttgctgaattcataaaaatgtttttaatttatatgtgtttcttcttgtaggaagaagaaattgtcgagacgaataacatgaggtcatatagaatcccacttttggtgatttcaagtcaagaaagtaaaagtaaaccattgctatctttcaccttaaatatcctgtgttttattgctcagaacatccagtttttctaatactcatgatgtcagaagggaaacctcctgacaaaaaaaggcctcgtagaagcttat

SEQ ID NO: 13493 - DNA, 2300 bp, Homo sapien
caataacaccaaacatacagcgtagtcaagggcatcagggtctgagaagaggttataaaactagttctacggactgaattgtgttcctccaaaatgctaatgttgaaaccctaacccctggtatggctacatttggagattttaggaggtaattaaagttaaataaggtagtaagagtggggctctaatctgataggattagcgtccttacaagaagagacatcaagagatcccagagagcatgttatataccctccccgcactgtgtgaggacatggtgagatggcagccatctgcaaatccggcagagagccctcacctgtctgcctgccacaagttaggcagatccctaccttgccaacacctggatcttggacttcctatactccagaattgtgagaaattaatgtctgctctttaagccatcaacctgtggtattttgttatggcagcctgagcagactaatacaaccagatatctgggaaatgccataaaatttagtgttaagacaataataaatctggaaatagagtttttccacttttcagttgtatggtcacatattagaattgcagatcctaagaaaacctgtacagaaaaacccaaatcacagagtcatttaagtgtaaagaaaaagccaattattgcttaaagagtatttgtagaaaatatccgttgaatatagaggaataacagcatattcataaaaattttttaaaaagtgtgcacgacagtgattttaacacttctaatccaatggaactaacattttaaagtacaattatggccaggcacggtgcctcatgcccatagtcccggctacttgagaggctaaggcacgtggatcacttgagcccaggaggtggaggcagcagtgagccctgatcatgccactgcacttcagcccaggtgatggtgtgagaccctgactctaaaaaatacaattatggttacggttcttgggcagagtggaattcaaacaggttaacctgaaagatcagtagggttctaaatccaggataaattattttcagaaaaagaataactttttgaatctttatttaaattgttaaatgttcctgtgagtaacactcatcagcgtgattgtgactggtatggctgcatggaagcttccctgtggcattaatcataaaatgctggattggggtttgattcttcaaggtataagaaggacctagtctcaagtaatagattcaccaaaatgtaacaccactagccccctcccaccaaaatctgctccagtcagaattaccgtaagagctcagaagtgacctgtgcttggcggcaccggcccactttcccagtgccggttcctcgcatcctgggcgcagacggggtgaccgcctgacccctggacccgagtcacctttccctgccctgagctcctccttgagagcttcaaaacaatgctcgcccaggccggagggcgaagtcggcccatgtgtaagtcaagggaactgtcccaggactgcagcccggccagaagacgccccgcgccgccgtcccaggcagccaccgctgccgccgtggcccccgcaggccgccgtaggcccccgcgggccgcctgacccctgcgggccgccgtagaaggaccctccagaggccgcgctcttgagatggccgtcgggctccgctccccgcggcgccccggctgagggcccgccagcgggcacctggcgccaccgctgcgttccggcactagcacgggacacggtcagggagcggcgggccgcggccttgcgcgcgccgtctctcggggcggggcaccgggccccttccggggatgggccccggcgcccgcgtcggcctggctgtgcccggcccctccccgctcgggcgggcgctgcgccgtatccccgcccgtcagtccgcccggctcggctggccgcagaaagggcctgggcggccgcactgagagctttacgcccggaggcgtcggcgctgccactggcccgcgacgggaacggggcgaaaaggcggcggcaccatgttctccctcaagccgcccaaacccaccttcaggtcctacctcctgccaccgccccaggtaaacaacccctccccgcgagcgcccgactctcctctgcgcttccgtggagcctccaggccgacccccgggaactggaggaccccaggaggctgcgcgcgtctccctgcccacagcagcgcggctgcctgattcccggcgccgcgaaatgcgccttctcgggagcccccactggctcggcgaaaacttgtaaaactcttctgcagccattctctgcccgaagttctgtcg

SEQ ID NO: 13494 - DNA, 2300 bp, Homo sapien
aggagactcacttgaacccgggaggcggaggttgcaatgagccgtgattgcgccactgcagtccagcctgggtgacagagcaagactccgcctcaaaaaaaccaaaacaaaacaaacaacaaacaaaaacagaaaaatgggtgaagcaggacaaaacagtgacattagagccaaaagcagggggtaggcaataacaccaaacatacagcgtagtcaagggcatcagggtctgagaagaggttataaaactagttctacggactgaattgtgttcctccaaaatgctaatgttgaaaccctaacccctggtatggctacatttggagattttaggaggtaattaaagttaaataaggtagtaagagtggggctctaatctgataggattagcgtccttacaagaagagacatcaagagatcccagagagcatgttatataccctccccgcactgtgtgaggacatggtgagatggcagccatctgcaaatccggcagagagccctcacctgtctgcctgccacaagttaggcagatccctaccttgccaacacctggatcttggacttcctatactccagaattgtgagaaattaatgtctgctctttaagccatcaacctgtggtattttgttatggcagcctgagcagactaatacaaccagatatctgggaaatgccataaaatttagtgttaagacaataataaatctggaaatagagtttttccacttttcagttgtatggtcacatattagaattgcagatcctaagaaaacctgtacagaaaaacccaaatcacagagtcatttaagtgtaaagaaaaagccaattattgcttaaagagtatttgtagaaaatatccgttgaatatagaggaataacagcatattcataaaaattttttaaaaagtgtgcacgacagtgattttaacacttctaatccaatggaactaacattttaaagtacaattatggccaggcacggtgcctcatgcccatagtcccggctacttgagaggctaaggcacgtggatcacttgagcccaggaggtggaggcagcagtgagccctgatcatgccactgcacttcagcccaggtgatggtgtgagaccctgactctaaaaaatacaattatggttacggttcttgggcagagtggaattcaaacaggttaacctgaaagatcagtagggttctaaatccaggataaattattttcagaaaaagaataactttttgaatctttatttaaattgttaaatgttcctgtgagtaacactcatcagcgtgattgtgactggtatggctgcatggaagcttccctgtggcattaatcataaaatgctggattggggtttgattcttcaaggtataagaaggacctagtctcaagtaatagattcaccaaaatgtaacaccactagccccctcccaccaaaatctgctccagtcagaattaccgtaagagctcagaagtgacctgtgcttggcggcaccggcccactttcccagtgccggttcctcgcatcctgggcgcagacggggtgaccgcctgacccctggacccgagtcacctttccctgccctgagctcctccttgagagcttcaaaacaatgctcgcccaggccggagggcgaagtcggcccatgtgtaagtcaagggaactgtcccaggactgcagcccggccagaagacgccccgcgccgccgtcccaggcagccaccgctgccgccgtggcccccgcaggccgccgtaggcccccgcgggccgcctgacccctgcgggccgccgtagaaggaccctccagaggccgcgctcttgagatggccgtcgggctccgctccccgcggcgccccggctgagggcccgccagcgggcacctggcgccaccgctgcgttccggcactagcacgggacacggtcagggagcggcgggccgcggccttgcgcgcgccgtctctcggggcggggcaccgggccccttccggggatgggccccggcgcccgcgtcggcctggctgtgcccggcccctccccgctcgggcgggcgctgcgccgtatccccgcccgtcagtccgcccggctcggctggccgcagaaagggcctgggcggccgcactgagagctttacgcccggaggcgtcggcgctgccactggcccgcgacgggaacggggcgaaaaggcggcggcaccatgttctccctcaagccgcccaaacccaccttcaggtcctacctcctgccaccgccccaggtaaacaacccctccccgcgagcgcccgactctcctctgcgct

SEQ ID NO: 13495 - DNA, 2300 bp, Homo sapien
tttttttttttttggatacagagtctcactctgtcacccaggctggagtgcagtggtgtgatctcagctcactgcaacttccgcctccagggttcaagtgattctcctgcctcagcctcccgagtagctgggattacaggcacccaccaccatggccggttattttttatatttttagtagagatgaggtttcaccatgttggccaggctggtctcgaactcctgacctcaggtgatccacctgcctcagcctcccaaagtgctggaattgcaggcgtgagctgggccaatttaaaattttctagtagtcagttttgaaaagtaaatagaagcaggtgaaaaaaattaataacattctattcaacccaacatgttctaaatatttcaatgtgcaatcgattattatcacaagtcttggcaatcccgtgtatattttacattcggagcatatctcaattctgactggctctgtttccagcactccatagccacgcgtggcctgtggccactgtgtgagacatctcagctcccagttgcaggccacactgcatggaccctggggaggaggggtgttctcttggggaaggatggggctcccattgtttccatcttatctgaacctgaaaaagagcttatttgtctagtgaagggcccactgcctggagagccactgactggcagccggtcgggctggccattggtgctgaccacagagcctccacacctcccagccatggcagtgccggccatcagctcacttccccatgtggtctttccccactgctcccagactgatttcagatgccccggattgccctgactgtgccttcagaattccggccacgtagcaccctccctcagcccccggaagggttcccgctgaagccgtgactctctcaggcctcaggagccaacaccagttcaagaaagaagactcgggagccaggccagggaggctgctgcggtcattgtgcgcccaggggctgtgcgcgctccagcaaagcacgtgggagccactcaccagaccctttgcacgcccactctgcggtgacagaccctgagagaaacgaatgaaagcaaagacagacccagaaaatggcctggcacatgtgcttccgtcagaagttcagagattccctgagccccaggctgtctgccaggcattgggtgggggagtgagcccagcctccagcttcaggactctacatatgggcagaacttgacaacctgggcactcccactccaccccacctgctctctgggcaagccaccctctcacatgactcagagtcctcatctgtaaaatgggaacacccctaattgcccttacgtccaatctgtctgctcctctgtgagaagcgggaggcggacaatgcccaagagcctcagatgctggggaagacccagcccctctgcagagagggatagttcagggtttgggttttttctttcctcctgggctgagaaagctcatggaaagctggaataaccacgcatactgttacagcaaatccaacagagctcccaccgtggtggttttcaggtgactgtggatgccaagcaggcaagctcctggtgaaggggggagagcagggattagaagcactcagaaggggctgagagtcatgtggggctcacactgcatttgcagctgggttcaccctgacctcaggcccaacttagatgaggaaggattagcagtaattagtgccatgtgccgccttctcccagctccccggggcacgaacactgcccagctgatgaggggattctgaaagaaccattatgtccaattgtctcaattatgcaaaccctgctgacatttccagccagggaagggcggctgggtgggagggggccatggcggggccacttcaaaggaaaagctctagctcccctacctctctcacatcctaaggctgcctttgtgggattccacacagaacagcctggaagcttggggccctggcttccttttctggcctgggagtcaggtcatggggccatcgcttcacagcaatcatgagggcccaggcccaagtgctcacatgctcctcatggggactgctcctcttaaagggtgggccctcctcacccagctccctgccctggccaaggaggaggctgaaagagcctgagctgtgccctctccattccactgctgtggcaggtaagctcagatgcgggtaagcacaggtgaagggaggtcaggtgcaggtatcctcaggtgtgggtaaactcaagcgtggacaaactcaggtgcagataaccacagatgcagttaagctcaggtgttggta

SEQ ID NO: 13496 - DNA, 2300 bp, Homo sapien
gtcaaaattctttgggacccacattcttggaaaactcttaggggggtgcatcaatgcagaggacccttgaccacgtagggcatcccctcacccaaggcaggcctgttttgttcatggctgtagtagcctaatactagaatagtgcagactctagacggcctaccattgtgtatgccggctggggtgacccagtggggagacgtggcaccttgaagattggggagaattctgctggctggaaaggggccaggagggtatgggtggctgataagctggtgtaggaccactccttccttaagaagtgactaattgtgacatgtggtgggaatagaggaacattccgaatcattacttggtcaggacacacgtctcttattaaatgtcatcaacacaatctgcctggaagaaacacgattactttctaccaagcacagaccctcctaaagggaccagacccagtccagcacctttagtctccccagagggtagcaactcaatcagcgagaccgcatttcagggttttagttacagatactgagggtgctcaaacatccatgcagtttgctgttcaccgtaacacgcaacccagaatggccgtttcggtccctcgtcggttacctgaaaaccagtcttactgagctccaaccccaaattaatttggtgagaactcgaactcggctattaaccttaattctgagagaagaatgacacccccctcccactgcgagggtccactgagggtgagtgcccgggctccttcattctccaggctcctctcagaacacagcaagggtggctgactccttcgaacgtccattaagcacaatgcaacggggcgaggcagtagggggtttgctgagcccggttccgcggcggtgggaagttattcaccggcgtctccgaggacggcccaggcctggagaatggctggggccgcgggctggggtaggggttaccgtgagagtcaagggcaaggtggcccagcccgggctgggaggcgcgggctgggcgcagccgagcatttcctccgggaggcccagacagcgggcgggtggggcgcggtgggcggggtcctcgcagctggtggcgtttgaagcccccccgaccgcggtgggagaggggcagcctagaagagttggcagcgggcctgcggcgggatggggaggaaggggccccgcgttccctcagcagcggcgccggccgccctggcacgtagttcgcttctggaggcacaggccgcggtgggcgcgccacccgggctgccaggctcaccgccagccgaggccagtcctgctcgggctgacccgagctgaagggcagcgcggccgcaccccggaccccaggaacgagcccgagtctgtccctcccgcgggagctgccccgcccggactcccggagctctgcaaggcaggggcgtggggagggcgagcggcctgaggctctaggcgcggccacccggcaagccggcggcggagggcgcggcgcgagtgcgttccgcccctaggcagccccgcgcccggccgggcagacacgcctccccgccggcgcccatcgcgggaggaacaaatggcgccctccagaaaccgctcccctccatgccgggggccaaggctgtcaccacataaaagctccggcagagaagtgctcgctgtgtccccgccgcggggggtacaagcagccgctccgcgccgcgactacccggcccgccgcccccggacgtcatgcgtcagcgcgccccgctccagtttccgcccctcctcccaccggcccaggggacacgcccactggcgcgcgcagggcccgggaccgggcacgcccctctaacggctcggattggcctggccgtgcactcacggaccaatggcgtctgtcccggccctcggtcacgcccccttgcccaggcgcgggcacgcgaccgctccgttccgccggtgcgcgctctggggtccccgccccctccgcgcgcgcagctccccgcagccgccgccgcctgtaacctgcgccgccaggatgtggctgggggctgacgtcgggtccagatgtggccccggccccgcccacccccggggccgggccgcccacacggagccgcggcgcgcacggcagctgtcccgcctgccacaatgcgcggcgaagctgcggccgcgacttggcgaggtggtccctaacgttgccgctcggcatccttagaaccggccgcccctgacgccgcgcggggaccccagtcgcccgcgcgccccatgcgctcactcttcggtgcccggccgggccggcgcctcgcagacgcggagccgcgcggg

SEQ ID NO: 13497 - DNA, 2300 bp, Homo sapien
aattcctattagttgaaggtggatttactgaatcaggcttctgtgtcccttatctctgtgttcggcattatccctgtgtttattttccttcttttcttctggtctgctccctgagctgaaacaggcttccttactcaaatctcattcatcccctaagacccagaccacaggtcatgtctggtgggagcctttctggccatccctgtccccaaacagtgttcatggcactcttggccatggcattttgtcctgacccttactaggctgttgagtcaggaaaggatgtacattctcaactgcatggggcttctctatggggtggagggctgtggggactatggcgggggtggataatgtgggggagtgtgggggggctgtgtggggctgagggggctgtgagggtctctggggaactctgtagggctgagggggttgtgtgggcctctgggggtgctctgtggtcctgtgggggggctgggtatagggctgaggaggctgtgggggtgggtgctgggtgttgggctgtggggggctgaagggggctgggtgtggaactgtgtaggctgtgtggggctgtgggtgtcggggttgtggggctgtgcggggctgagtgcggggacctgggtgtggggtctgtgggggctgggtttgtggggctgtagggctgtggaggggggatctctgttggggggctgtgctccaaatttccaaaactccacgttttggaaattcagtggagtctgctcgccgcattttaacaatgggggccctgcaccggcccaagacaagggtcagctcggggctgggccaggagccccatctggggccccacacccatttctgggattgccccccaccccgcccccgcccccgcccccgacgcttccgggaggtctaggcggctgccgtgggccggtccgaaacggctctaggtgcactgttggggggctgtgtgggggctctgtaggggggctgtggggggctgtgtggggctgtgtgggctgggtgttactgcgctcctcaggcagtcaggagccctcgaggagtccgcggagttgggttgggggaggcggagcccggcgggaggcgcttcccgggcttcccaggctctagtaagttcctggaattcgtgaactgccggcccgggggaggatctgtgaaggccccgggaaggcagaggattcctgcgcggactgccgcgttcggagggcagccgggacggctgggccggaggcgggggagccctcggctgggcgggcgccgagcccggccgggccattcactgcctccgaagcgagcggccagacccgccagctgcccactcgcccccgacccccgggtcgcggtctccatccccctcggaccccggccagccccaggccctcgcggccgccgcagtacgtcgtctccacttcgcagcgccctctgcccactgcgattcccccagcccacggcgagctcagatgacacaaggatgatgctgtggtccgggagagaacgataaggattgtcactgtgctttgcactctgtcattctaagtttcttctcctcacgtgagctcatgtaccgcgggcagcgactatcagtgagactggggtagacgccacctctttggccgcgggctggggcgccgagtcacgggtcgcggggacggggcggcggtgctgagcctcgagccgcccaggccacgcccctcctgatgtggccccgccctgctctcccagctctcacccgcgtccttttcccccgggtcccctgcgctcctcaggaccctgacggcgcatcctgggtcctctacgcgcgcgactgtcccgcccctgaaggggcctgcagggtgtccacgggactcggctcttcctccctgacccctcaggcctgtcctgggggtccgccctagaaatagctcggaggaaggagccagtgacttgggtgacgttttggaaattcagtagagtctgctcgcggtattttaacaatgggggtcctgcaccggcccaagacaagggtcagctcggggctgggccaggagccccatctggggccccacacccatttctgtgattgccccccaccccgcccccgcccccgcccccgcccgcgacgcttccgggaggtctaggcggctgccgtgagccggtccgaaacggctctaggtgcactgtccggctccagccaggtccgctacgcctggagagcatggaggcaagttctgccggctccacctgcaaagcagagcccctttccacgactgtgcagcaccgctcgctccagccccaccatacccgcctggacggagacc

SEQ ID NO: 13498 - DNA, 2300 bp, Homo sapien
gcttccagtgagccgagatcgcgccactgcactccagcctgggcgacagagcaagactctgtctcaaaaaaaaaaagaaaaaggaaaaggaaaaaacagctctgtgctgtgcaagtaatcctcactgaaatagatgtgcttgctaaaacgaggaaagctgagacagcccctggccaggcccgggcatgggagttgctggtcagctggtaagcggggacctgtagggcccaggaagacagagtacatgcctcaggcaattggccaaggccaagatccagcctcctgtgacaaaaagccaagccttcggcctcagtctgagagtaaggagatcacatgctcttgttctctgatctgtcccccaggtggcagtgacgaaagaagagactctcccggccgaggccccagtgcatggagagaaggaagaaatcaatttcctaattggtaccatatacatcaggtcaaataattttcttcttttctggccgcatcaactaaaaattgtacccaataggagctgtgtgcaagacggggtggtcacagtgaatgtctctgagggtacagacctccctgcctgagaccctcagtcctcagggtcttgcacgttaggtgagctcatttcctgcattcctacagaaaatcaggagggctcagagaggtgaagcccatgtcacagctggacaggggcagggccagggtcaaatcaggctatgtgcctggctctaaagcatgggccactgacacaggacctactccaccaagcagcacccatcccagtgggttactgtgaaagaaagaacagaggacagtcatcaatagcatgggattcaaactcaccccacaatatgtaaaattaattacatacttcctagcataaaattttccattgcctgtaatggggtctgcaagctttttccataaagttccaggaagtacatcttttcaattttgtggaccttaagggtctctgttttaactactcaactcagccaggtgcaaaagcagccacagacgctatgcaaatgagtgggtatggctgtgttcccataaaacttcatttacaaaaatgggtggcagaccacatgtggcccatggtctataacttgcagacctcttatctacacaaacacaaggatgcatttgcactccaccggcaaagattgagcacccactggggccccagcaccattcactagtgtaagttactctcacttgtaatgtcacagttgcttttccccagcagtcagctgctacagtcagcctgggtcaagctgctgtacatccattctatttctctggctgggatcatgctgcctgggaaatctgacattcttaagaatgttgttggattgatggcagctcttagagggatggtagatagttcagtagccatcttcagcaagtgtggtatttccgtcaactgtggattaaccttggctattagtctttcctaatagccaagtaaggggtgagagctgagggggtaggatggcacactgataaaggcataattggaatagagtgggtaacattcatcacattgtggaagtattacaagtctatacaattcggaagaggattagaaatctagcaactccaactgaatttttctaggtatacttaggtgtttgaaattttaaaatagtcttttttcctcatcagttattggaattaataaaatgtaagttcaggagtgctggagatagtgatgaccccttgccttagtctatctgggctgctatgtcaaaatacaatagcttgggaggcttatgaacaacagaaatgtattccacacagtactaaaggctgggaagtctaagatcagggaaccagcagatttggtgtctagtaagggcccatttcctgcttcatagatggcactgtctttctccatcaccttggagattagatatcaacatatgaattttgggagggaacacaaacatttggctcataataccccttctctcacatggcatgtacacagggatgaaattttagttagcattctataatataatgtcttgcatgaagaatcaggcagttggaccaaaccaattctaaaaaatatgacagcaggtggaaatggctccaccctcgagggttctctcgctcaggtctctgcatgtagttgtcacttgcagctccatttccatcacgtggtaaaatgccctttctcttctttcctgcagatggatggtttctagtgtgcttccaaaccccacctcggctgagtgttgggcagcacttctacatgatcctatgactcttgatatggacgcagtcctgtcagactttgttcg

SEQ ID NO: 13499 - DNA, 2300 bp, Homo sapien
accggcataccaaaataaattaaagacattacaaaaaagaaaactatagccaaatatttctcatgaacatagatgcaaaagtcttcaacaaaatattagcatattgaatacaatggtgtataaaaacaattatataccatgcccaagtagaatttgacccaagtatgcaagaccggttccttgaaaatcaattgaaaatcaatgtaacccatcatatcaacaagctaaagaaaataaaatcacatgaccgtatcaatagatgcagaaaacgaatttggcaaaatccaacattcattcatgataaaaactctgcaaactaggaatagagagaacttcctaatcttgataaagaagaactaaaaaaatcctactgctaacatcatatttagtggtaagaaactggatacttcccctaaattcaggacaggactgttaagagaatgaaaagacaagcttccactggaagaaaatacctgcaaaacacgtatcagataaagtacttctatccaaaatacacaaagaactcttaaaactcaaccataagaaaacaaccttttttttttaatgggcaaaagatgtgaacaaacatctcaccaaagaagatatacaggtgcatatgaaaagttgctccacataatttttcagtagaaaattgaaaattaacaacgatatagcactatatgcctactagaatgtctaaaattatagatgatagacggatggatggatggatggacagatagatagataaagatagccaatatcaagtgctggtgaggatgaaggaaagggattcatatttgctgacagttataaaaatgctatagccactctagaaaactgtttggttcttataaagttaaacaaatttaccataagatctagcaattgcactcctagatatttagtcaactaatttaaaaaatttgtccgtacaaaacgctgcatgcaaatgtttatagaatgtttattcacagtcgccaaaaactggaaaccacgcaaatattctccagtgggtgactaaacaaaatgtggtacaaataatgagactcccctcaacaataaaaaggactattactatacacaataacatggatgaatctccaaggtataatgatgagggaataaagtcagtttcaaaatgttacatattgcgtaattccatgtatacgacacactcacaaagacaaaaccgtagcaatggagaacctatcagtggttaccaaaagttagggttggcgggggcgctgttataaaagggcagaactagggagctctttattgcgctagtggttacatgaatccaaacaagggttcaagatcacaggattatatatcaaataaccaattttactgaatatcaattttaaaagtcaaataaattattaaacactattaaacatatacaatgtttaaagtcaagcaaaaagtcctaaactaaaagtaaaataatgattgtttagaagtacaccaggatggtatgggtcatctgcaatataacgtcctgtttgggataaggaagcgtgactacatctacagggtgacgtgagaagggcccagagcagcgagcaggtcttgccatcagggaggggaaccatctgaaggggtggcgtgaaaaagtctttagaggaaggcaaaaaatgggaaaaggtcagagaacctttttgggaggtaaaaggaccagctttggattaggcgtgatgcacaggccccagcgcagggcgtagaaactgcagcctggacagcctgggtgggagaaagtttgggatgtttaggaaggaagggtgcgccagccagggggaagaaacgagacaggtggccgcagatggcgcgagtcaggcagcaggaaaaggcaggctgtttaagcagccttttcctgcagtccaggcggagagcgcagaaggagcaccccgaggggcaagcatgggagagccggagcgggctcgcgggcgcgcgggcgctgtacgtcccctcctcggctcgcggccgcgagcacgcgctctccgtgcccggccccggaggggcgggggcggggcacaggcgcggcgcgcgcacgtccgcgcggggcgggggcggggcgcgaacgcgaccggtgacgtcagaggagggcgcgcgcccggaggcagcaggcggagccgggaggcgggcgttgtgcgcggccgcgggcggagcggaggggcgcgaggggcggagcggagcgcgggaggaggcgggggaggagaggccaccgggaccgcgagcggcagctggggagggggccgcggagcccgagcgggagcaaaacagctgatctggttttc

SEQ ID NO: 13500 - DNA, 2300 bp, Homo sapien
tatacagtcccgtcagctctattccaagaatgttctgctcttttcttcgtttcacaaatgaaaaacctgagtcccatagatgggagtcaatacagccaaactcacagacctacctatggcacaggggagactgaagtttattttccaacttccagcagtcctacattgtaagctgagtgagtggactgcgcttgcaggtcctccaggtgcctagcgagaacagaggacaaataaatatttacgaattgcttgtctcacctgaaaatggtttatttctaggtttctgatattatggggtgcaatggcggtaaagaagcagttctggtttcaggaatgtgatcctgatagccatactccagaaaaaatcaataaattcccttggccccatgggctcatgctcttctagaagggaagacagggctcttaggtactttcagcgctcgtagaagagtgttgttacagtcccatgaccagtgcaggggatgtgccactgagaatcttttcactgatgcttcatgggctttctctattctgctactgggttttatttcccttcttctaattctccctttaccaacaactaatcccctgtagataattaattcatcaagtgcctgctctgtgatgtccggactgctagaagtggtagggggactcaagagccagatgaagctaagggcacgcctgtctgctctccagggacccctggcgtccctttctcctggcagaatgactgctatcctttgaggtgaatccagttcagctgtcacctcttctattaaccactctccaaaaacagctaatccttcttctaggctcttaccgcagttatgaaagcctatgctgaccctttgtttaaacatgtgtacattaacagtaatacatttaagacacttcatggcaagggcaatatactgcgttattcttccaaatcaaatagttgggctcagtcccccattcctgctactggggtacagtcaagctcagtcaccttttggtgagcctttccctagttcttggagtcttaaaagaatcccgtggttttcggcagttcagaaacccaggcattgccgctgcgtggtccacgggagttgctctggtggagctcggatgcccgggggctgcaggaaagaaggtggcagcgccccctacgcggacgcagggcgctgctgtgctcagcagaagggagcaaatgggatggagcttcagccaccctggaagccgccccttggcgccttcctccctcccttcctctttccaaaatcaagccccctcttcaacatcaagaactctccgcactccctggacctctcagagcctctcctcatttactctttccaatgcgctggctcaaaagagcctagataagaacaccaagttctggctgtccttccagcaaagagttaggagttaacttttcaatcttttttaatctcctttaaaaaagaatgagccatacattagggtaaccactgggaatcccatcacacacattggcggcatctctcctccccgacagggtgcctccagcacttcagatcccagccgagagtctggctgctggcgcccagcaaacggtgcggaaagcaaaccggggctcgcggaaagcgggaggaggggggcttcctcgggtctgttttgtctggttggcaagacttccgaagcctggttccctatagctgccacccggtcgctggcgtggaggagggagtccgggaagactggaccccagaattgtcccggctttctcccgagtgcccagcgcagcttctggctgagagcgggagcgggctgagtggggacaaagaacgcaagggagaggtagagcctggccttgggcagcccctggcctggccagaggcgcgaggccgagagcccgctcggtggagactgggggtggaggtgcccggagcgtacccagcgccgggagtacctcccgctcacacctcgggctgcagttccctgggtggccgccgagacgctggcccgggctggagggatgggggggcggggacgggggcgggggcggggctcgtcacgtggagaggcgcgcgggggcgggcggggcgggggcgcgcgcccggctccttaaaggcgcgcgagccgagcggcgaggtgcctctgtggccgcaggcgcaggcccgggcgacagccgagacgtggagcgcgccggctcgctgcagctccgggactcaacatgcgctgctcgccgggaggcgtctggctggcgctggccgcgtcgctcctgcacggtaaagccactgcctccccgccctccactcctccgtgggatcccgggc

SEQ ID NO: 13501 - DNA, 2300 bp, Homo sapien
gaatcccccttcctcccctcctccaggcatcccccgccccaagacagagaccttactccagaagccggggactgcagtgctgcagcagccgcggctcctggccggcatggagcctctcttcagaagggcagcagctcgcttgtcacagaccctggacggcagaaaagctgattcagggatttccgggcggctcctcctgtgggggagtgtgcatctgcatacctgggtgttgggaagggtgtgtgcgtgtgttcatgtgtgggctgggggagaggacccatgcctgagaccctctagtcaggtctgctgatccctcactgttcttcagatggaaagggggagctggggtaaagggctcaaggtcagatgctcagcaggagggcaccaggggtttccccccactctgctacactccggtaacctacccccaccacgtcgccccacactgaggaggggacctgtcacctgagatgggtgtgtgggctgaagagcagtacctgctgctcctcttcggtttctccctggggagagaagtgcttctgttttgaaatctcccccaaaccttcttttgctagaaggagggaggatgggactgaaatttcattcagcaggctggattcaggtttgactttggggtttcctgatgctaagggtctggggcagcatcctgcttgacagggaaagcttatgccttcacgattggaatgtagtgctgcttagatgaaaagggatggatgaaatgacccccatggttccttctgataaaatggaccaagagacgcctgaaccttatacaaagctgcctccagtaaaacaaaatctagttacagaaaataaagcacttctgtaaggttatgtctgctccttctgaaaataccgtgtttaatgtctgtgctgcctccaatgtgtcctttcccctcttgggtggaagtggaattctgatggcctgtggaaggattgggtgacacttgcacaggcagtggctgggccaaaatgggggaggatgggaacacggtgggtccctagagaaaacacagctgtgcttcacccaaagccccttcaggccccagaggacccttcccctgatagggatgacaatgacagcctgacagtcttaatttcacttgattcttatcaactttcccaggaggcagcaaggcgaggaagggataattcttcactccactgaggcacagggagcccccaaagggtggatgactcacccaaggttctcaggtaggttcctaccttaccctggggttttatgtttctattctcaacactaacgtttctcattcctccacaagttaaattgctcactccagccaactgaagcatgcttttcttgacacagttagctcgaggcacacggttggtgtttaaaaaaaaaaaaaaaagagcgttatgtcaatttcattgatcaacaaaagtgatggctccactgcaaattcaagttgatagtgcctgggcctcttgagttcaagagccttctagacaaagggctctgagctgaaacatgagcatgcacacatatgcctgtcgctgggtctgatgagataatttgcatacttggttgttatccctgagcattttcctgcctcaatgcacgtgtagccaacacaataataatcatagctgataaaggctaaagctgaggactttcctgagccaggcagtggctttaaaacctttaaagtggcttttaaaactttaacagctaaagctgaggactttcctgagccaggcagtggctttaaaaactttaaagttttcacatagactctcactaaataatttctgtttttcagatcaacaaactgagactatcacatttgggattaagttaaaaaaagaaagaaagaaagaaactgaggcttaaatacttgcttaaagcaagtatttcacagccagcaagtggctaagttggaacttgagcccaggcagtctagccccgggatcctgtgcccggcagaaaggtgctgggtcaagggaggagggggcagtcgggagcgcgcgcacgctctggacttgtgcacccgcggaaaagggtgcgccgagggggtaggggcgacggggacggaggcggggtaggggcagccttttcccaggcggtagcgggggcggtggttctgttgtcctgttgcccttttaagctgcggcttgacaggggccgcgcctcctgtcggtggagtcggctacaaagggagcagccccccaggccgccacacagctcccgccaagacctggtgccccttgccattttccagccgcgctcccaggagagtggaggctgcaggaag

SEQ ID NO: 13502 - DNA, 2300 bp, Homo sapien
ctactcagtttcttaaaaatgttttttggagataggatcttgctctgtcgctaggctggaggacagtgggcgagatcaccactcactgtagcctcaacttcttgggctcaaagtgatcctccaatgtcagcctgtcgagtagctaggactataggtacgtgccaccaccaagcccagctatttttaaaattttagtgtagagatcaggtctcactatgttgcccaagctggtctcgaactcctgggctcaagctatcctcttgccttggcctcccaaagtgctgggattacagacatgggccactgtccccagtcccacgttatatttctatgagacagctctggtctggactgtgcctccctccctggaccttggtcccatagggctggtcagcatctcccccaggccaacatggccacctgcatccccagtgctacaggagccccctgcccctatgaggcggtgcatgcacgttgttgatcatgacgtgcatgatggtcttgggcatgacaccaaccatgaggtcccacacggtcttgttgacaatggccatgtaggagtccacaaggttctgggtggtttccatttgccgctccagctatgggtccatggagtgcatgaagctgtcggagccattctcctcagccttgctgtcctgtcatggagaacacagtggcatcagggtggccaggccatgcagccaggctccaggaatccctaggatctcagcacctccaagggtacctggaacattgaggcacagagaaaaacaactggcgtgaacatgcaccgagctccccacacgctctagacggtttcaggtatctgcctctcaggaccccagactcccctgattcagtctcctcttagttctgactctagtgcccagaatctgcctcaagttaccaatccagaaattggaaaaaaacatctccaggtcccctgttggagacctggccagagcttgtgccaggctgcagacgcctggcagggggcaagaaaggggcatactcactttccccttgtcctgggaggcccatgcaccaacactgccaccgccgccgccaccagggaacacggcaaagtagacacacacacagaggaaaacgggaagggttgagtgaacctgggacactgcaccccaactttaatgtgttgtagaattcagttagctaatattttattgaggatttttgcatcaatattcatcagtgatattggcctgtagttttcttttttggtctgtgtgtttgattttgttatcagggtaatgctagccctgtagaatgagtttgcaagtattccctccttctctatttttggaatcgtttgggtaaggttggtattagttcttctttaaatgtttgctagaattcagcagtgaatcatcaggtcccaggcttttctttgctgggagactttttattaccactttgatcccattatttgttattggtttgttcaggttttgggtttcatcatggttcaatcttggtaggttagatgtgtctggaaatttatccatttttggtaggttttcctatttatttgcacatagttgctgaccactagtgatcctttgaggttttttttctttttttttttttatatggagtcttggtctgtcgcccaggctggagtgcagtggcgcgctctcagctcactgcaagctctgcctcccggtttcacgccattctcctccctcagcctcccaagtagctgggactacaggcgtccgccaccacgccctgctaattttttgtatttttttcgtagagacggggttttaccgtgttagccaggatagtcttatctcctgacctcctgatccacccgccttagcctcccaaagtggtgggattacaggcgtgagccacgcccccttgggacagggacacacacacacacacatagacacacacacacacacacacacacacacacacacacacacagagttggtggttgtgccgcccagtcgcgagtgtgaggaagggaccagatcggtcgggcagaaaggtgctgggtcaagagaggagggggcagccggtagcgcgggcacgccgggtgcgcgcggggcgcgccgggttgaggggtgaggggtgaggggtaagaggtgaggggcgacgaggaccggggcggggtaggggcagccctttcccaggcggtagcgggggcagtggtgctgttgcccttttaaactgcggcttgacgggagccgcgcctcctgtcggtggagtcggttataaagggagcagccccgcaggccgccacatagctcccgccaagtcctcggtgc

SEQ ID NO: 13503 - DNA, 2300 bp, Homo sapien
gacttggagccctgagtatggcttttcagacgcggcttctacaccgcttagactcaaagatctgcctccccaccacccttttctcactcagatagggacactgaggtccaaaggaaaagtcacctgtccaaggtcacacatctgggaggggacccaggacctatcatgccaccaggacaccggtctactcagtttcttaaaaatgttttttggagataggatcttgctctgtcgctaggctggaggacagtgggcgagatcaccactcactgtagcctcaacttcttgggctcaaagtgatcctccaatgtcagcctgtcgagtagctaggactataggtacgtgccaccaccaagcccagctatttttaaaattttagtgtagagatcaggtctcactatgttgcccaagctggtctcgaactcctgggctcaagctatcctcttgccttggcctcccaaagtgctgggattacagacatgggccactgtccccagtcccacgttatatttctatgagacagctctggtctggactgtgcctccctccctggaccttggtcccatagggctggtcagcatctcccccaggccaacatggccacctgcatccccagtgctacaggagccccctgcccctatgaggcggtgcatgcacgttgttgatcatgacgtgcatgatggtcttgggcatgacaccaaccatgaggtcccacacggtcttgttgacaatggccatgtaggagtccacaaggttctgggtggtttccatttgccgctccagctatgggtccatggagtgcatgaagctgtcggagccattctcctcagccttgctgtcctgtcatggagaacacagtggcatcagggtggccaggccatgcagccaggctccaggaatccctaggatctcagcacctccaagggtacctggaacattgaggcacagagaaaaacaactggcgtgaacatgcaccgagctccccacacgctctagacggtttcaggtatctgcctctcaggaccccagactcccctgattcagtctcctcttagttctgactctagtgcccagaatctgcctcaagttaccaatccagaaattggaaaaaaacatctccaggtcccctgttggagacctggccagagcttgtgccaggctgcagacgcctggcagggggcaagaaaggggcatactcactttccccttgtcctgggaggcccatgcaccaacactgccaccgccgccgccaccagggaacacggcaaagtagacacacacacagaggaaaacgggaagggttgagtgaacctgggacactgcaccccaactttaatgtgttgtagaattcagttagctaatattttattgaggatttttgcatcaatattcatcagtgatattggcctgtagttttcttttttggtctgtgtgtttgattttgttatcagggtaatgctagccctgtagaatgagtttgcaagtattccctccttctctatttttggaatcgtttgggtaaggttggtattagttcttctttaaatgtttgctagaattcagcagtgaatcatcaggtcccaggcttttctttgctgggagactttttattaccactttgatcccattatttgttattggtttgttcaggttttgggtttcatcatggttcaatcttggtaggttagatgtgtctggaaatttatccatttttggtaggttttcctatttatttgcacatagttgctgaccactagtgatcctttgaggttttttttctttttttttttttatatggagtcttggtctgtcgcccaggctggagtgcagtggcgcgctctcagctcactgcaagctctgcctcccggtttcacgccattctcctccctcagcctcccaagtagctgggactacaggcgtccgccaccacgccctgctaattttttgtatttttttcgtagagacggggttttaccgtgttagccaggatagtcttatctcctgacctcctgatccacccgccttagcctcccaaagtggtgggattacaggcgtgagccacgcccccttgggacagggacacacacacacacacatagacacacacacacacacacacacacacacacacacacacacagagttggtggttgtgccgcccagtcgcgagtgtgaggaagggaccagatcggtcgggcagaaaggtgctgggtcaagagaggagggggcagccggtagcgcgggcacgccgggtgcgcgcggggcgcgccgggttgaggggtgaggggtgaggggtaaga

SEQ ID NO: 13504 - DNA, 2300 bp, Homo sapien
gaaggcagggaaacgaagagcataaaggggtcttggagggaccacagagaaaggtggcaaaatgggtgcaggggggagtcaggctcaccatggcctccctgctctccgggtcctctgggacactcggcatgggccgaggtgcctcctccccctcactgtccagatgttctcctccgtgtcctgtggggggtggccagaggggtcttcagacaacccaacaagggaggtactgtgggcccacctctacctccaccctcactgtgtaaccctgagccagcccctccccagagaggaatgagctgttgttctttatttttacttttaagaatcaagatcttgctattccgcccaggcacactcccactactggtcgatgtgggagttctgacctgctccctttctgaccttggccagttcagccacccttaggcaacttggtgaccgcccgctcacaggaggtcaccacactgatgccgaacttagtgcaggcacccggtcggcataatgaccagctgctctaaaggtctcttccaactcctcaatcctatgctgctagcagtccccccttcctcctggggctctctcctcttcctctgagcggtctcccgtaccttccccagggagagccatgaggctcagctgggccgttagctgctggttctgctggctggccgcttccaggtgctcctaaggggccaggaaagagtgagaagggatggagtttgccaggtcgtccccctcacagccccatcctcggcagctccctcccctgggtctcctgcaacttttggcaggccatctcggccactgctttgccccaagcttcctactgctgcagctggttcattagctgggtctgttgcagtcactgcctgtacagcgcctccttctcacaggtcagctgctgataggcggccacctgctgctgataggtggccacgtactgctgcaggtgacccaggtaatggtctggctgctgctgcagactctgagcctcttggctcttcagctccacctgcaggaagaccctgggtgtgagggcacgtggtggctggtttccagattctgggcccattaatagggtagcgagggcactgtggggctctgtcagctacccaggcccctgtccccttactccaggcctaagtgactgcctccctttcctagaaccccatgcctccttccccagcctcaaatctcataccctcttctcatttaatcctcagcacctctgtaaggaaaatgctaacttccctttgaagttaaagaaacagagacttagagatgcaaagtacttgaatggtgaccagtggaaccgaggctggaatccagtttcaatctaaggagtctttttgttttgttttcagacaagagtgtcactctgtggcccaggctggagtgcagtggtgcaatctcagctcactgcaacctccacctcctgggttgaagcaattctcgtgcctcagcctcccgagtaggtggaattacaggcatgcgccacaatgccctgctaattttttttttttttaattttagtagagatgaggttttaccacattggccaggttgatctcaaactcccgacctcaagtgattcttctgcctcagcctcccaaagtgctgggattataggcatgagccactgcacctggtataaggagcctgttatagcactgtctcttcccctgtgattgggggctccatgcctctagctgggatgatgatgtccagacctgagaggagcccagggctacccacctttaaaagtcagaggcaggaagcgagaaacagtcgcaggactgccctgcggggtgctgtggtcaccagcccccaggctggaagctgcctctgacctggcacctcccctcccaagaggctgctgcccgcctcccagcccttcttggatggggtggaggtttccgtctccttcacctcgccaagcttctcctgtagctcctttacttgctgctccaactgcagtgtgctcttgttctcattgttctggacagagagaagcaatcagcagccacccactgcagctggagaccccagaacttggtgtctgcctcccatggcactgggaaggctggaggcaggttagaaaaatcaccccctctctcccacagccacctggctcacaggtgcctttagaagtaacctttcacgcgagggctacactgccccattttagaggtggggaaacaaaggcccggagggctagggaggagggcaggctccccagttggggcaacgcaccagctcctcgaagacgctctgtggcttggccagctgccgaagct

SEQ ID NO: 13505 - DNA, 2300 bp, Homo sapien
gattctcctgcctcagcctcccaagtagctgggattacaggtgcccgccaccacacccggctaatttttttttgtattttcagtagagacggcgtttcaccgtgttagccaggatggtcttgatctcctgacctcgtgatctgcccacctcggcctcccaaagtgctgggattaaaggcatgagccactgcacctggccagcatgctttcaagtactggggtacacctaagctctcagcttctagctaggagtcatttggtacccctttatcccaaaagacctgtcactgtctttggttttcaaagcccagcaggctccaggctcttcagcctccaaccactttgcatttctttactgcttttcattcatgaaggtgattaacttatttttcagcctgggcgtgtcttttttatttacttaattttttatttttattttttgagatggagtctcactctgtcatccaggctggaatgcagtggtgagatctccgttcactgcaacctctgcctcttgggttcaagtgattcccctgcctcagcctcctgagtaggtgtgactacaggtgtgtgccactatgcctggctaatttttgtatttttagtaaacaccggttttcaccatgttggccaggctggtcttgagctcctgacctcaggtgatcagcctacctcggcctcccaaagtgctgggataacaggcgtaagccaccgcacctggcctttatttactttatatatctcacctattactgctgcagtttgcagaagagaggatgccctcaaccctaacttctccacaccatcccaaaggggaagtctgctccacgtcatcagtgttcttgtttttaaagaccatatgtcaacatgccagattatagcaaaaggatgtcgaggaagcaatatgaaagcaagcctcagagtcctggagagaaggtgacagagctgccttttgaaggtggtcactccctcagattctgcccttcctgccttgttcctccagttgtcagatttgctgttggggccctcatgggggaaggggtgggggctggactgagagggagatggagaagctgccaggggccatttggatccagaattgcagcagttccagccaggtccggaggtggttgctgtcccccagcccccaagggaatggtactgattccagaacgtggcgagaactccctggccaggagaaggaggtgcttgctcccttgaatcacctgagcccaggctggaaggcccaagggggacgatgaggccagctcactccagctccatcccctccctttaaccctgagctagtcaccatcccagattccaggcccttttcctaagagccatcccagcaaagtctgcagagagcagcactccctcatgccagctcaccctgcactgtcctttctttcagcaaccccatgggtatgaacttgagatgattcattttcctaaaagcctctttgggctgagggaatgtgtgggtggctcggcgaggtttggagtgggggccacctcttctcagagctgctgtgagggccagggcctccttccctggaggtcgtctgcagcctgggaagcggcgccgaatggcactggctttgcaggcagcctaagtcatccccagcggcctgggaggctgggggtgcaccggctcccactcccgatagggccgaggctccttcctcacctaagaggtgactgtcttgaagagtggacacagaggagccagcatcctggacggtgaaggcagccaggagaaaatctgcagctcagtccgagacagacgtctcctgcaacacagctattgtagagacggggaaacaaggctgagagggaagggggcttgcccaaatcaccagacctggaatgttttgagctatgggcgtggatctcccaggaaacgtgttttatggcaccaccgcctctggtcacccaccccgaggtgtggcgggcctggacagccagcttgactgagggccaggctggtgaagtcaaaactaccactcaggaagaagacctagcccttctccagacagagttcaaatgtgagggctgccttctttgggcctcagtttccccacctgaattccaaggacccttctaactcccacactctgggccaagccccagtcagcctagaggaccagggctacatcttccttggacagagacccagcataggggcaacaggaggtaggggtgggggtaggcaaggttcctgtagggaggtggagctgccatcagagatggtgtctgcaggcagtgggtgtatcgtggctatgctactacttcctggg

SEQ ID NO: 13506 - DNA, 2300 bp, Homo sapien
tagatgtttttcaaccaatacattcttaaaattcttctatttccatccttctgcttaaagataaagtgatctactttcagctgtattttttatccaggtaataatattatggttttttttttaagtgaaagccccactgaacaaaattaaaacacacacgcaaaagtaaacttaaggcaagtgatacacttcagccttatttcttagactattcagaaaaattccagagttaaaacattcagcttcattttatatatgctagcaatgctagcaattagtctaattctagaatcaattgcttttctattttaaatataaagtaaaatattaaaattatatatttggacatgttttgaattttagcttcccctctcaacccctcatttttgagttccagataaatatgtgaactacactaacatgaacaactagctcaacagaatgaactacattcacgctatagtaccccagagtgaacttaaatttgggaaaactaacttttctgatagtaactacagtaaaatgcatcatataaatgttcgattttaaggagaaaccacctatctctgtgagaaaccaagagtgtaaaaaacaagtctgatacaaaatgataccatttttgaaactccggtgggctcgtcatatcctaaggtgaaagttataaagttgaagatcaaaagctgactggcctgaaactcccctgtggtttcctcatagtctaaagtgaaatcaacacatgttaagtgggtgtgtagacatttacacataaagctcacagtacaaaaatgaccccactaacaagctccttttataaaaccattttaatttagaaagcttattctatatttagcttaggctgaattcttcttttcacctccccttcctcaaaagaatgcacagaaaaaaatcattcaggttaataagagcagtgagctgagactccagcctggctctgcttagtaaaccgtgggtgtggatttagaaggcatactttctcctaaacccttctatgaacatgtacttccccgtcccctaagttcagtaagtttaccactcaattactctctcaaactacctctttcaagcttaaaagagcactaatgcggttaaactgatgaataaagctcactttctaccggctttccatttgaccaagtctgtattacttaaaacaaaacaccctaactcctaaaagccatttcttcctttaaaccattttatcccacttgcgacgtccccgcagacacagacttggaattgcttacgtgtagtccgtgttattctttcctacatggatgggttgttttcagtttgcttgcagtatttctgacatttcccgttacaacatcctgctctgccagcatcttcagggcaaaggttgggggcctagcccagctcccagcggcaagtacactaggctcttaacttcgcttgtcctctctgcaggccctgccgaagctccccctggtttcccgcagcgatcccgcgcaggtgagggtactggggagcccgtggccttctccgcccgccggctcctccccatcagccgtcagccagggctctcggcgccggggaagcctcccacagggtcccaggccacccaagcgcggtcaaacgccggcggcccggcctcgcttacctgacgcagccgcgcgtccgcctcgacccatcaggcgcgcagggcccgctctcgaaactcgcgcgggctctcgcagtcagccgcgcggcctttagccgcgaaaacagcgtggcgcacggtggcgccgccgcagccgtgggccgccgcgcccaggtagcgctccagctgcccgcatagctcctgcagcgccacctcgccggggcccgcgcgcgcctgccagagcagcgcccacagcccgagccccagactccaggccccgccgccgcccacgtccagctgcggggagcagcgttccagaggcggccacagcgccgctagctgccagcgcgcgccgcggaaccccgcggccgagaaccggccggcccagttgggcgggaacacggcagctgggcggggacacggcagctgggcggggacacagcggccttgggtttgggctccagccccagccgggccccctcgcgccgctgcggctgctgcgcggtgaggtcgtgacaagtcacagctaacttgccctccgcgccattccacgccaccaggaagcgcagccggtgcctctcggcatcggcgaagaggccttgccggaccggcgcccagccctccaggctgtcgagctgctcgtcctccatggccgtcggcggcagcggccctaggactcggc

SEQ ID NO: 13507 - DNA, 2300 bp, Homo sapien
gccagtaattcctccttctcacttaatcgttgactacaaagaccaagccattttgactctgccaccgatgagctttcacatttctttcctccttccattcccatgactaccaaaccagtgcaggttctcctcacttcactctaagacaacagcgtggccctcaaatactgtcacactcttcaaggctctgtgagcacaatctgtctcatattctcttctgctgtcaccagatttattctaagaccgtttcttcactgttactcccctgtttctcaaccagttacacagaaagacgaatatccaggcatggtgtcatgtgcctgtagtcccagctactcaggaggctgaggcggcaggatcgcttgagaatgtgagattcagactgcagtgagccatgatcatgccaccgcactccagcctgggcaacagagtgagattgtctcaataaataaataaataaataaataaataaataaataaataaataaatgaataaatgtggtctatccatgcaacggaatactataaaattatcagccttaaaaaagaaagaagccctgtcacatgctgcaatatagatgaaccttgaaaacattacactaattgaaatcagcccatcacacaaagacaaatgctgtacaatttctcttacattaggttcgaaattagtcaaactcatagaaacagaaaatagagcggttgtttccataagccaggggatagagaaatggggagttgttgtatagtggctatagtttcagttctccaagagaagcaagttctagaaacttgttactcaacatgtatatttttaacactactgcactgtatacttacaagtggctaatatggtaaattttatgttgtgccttatcaccataatgtttttaaaagaaggggtttgtgtttcccttcgttgtgatcacccatttttcacttcagcattttgaacttgagatttcctgtagcggttttactgagccctgcagttaccggctcagaatgtctccaccgccttgtaaccttgtaggcagacacttttcagcatcttattgggctccgtgtgcttgatgcttaaagtgacatggagacatgccacttgctgagaagcaaagaaaggcaaaaggtgactgactgctttcctggcatcgatgaaggcagagagaagggatcttggaggcacagatattaagccataagcaataacatgggttgccaaaaagagaactaacccctctcctggtaacatttccaggtgtttttcacagggccagtggatttcacaatgtgagtgctgtccagcaccaaagggaatggccaacaggcatggagcagcctacagcgtccagcacccagtaggatggccaggaggcacggagcagcctgcctgtcccaggaaagcaggagtcacaggacacaactggacccaggtaggcatgtatgttactttcctgtggctgttagagcaaattaccaaaaatgtggtgacttaaaacaacagaaatttattttctcacagttttggatatcagaagtccaaaatcagtatcactgggctgaaatctaggtctcagcagagccagtgctctcagaggctgaggggaaaatccatcctttgacttgcgcagcttctgatggctgctggcattcattggcttgcagctccaccactccaggctctgccttcttggtcacagggcctccttctcttctgtctgaagttaaatctcctttatctccctcttataaggatatatgtgccaggatttaatgcccacggagacaatccaggataatctctcttcaagatccttaacttaatcatacctgaaaatctgctttttccaaatgaggtaacatctacatgttctaggagttccagaccagcctggacgacatggtgaaacacggtcttttttttttttttttttttttttttttgagtggagtttcgctcgttttccaggctagagtgttttccggtctcgactcaccgcggcctccacctcccggttaggtggttctcctgcctaagcctcctgagtggctgggattgcaggcatgagccaccatgccagctaattttggtgttttttttttgtacagacggggtttctccgtgttggtcgggctgatctcaagctcctgacctcgggtgatccacccgcctccgcctccctgggtgctgggattgcaggcgtgagccaccgtgcccccggtccaatttagtaaccagaaaggaatagatcggcctggcgtggtagctcatgcttgtgatcccagtactgtggacggccgag

SEQ ID NO: 13508 - DNA, 2300 bp, Homo sapien
agaaggcagggaaacgaagagcataaaggggtcttggagggaccacagagaaaggtggcaaaatgggtgcagggggagtcaggctcaccatggcctccctgctctccaggtcctctgggacactcggcatgggctgaggtgcctcctccccctcactgtccagatgttctcctccgtgtcctgtggggggtggccagaggggtcttcagacaacccaacaagggaggtactgtgggcccacctctacctccaccctcactgtgtaaccctgagccagcccctccccagagaggaatgagctgttgttctttatttttacttttaagaatcaagatcttgctattccgcccaggcacactcccactactggtcgatgtgggagttctgacctgctccctttctgaccttggccagttcagccacccttaggcaacttggtgaccgcccgctcacaggaggtcaccacactgatgccgaacttagtgcaggcacccggtcggcataatgaccagctgctctaaaggtctcttccaactcctcaatcctatgctgctagcagtccccccttcctcctggggctctctcctcttcctctgagcggtctcccgtaccttccccagggagagccatgaggctcagctgggccgttagctgctggttctgctggctggccgcttccaggtgctcctaaggggccaggaaagagtgagaagggatggagtttgccaggtcgtccccctcacagccccatcctcggcagctccctcccctgggtctcctgcaacttttggcaggccatctcggccactgctttgccccaagcttcctactgctgcagctggttcattagctgggtctgttgcagtcactgcctgtacagcgcctccttctcacaggtcagctgctgataggcggccacctgctgctgataggtggccacgtactgctgcaggtgacccaggtaatggtctggctgctgctgcagactctgagcctcttggctcttcagctccacctgcaggaagaccctgggtgtgagggcacgtggtggctggtttccagattctgggcccattaatagggtagcgagggcactgtggggctctgtcagctacccaggcccctgtccccttactccaggcctaagtgactgcctccctttcctagaaccccatgcctccttccccagcctcaaatctcataccctcttctcatttaatcctcagcacctctgtaaggaaaatgctaacttccctttgaagttaaagaaacagagacttagagatgcaaagtacttgaatggtgaccagtggaaccgaggctggaatccagtttcaatctaaggagtctttttgttttgttttcagacaagagtgtcactctgtggcccaggctggagtgcagtggtgcaatctcagctcactgcaacctccacctcctgggttgaagcaattctcgtgcctcagcctcccgagtaggtggaattacaggcatgcgccacaatgccctgctaattttttttttttttaattttagtagagatgaggttttaccacattggccaggttgatctcaaactcccgacctcaagtgattcttctgcctcagcctcccaaagtgctgggattataggcatgagccactgcacctggtataaggagcctgttatagcactgtctcttcccctgtgattgggggctccatgcctctagctgggatgatgatgtccagacctgagaggagcccagggctacccacctttaaaagtcagaggcaggaagcgagaaacagtcgcaggactgccctgcggggtgctgtggtcaccagcccccaggctggaagctgcctctgacctggcacctcccctcccaagaggctgctgcccgcctcccagcccttcttggatggggtggaggtttccgtctccttcacctcgccaagcttctcctgtagctcctttacttgctgctccaactgcagtgtgctcttgttctcattgttctggacagagagaagcaatcagcagccacccactgcagctggagaccccagaacttggtgtctgcctcccatggcactgggaaggctggaggcaggttagaaaaatcaccccctctctcccacagccacctggctcacaggtgcctttagaagtaacctttcacgcgagggctacactgccccattttagaggtggggaaacaaaggcccggagggctagggaggagggcaggctccccagttggggcaacgcaccagctcctcgaagacgctctgtggcttggccagctgccgaagct

SEQ ID NO: 13509 - DNA, 2300 bp, Homo sapien
tagatgaagcaaataaccattatgttaatattaatatttattaatagtaacattaataataaggcaatgaaaagaaccaatattttcattgcctccttgtgtgtaggaaaaaagaaccaatattttcatcttaagagaaaggaagggccggatgtggtggctcacacctgtaatcccagcactttgggaggccgaggcgggtggatcacgaggtcaggagttcaggaccagcctggccaaaatggtgaaacaccgtctctactaaacatacaaaaattagccgggcctgctggcagacgcctgtaatcccagctgcttgggaggctgaggcagagaattgcttgaacgtgggaggtggagtttgcagtgagccgaaattgtgcaactgcactccagcctgggcgacagagcgagactccatcacaaaaaaaaaaaaaaaaaaagagaaaggagacgaaaaacaagaagagctcagctttaaaaaaggatcacgacgtagaaaaagacacaacactgaagattgtcatgggtctttaagaaaaggaaatttgagacggctaaaacgccgaacagtgtggagtttggggaagagatgtggctaaagacagcgtaagcaattttttaaagttatgtctgaagcaagaagaaaagacaaggaataggttcagtttcatctctgatacaccgtttcttgttaaaattgatgtttttttctgcaggcatttgcttcctgaatgatggtcccactcagccatccacctatactttctacaaagtcaatttatactgattcttcagatcagttaatcactggtacgtttcccctccccggtcaaggatcttttattatacgctatcatagaatcatattcctttccttagcgcacttctctcaactgataagtgccgccattaatgtacttacttgataaatatatgcctgcctttcctcttccagggccgaaactgtgcctggttttgctcatcattctatagtctatagcacgagttcaataaacagttgttaaagcaacatatttaacttacattttgttcccatctcttcactcagagacttttctttggattgggaagggtaaaatatccgaagatttgaactccaaaagaaacaaaatgattctatgcaaacgtttcctacttaaaactcattcattggacaaatattcacttagtccctggcactatttggtaataggaatacaggagtgcatatggcagataaagttctgttgctgcccttaccaagtttcgtgggggtgagatgtggtgttagtaaatgcatactattttgtctgtatttaaatcgagtccaaatctctcgctctacagcccgccttgggatgtttcttatatcccaagaaacagaatattttgatgggatcgctgatgtttcagactgcaaaagcagctcagggcgtttgcagtcgtgcaagtcaacaagataaccgtctggaccggaagctgggctcctcccggtctcctaacgccaaatccaacaccaagcttctgcagctgccacctcccgtagacttcgcatttcttccgcactctcctctcacgacgggtcttctttgttgtacttaatttcctacgcaataagatttcagcatgaccatcagtcccccaaagactaattcccacagagccgaagttcccaccaagggccgagggttaaggttactaaaatcagcgtttctgaatcctgtctcaagttgtctcatctgggcttccgtaagaacggtttcttcataagagggccttcagcgacagccaagctcggaaaagaacgggaataagttgtcttttatatttcctcaaatactgtgaatggtctgaggcgcaggtcaggtgtatttaaaaacctttaaacagtattcccccgccccaaaaactggccttgaaggaacaagtgaaactcatcctgcttttcatgtttgctgggtttgcccgttacaccccttcgcccgcacttatctagacaggcagctctcggccaccctccggggtcctgattttgaaaagaggagtggaccaatcagatgtggagcgctgtttcgcgctgccatttgagcctgggctgaaactgcgggtgtgacccccccgtggtggctctgggtgtctgcggaggagctgggggcggaagcatgaggctaacggcttggcttcagtgaacgcaccgggatgtgcaggccgggaggtagaggcaggctgatgggggagggaacgagcagcctgtgagacggggtgacggcggctaccagcccgggcgggcaccggga

SEQ ID NO: 13510 - DNA, 2300 bp, Homo sapien
tacttttgttagtggttttcttctccaagcactttttttaagaaaccataaactattaaaagcaacgtatattaattttattagcttgtctccaagtactaggaagtaccatataaattaggcacataaatttaaaataaaatgctttacattcagcttatttttcacaatggaattcctgattatgtggcagagctattaaaatctcattcaaaatccctttatttcaaccaccaaaacatcaacaacttctcaattattccactctggcttctcaatttactcatacaaaaaaaaatttactgtcccaaaagtatgacatggccaagcagcaaatctgtttcccaaattagtgaatatgcagtcatcatttgaagcctatttctaatgttctgtcatacttcttcatctacagattcatgtagaaaatgcactggtctcccttgtccctctacaaccttactctaaaacaagggtggaggggtagagtttttgtccctcccaacgtactacctgttccaaatacagtaagctggcaatatccggagacatttttaattgtcacaactgagagatgctaccagcatctagtgggtaaaagacagacatcccgctaaacatcccacaattcacagaacagcatttcgtcttcccctaacaaaaattatctaatccaaaatgtcaatagtgctgaagttggaaaatcctgcaactttctctcaatgatcaaaaatccttgggggaaaaaaaacaagaatgtcactttttaaatatcagcaatcgaccatctgaactgaattacacacctaaccattctttttgatacacagagtgaacattttagcacgatctggtagtaagtgatgataaagggtgtgccctttcttttaaacctaaatcccttttcacagaacttacccctatttccgtggctgctgtttcatgtctcctgcgatcgcactgcccacggacacccttcaccttaataccatagaaggcccgcagatgctgcaacagggccaacctcaccagcctctgatcccacattccggatacgtcgataactctctgaggcaggatgcaggtcctgaccctcgttcgccaccaagtcttccaatttccaaacgctctcaaatttgaactccgctcggctgctttccggccccgtctggcacttctgcggccccgacccccggccacttccacggcttttccttgatcctcactcacatccacttacacagacccgcttctcttagccctttgatccagccacacctcactcttccttcacttacaccgaccttctttctggtcacccaatgctttcagctactcacatagacttctttctgattctttcggtttctcgtctattgccagattctctccacttcttgctacttccaacgatcccccttcctccaaaccttactgtccccgtctggttcgctctgaaatgtgaagaaaacccttctcgctcctccagccccagcaggctcaactgggcgctcgcccccgccctagcctggccgccggaccagccggctgctcaggcaactcttccagtcccggtgcccgcccgggctggtagccgccgtcaccccgtctcacaggctgctcgttccctcccccatcagcctgcctctacctcccggcctgcacatcccggtgcgttcactgaagccaagccgttagcctcatgcttccgcccccagctcctccgcagacacccagagccaccacgggggggtcacacccgcagtttcagcccaggctcaaatggcagcgcgaaacagcgctccacatctgattggtccactcctcttttcaaaatcaggaccccggagggtggccgagagctgcctgtctagataagtgcgggcgaaggggtgtaacgggcaaacccagcaaacatgaaaagcaggatgagtttcacttgttccttcaaggccagtttttggggcgggggaatactgtttaaaggtttttaaatacacctgacctgcgcctcagaccattcacagtatttgaggaaatataaaagacaacttattcccgttcttttccgagcttggctgtcgctgaaggccctcttatgaagaaaccgttcttacggaagcccagatgagacaacttgagacaggattcagaaacgctgattttagtaaccttaaccctcggcccttggtgggaacttcggctctgtgggaattagtctttgggggactgatggtcatgctgaaatcttattgcgtaggaaattaagtacaacaaagaagacccgtcgtgagaggaga

SEQ ID NO: 13511 - DNA, 2300 bp, Homo sapien
gaactggcttttctgagagatgaatcaataatgaaacatgtctgttttaaaaactaccacatgtgactcctatttttgttagctgaaagctgctatacggagtattacaggaatgtgaaggtgactagcttgaaggtagggtaactagagagccagaaaagttttgttttaaacttgatttaatgcgtttttattttttcttatacaaaatagagataatgttgctaacttcatggaatatttgaggaaatgatatgaaagtgtctggacgtgcagtaacctcatgggttcttctcactgtcttataaatgtaaataaagatctaatattaatttggttatctaataacaacttaatacatagaacttagtagactgcatggccacattctataatatgatcactaagaacttaatgtaggattttaatagtcatgtttttcttaattgtggcagaatttaaaccttaattttgtgatcttttttagttagtttgttttttgttttcttttcttttttttttttttttttttttgaggcggagtctcactctgtcgtccaggctggagtgcagtggcacaatctcagctcaccgcaacctccatctcccgagttcaagcgattcttctgcctcagcctcccaagtagttgggactacaggcatgcaccaccacgcccagctaatttttgtagttttagtagatacgggatttcaccatattggccaggctgatctcgaactcctgaccttgtgatcctcccaccttggcctcccaaagtgttgggattatgggcgtgagccactgcacctaacctctgtgatctcttaaatatatatgaagttttatttttgaaacaccaaatttcaaatgaagcataggcattttgatctatttcagttaaatttaacacaaaagcagtaaattgtagtgacttcatttttttcaaccacaaaatgaagataacaatgaacaaagctaaagtaaaactcagaattgaaaaaagtctctgtgcatcaataataaatactaactccagcatggccagtgagcctagagccatttaatggatagtgtttgtcctgttgatttagcatgcattgaaacaagaagcaagaagcagatgagcatccgtgaaagaaaaagtactgggaaagaggcttggcttcaaaatgaaaggccatgtgtctcataaatgaattttgccagcctctatttattgcataaaaattgctgtagatgataatggatttgctctctagagctaagataaatagatctggattctaacctcatcaggttacttgttttgagacccccaggttctttactcatcctccatcttgatcaaatttgtagtgccatatttattgtatggctttacattttgattttagtatttgaacaaatttcagtgttcaagattgcacatagtaggtgctccataaacccttatttaagaatctgggactacctggacatacttctacagtatgctgggagtatggtttctcttcaggccaaagtggaattttacttgatggtttgtgtggacgtttagaaataacactcagagctgatatttctacagattttcaagtttatcactttaatggaagtttctggcttcttgtattaaatatccccatagttttcctgattagtaagaggcccctcagagcagggtataccttatcatagccaccattaaaagttcttaggacttcatcttttgtctctctaccattcattgcctcttccctcttgaagctgaaaggctttagacacaaaaacaaaaaacatattctagaagttgacaaaattaaaggtgtgctgtagtggtgatctggcacgttgtaattgagactgaggaggtgaatgacttacatggaggtcgatggagctgaagagggtctctaggaaatgtcatagtcaagaggtttgtatgcagaatgtgggggttgaagagctgtgcggctcctggtgagaggcacacttatctgggatgcagtctggggagtcctggcgaggcagcttccacctgctggaggaggggccggggcggagctaagatgcggaggagggtgacgcactagctctccagttcgcccgttcctggcctgacccccaccaaggcccataccgcagtaggctcctcgggctgcccctcggtgagtacagttttgatgtcggctcggccgcctgccgccaacccgagatttggtattgccagttgtgggagggcgtcctgctaaaatccttgaggtggaggctggggtcagacgaaggatgcgtaggggat

SEQ ID NO: 13512 - DNA, 2300 bp, Homo sapien
tgtaatcaaagtgacctagacaaaatccctgcccttatgaaccttacattctagtggcaggaaatactataatgccagggagaagggagagagaaatgagaatgaagaaaaatgatgcagtgatgcatagccctctctatctctttgggatacagagagggggcgtgtgttgtggggaggaggtgggggctctattataaaaaatatggcctgagaaactgcatgaggaagagtcatcatgatttgatacatggagatagagaaaaccacagtgtcagggctccaaaaaaaaaaaatcacttccattttgggaggtaatttcagcttctttgtatttgatttggggcagtatataagtcttgggaaaaaaagaagtgactaaagcttttattttagatgaggaggacttaatgaatttgtaaaatatgctcccttttgtggggagaagtacagcagtttgcacgttgggagaacagctggctccaatacagcttggtggtgggcttcgactgaactggtcatcgcctaagtattttgtgtatttctgattacctatctctccaggagcccacgtgagcaagacaggtcttcaagctggttcaatgctcccattctgtaggcaactacaaactgtggctcactgcatgacttaacaacaactgattgagaattgtaaagtgcagcctcgagttcatgtgtagaaactgccatctgcacaaacaaaacattgagaggactaagattttaaggatactaatgcagacgtccttcttgcttcatttatttaaaaatatctatttcacgttcctaacagcatctagtagatgtttcttgcttcttccccctaacgccggactaaagagaaaaaaaaaataggctgttttctggtctggttttgttttcctagtcaagtacttaaattacgggtgtttcgtaagtatcttttgatggatttcattgttttgtttatttcgcgttagacaatacagacaccttcatatttccttctgtagcaaatctttttcaaagtcttcatttgacgtggctgatggagctggtctgcagatcttgcagacgtgttaatttttgcacggactttagcttcaacacacaaaacttacggcctctttgaggaaccaatttttcaggctaagagaacaaatgaaagtgttcgctcatctttcgaaaactatttatgtacttggtatccggaatgtgacattggttttacacgtcggtaggtttttgtcctaaatttctgggaagttacttcctcatctaacgttttattttcctgacttattcgtctttgatatgctacagaaaacccctctcgcccagtggctgttttctctctgtctcttaagataatttaggaacagaagccttgacttttgacggtcatttagttttattctcctcccgtgactcccctctgtacactcacaggggaggccgccggcatctgggctgaaagaacccttggcgggcgaggagagcagggtgtcatgttggcgacaggctcctgctggcggccagcgagcccgccaggttaacgggggcgccggggtcagcgccctcgaagttgggggcctcgggcggggccgccggggagccacgacggccgctcgaccagagcatcccgcagtcccgttccctccagaggggaagaatggccgaatctggcacgatcccacggagatctcgctcttcccagcgcagtctccgctactgagcgcgggaccaacgcaggcgatgccgggcggccgacagggaaagcccagacctggggcagagaaggaatgaggggccgccagccggggggatttcctcccgctcttccctctccaacgggagcggaaaatgtgatttgctgtgcattccaggcgcggttccctggggtgacctctcccagccggcccgggcggggggagcagacaaagaggcgaggcgggcggagaggggaccccgcggggaagcaggaggggtgcggggggcgggggcagtaccgggaaagggggcggatagcgggtctggcggcggcggcggcgcctggccaatggagaggcgcggccccgggcgccgcgctctgccgccggcatttaaacgggagacggcgcgatgcctggcactcggtgcgccttccgcggaccgggcgacccagtgcacggccgccgcgtcactctcggtcccgctgaccccgcgccgagccccggcggctctggccgcggccgcactcagcgccacgcgtcgaaagcgcaggccccgaggacccgccgcactgacaggtgagcgcggac

SEQ ID NO: 13513 - DNA, 2300 bp, Homo sapien
ctgggctcaccacaacctccgcctcccggtttcaagcaattctcctgcctcagcctcccaagtagctgggattgcaggcatgcaccaccatgcctggctaattttgtgtttttagtagagacgggatttttccatgttggtcaggctggtgtcgaactcccgacctcaggtgatccgtcctccttggcctcccaaagtgctgggattaccggtgtgagccactgtgcctagcccagccagcagtttaaacccaattctatctagccccaaacacaggtccttaaccactgtcctattgacacccagtgctgtccttaacagtgggtcaatggatatgttttctaatgcaatacaatttgaagagtgctataaataaaataattatctattttgtatcttcatgttcacatgtgaataaaaagatttctcttgtcccaggaattcctgttgtactttgaatttctaagagcatatgttaaaactaaagaaaattccttgcagatcgaagacacgggctggtagcacttgcctgatggttgccttttggttagaggctgcagtcacctcccctaaccactgtcccccacctgcctttcctttacataaaaggtttatatttcctggctgtcctttactctctgttgtggaacatgttccacagctttgctgtcaacaagcagttcttgggggaggtgtctgcggcatgaaatttctttgcattttatcacttttaatacttgaccattcagactgaaggcatcttcggcttagtttcaaagacagggtaggcagccctcattcagagatgtaggacataaaaggtttttatccttccctgtgtaactactcacataaagaccgcattagccaacctggatttcctacagagcgtgggttaccaaaacatttcactaaaaatgaacttttaagaaaataggaaacctgtgaaattacaaagtttacaaaagactctaattcctacaatgacctggaggttaaacacacacacacagacacacacacacacacgcacacatactgccactaccctgctaaaaatccctgaaatagttaatattaacaatttgacagtgccatttatccagagatagtaatcaaatcacctactgttatagacttggcttggggggcagtgagaatatatagttttcttaagatctttccctccttgctttgaaaagtacatccccccctcaagactctcatgctccccctccttccaaaaaaagagaaaaggggagggggaagccctagggatgaaagaggactcctcaccctagaatggggttatcttaacctcttctacgctatttatttaacttgtgtgtacagccagaaggaagccactactctggggtccctgggacagcttaaaaccctagtgacccacttaacacaatagattgttttaatcagttcgtgtcctggcaccatctcgaaggggaacataaacagacgcgcacaccgctcagatttgctctttccagcaggagatccaattacctatcggtggtcacctctctgccctcggaccgtttaagagggggattttaacccctaacgctgaggctgtatttctgtctataagagccgagattcggagtcggtcgaggaggggaaggcagtagacggattcgacccgggaatgcattagggacagctccgggcgcgcaggaatttcttcacagcagaggctggtcacctgccgtccgtccctccccgcctggcccggtgaccgtcgccagagcctggcgcaggcaaataaacgccaagctggggcacccccaaggaggagctgcgatccgaaggcaatgccaagcgagagcggtggcgcgtctgttcttccggagtctgtagtctacaaataactccggccagcaaggaggtgacagccccaatatacctcccactcccctgctatggccttgctccgcaagctgtggaggggccagcggagccagccaggcagcgagagagaacgaaagacgcccagctcgttgcagccgccaacccgcctcagccgccagtccctagtcctcaggagctagtgaggcgctgcaaggcgaggctggggcctctagaacacagtttaaggggtgcgcgcggaagtgggaaccagccggtggccgctgcccggcgccagaacgtctaccattcagcccgggcgtgcgcggggcggggaagaggctggagtagagaagcgagcgcccgcgagtgcgtggccggtccgcgagcgcgtgtggtgtctgccttgtgagcactgcgggttcgctggaccc

SEQ ID NO: 13514 - DNA, 2300 bp, Homo sapien
gccaggaagtcacagctgctgagcagaaagaagcctgcggttggcacagggagtgtagagggtaatcattcctgcggagcctgggctgtttactctgccaccctgttgctggtggacactgggtgtggtgggtgtgcttgcctaatacctgtttgtagagcactgagacagctagggcagagctaaaacagcagtcatctgaaaccagtcgtgtgggttatccctcacgggctttaggagctaaaatctgcattccagatgaaacctgcagggaagcggaagaaagcacttaaaaaaagcttcaagggcagtaaattaactgctttgagagttctaggcacttttgagatgatctattgctttctttaatttgtttccttgattgcggcttcgtaagtggctgctgatctgggtgtactgctagttttttggcctggatgccccaggcctctctgatcataatccagatgaaaaagaaggcctgtgtcagaagtatttcagttgttttctgctgatttacttctgattcccttaggctgctctgggcagtggctaagtgccctcagtatcagcttgccggctcagcactttcagaagccttcacttgctcaccaatgaggaagttgaatgccaccaggagaaccgccggcctggggcggagctcctcgtgaagtcctgggttgggattacagggcaggctgactttccctatgacaaaaaggcttttgtccccgggaataaatacggaagtttcagaagagcagcctccctggtccgtgtgtagtaaggtgcgcagcctcggctgcttctgggcatagactccacagatttttcacagttgccctggaacacatcatcgcacaaaccggaaggagggcactgtgacccgaaagagaccaagtgtgtttgctgtgcggctgacagcctgactcccgggtcctgttgctctctgtcctgtaaattaagagcagatggagtggataaactgagagcgcaggagaaggtaacacaagtcagaacttccaccaagggcattactgagacatggagaacgttgataattctctggatggcagtgatgtgtcagaaccagcaaaaccagaagccggacttgaagtggctcagtcgatcctgagtaagttctctatgaaatccctatttgggtttacgagtaaattagaatctgtgaatccagaagaggaagatgctgtgctgaaagcattccatagtttagacgtgaatcccacatctcagcaggatgattccagcaatggcttggatccacaggaagcagggtctcgggtttcacctgacctcggaaatgatgagaaaattgcaagcgtggagacagaatcagagggaagtcagagaaaagaagcagggacatctctccttgctcaagagctgcttccactgtctactttgaaagggacaaaagacgatgtcatttgtgttcgtgggaccctggtgcacaccaccagtgattctgactctgatgatggtggccaggagccagaggagggaagcagcaccaatggcccaaagtcccctagtggtgttttatctgagccatctcaggagtccaaagaaaacccaggaggtttcagggaaaatactgtcactggggaaatgaatggtgcagagctctgtgcagaagatcctcaaaggattccacctgagatgagcagcaaactggaagctggcaacggtggtcttcagacagagcgtcgccccagccaggaccaggtgggagaagaagggtcccaagacctacctgcagtaacaaaccagaattcgagtgttggtatcactgagagtgcctcttctaaaaaagaagtctctggagagaagtcattccaacttccagcttttttcagtgggcttcgtgtgctgaagaagggggctaccgctgagggaggagagaccatcacggaaattaaaccaaaggatggggacttagctttgctcaaattgacgcagcctgtgcagaagtccttagtgcaggcagggctgcagacagtgaagagtgagaagaaagcaactgatccgaaggccactcccactctcctggagcagctctctctgctgctcaacattgacatgcccaaaactgaaccgaagggagcagaccctgagtcgcccaggagagaagagatgggctgcaatgctgaccaagagagccagagcggccctggagtaccacaaacccagggtggtgaggtcaagccaaagtcgccagagacagccctggaggcttttaaagccctattcatccggccccccagaaaggggaccacagc

SEQ ID NO: 13515 - DNA, 2300 bp, Homo sapien
gaggccgaggcgggcggatcacctgaggccacgagttcgagaccagcctgaccaacatggagaaaccttgtctctactaaaaatacaaaattagccgggtgtgctagcgcattcctgtaattccagctactcaggaggccgaggcagaagaatcacttgaacccgggaggcgggggttgtggtgagcggagattgcaccattccactccagcctgggcaagaagagcgaaactcggtctcaaaaaaaaaaaaaaaaaaaaaaaaaaaaagagaaagactgatcttatgatctgttgtgatcatttcttctttctacaatcttgaagaagcagatgtctgattttaatcaatgggtatttcctctagacaagaatcttgttcttagacttaaaagacaccattgaatttttctgcagtgtcctggtggctttttgattaagtgcctcagttaataattcccaaaaatactatgatcaggagcaaacagagaagtacctgtttaaaacacaagatcaaatcaagatttagaaagtgttttacttacccttagtggttgatgggatgcaatgatgcgtttttatttgtgtgagcgttccttttgaatacattgctagaaatgtatttttgcaatcagaatttctcagtattgatgcttagattgtttttagtactgaagaacatggctcaagttatcaatgtgtgacatgcagccacccactcctgcagataaagcaagactgtcattttccttatggctaccatttccattttgcagaaggaattactgtttgtgtttaacacttgaccacaatcttcttggacctttgctcaaacagagatggcaattactgttcagccagtttgacttgcctctccaaccagaacagtgtcctgtccatcccaggcactcactgcatgcctgcttagtgggactggatttggaaaacacttgaggccttcaggtagatagggagctgtcccaagaggcagctatgcagctaggaaacagggctgcaatttttacccccatcctttgttgccagtttcccagcatataaatagagtggtagaaactacactgggctgatgtttggaggttgttttgtctgtcctgtttttgttgaggcaaattgggtctgtgatagagatctgactgatagagacttttcagatgttttgccctttaggagaacgtggatccttggggatcttcaaattgttttgtctaatagggcaggttgtgtgttacactgtgtcatgccaggtttcatttagttggctgggacaccaaagggggagaggcgtgtcctgctgctgccaggatttctaaggcagccaggaagtcacagctgctgagcagaaagaagcctgcggttggcacagggagtgtagagggtaatcattcctgcggagcctgggctgtttactctgccaccctgttgctggtggacactgggtgtggtgggtgtgcttgcctaatacctgtttgtagagcactgagacagctagggcagagctaaaacagcagtcatctgaaaccagtcgtgtgggttatccctcacgggctttaggagctaaaatctgcattccagatgaaacctgcagggaagcggaagaaagcacttaaaaaaagcttcaagggcagtaaattaactgctttgagagttctaggcacttttgagatgatctattgctttctttaatttgtttccttgattgcggcttcgtaagtggctgctgatctgggtgtactgctagttttttggcctggatgccccaggcctctctgatcataatccagatgaaaaagaaggcctgtgtcagaagtatttcagttgttttctgctgatttacttctgattcccttaggctgctctgggcagtggctaagtgccctcagtatcagcttgccggctcagcactttcagaagccttcacttgctcaccaatgaggaagttgaatgccaccaggagaaccgccggcctggggcggagctcctcgtgaagtcctgggttgggattacagggcaggctgactttccctatgacaaaaaggcttttgtccccgggaataaatacggaagtttcagaagagcagcctccctggtccgtgtgtagtaaggtgcgcagcctcggctgcttctgggcatagactccacagatttttcacagttgccctggaacacatcatcgcacaaaccggaaggagggcactgtgacccgaaagagaccaagtgtgtttgctgtgcggctgacagcctgactcccgggtcctgttgctctctgtcctgtaaattaag

SEQ ID NO: 13516 - DNA, 2300 bp, Homo sapien
ttggattaacatccttttacctttctaggactcagctcacacgaccatgatattattttgtgggtggactttaaaagatttctacatcaattaaaacctagtttgacttaagccctgcaaaattttacttccttcccaacaataggaaatcacagctcccttctatgagcaaagttgacttgcaattgctcctaacacatgtcagaggtgacacttcactcttaaaggtgcttctgaggctgcggtttcaagaagtcagtagtgtgaaaactggatccctatatgacaattttcaggtaaaaagaaaaaagcatcaaggaattaagagtcgtactgagggcttcttattcttctaactgatgatgatgatttttagacaggagatatacggacctcgtattgactctactcctaactacgaacatgacccaaggacaattacttgaactttgggaacctcagttttcttatctataagtggaatttacaaggggaagatatgaggattgaaggagataatgtatatgaagtgcctatggagccgggcacagcacttcacaactgtaatctcggcattttgggaggctgagaagggaagatcgcttgagcttaggagtttgagaccagcttgggcaatatggtgaaaccctgtccctacaaataaaaaattaaaaaattagctggacatggtggtgcccgcctgtagtcccaggtactttggaggctgagttgggaggatggctttagcccacggggttgaggctgcagtgagccaagatcgcaccactgcaccccagcctgggtgacagagtgagaccgtgtgttaaaaaaacaaataaataaagggcctatcagtgtttggctaatattgtgattaagaataaatcagagttccaataaactattatttctagaaaaaaaatagtgaaaaaaatcaccttaaaaataccttccaaatttttttcccatttacttatttgaaaacagaatctattcaggacaaaattctatcttcaagtaccaaatgggtgatacagttcgcatttatccaaaagcagattaaagacaatgccttttcttgcctacctacttggaaaagatctcagtgtcactcaaatcacattccaaatctcaacgacattaaggcctcaaatcctcttaggaaaggtttgaaggtagttcatttcagtaatgattagacacttggggacaaaacagtaccttggcatcaaggtctgtactgattcaccagcacagaaatagcagtaacaagatcttcaactctgaggtgttcaaataagcagacaaactccctcgtgaggcccaggcctcttgacatccggactcagtctttctttctcagatcgccaagggtctggcccatttctcagcctaaacctattttgcgtttaattcaaaccagtcaaagtaacttaaccgccagcagttaaaaagctactaggaggaagcgtaggcaggagatgggagaggaaaaggctcctgtcagggtttgggcttatgtgtggattcttgaattctccttctttgttccttttagcacttacgatcaagaacggctaggctgagggggcaggggggccaggccactggagcgaaacggcctctccggatctggaggcgtgggaacctcgggaatagtggggagttccagaccagttcccttcccccatctgaacaagtccagagcgtgcgccttgagaggcgctcggaaacagggaagctggggacacgtagcgagagactggttgtcgccctggctgtccgtcttagacctagcttagcgaccaccgccttcaatccctcagcccggatcagacggtgccaaaagacagcactgcttcccagcctggcccaacggctcggctgctgattgggcaccgccgcctcccgccccgcctcccctgccacctcgggcgccgctgcacgtttccactggtcttcagccctgccgatcagtttactgctcacctcccccaaacagctcgtcaggccggcgcgtgctaggaaggcggggcctgtggcctgtggggcggagcctcggtggaggtcggcgcagctgcccctttgggctttggctctggactggagcgcagcatccttcgaggctgcagccgccacggctgttgccgtaagcaatcctcctgcctcagcctcccgagtagctgggactcgggaccagcctcccgagtattggtcaggtaaagagagtcttgtctgttctgctggccatctgcccgtctcttcttcccgaccaaaggctgcctgctccgccttccccc

SEQ ID NO: 13517 - DNA, 2300 bp, Homo sapien
agcctgggaccccagtctgccactggcccaggttttcatgtctgtgtgccttacttagttcatgattttttgaatggtattttagatttcagggttatttacaaatattggccttgaagaagaaaccacaaagcagatcctggaggaaatgaaggtgagtagaaaaaacaaacagatttttctgggagatgtgtcaattctaggtcctgtgagaaattgctctcaaggactaccctagggtatgtactggttatgtctgtgtacttatcagagatgagtcactgtcctttattctctgcatgtaatcccatggcctgtgggggcatttatgacatcactagtcacactaggagcagagatgactgcagtggatcaaagtggagggaactgctccagagtccccatcttccatcagtcgataaaacacatgttctgaatgcccattgggacctgccctccagaagcttattatttaagtgaggacacacaaataagatattcaataggaagaaaatattgactcccatagtcatacagggatgtgtcatgatcttctgatttccaacccatggctcaaaggccaaagaagtttttttaaaatttattttgttatctttttcctctgctagaagataaactcattgagaacatgaattgttgcctatgttgttcatttgtttccccagggcctagaactatgtgcctggcacatagtagatgcccaataaatatatattgaatgaatgactacactggacacccaatagtggggaaaacccctattaggaagctctctgcatacttatgtggtgagtgtggcaatttaactgagcccactatacaagagctccactgtcttatgtatttctcagaaaaagagaaaccaggtttctctctctcttttttttttttttttttttttgagatggagtctctctccatcacccaggctggagtgcagtggtaagatctcggctcactgcaacctctgcttcccgggagttaaagcagttctcctgcctcagcctcctgagtagctgggactacaggcacacgccacgatacctggctaatttttgtattttcagtagagatggggttttaccacattggccagagttcaccatgttggccagggtggtcttgaattcctgacctcaagcaatctgcctgccttggtctcccaaagtgctgggattacaggcgtgagtcactacgcctggcccaggtttctcttttattttctgtgtgattcaggggacatgccagtgcaccctatgaaatatgagtgggaggaagaggcttgtgagctttggtcagtaggcctggaggaaggaggatggctgggttcactgaatgggcactggcctactgaggcgtaaatgtcagctctgccactttaaactttaacaagttacatactcaacttctctgcgcctttgtttcctcatttgtaaaatggagaggggagggggtaataacaagtgcccaccctaaattgttatcagatgtcttcaacatgatagccattagtgtcatgccctctgctggtctggatatggtaattacccacttcccttccataaaagaatgctagtaactttctgccgtcactcattgtcttccacaggcaagactacagaagtcaacagagtcctgtgcaaagcaagaggaggaactggccaaggcagaggcaatgtctcttccactgagggtctgcccgggatagaatgggagagaatcccaagggtcttagaaacagatctgcttgaggcataggagggggaggtacaaaaacatcttgcaaatgaatttctgattcttatgcattcttatgcagctgaagggaaagaaaacttctattaaaaatactgcttttaccatttcttacatctctgtgtcaaataccattgttgaattccaaaccaaagtgccttgacacgtcccctggtatttcacatgagaggcagatgacaacttgggcaaaatatttcctttgcttaaaaccagaccctgtgcctaatgatgagatcacctctttgtgatgtgactgtttttccttcaagtcaggagttgctaggtaaccagccaagtgccagtgcaccaggtagggccccagggaggagactgggcttggttctgatttaactcatgaggtttgttaattttctttctttttagatagagagtgactaccaatctgtgtctgacctctgtaaggaccaggtctactacataaaggtgcaacccatgtggaggaaaagtccgagtagaggcagaatatctccaaggccatgggt

SEQ ID NO: 13518 - DNA, 2300 bp, Homo sapien
caatcttcacctcccgggttcaagcgattctcctgcctcagcctcccaagtagctgggattacaggcatgcaccaccacgaccggctaattttgtattttttttttttttttagtagaaatggggtttctccatgttggtcaggctggtctcgaactgccgacctcaggtgatccacccgccttggcctcccaaagtgttgagattataggcgtgagccaccgtgcccacaggtactcaagcacttgcatgtgatcaagatggagaagagctgacttttgcagttcacgtgggaggaaaaaagtaaatctagaaattctagttaactccaaacacagtgagtgtcattagtgtttctccagaagccaatccaatattaggctgcacataaagactgtccaaaacaaggacggagagcacaacaattcaggaagaagaccacctggaatgctcatatggccatcaaagatgacataggctctggaaactatactacagggaaagttggggctaagaagaaccttgagccaggagaagaaaagagtggatggtgggccatagaggcaagcatggcagatgccttctaagaggtgaagggccacaatgtacagatggtttgacttattctaggcgggtttcagaagaggcacaaggcccaagctgaagcctagaaggtagcagtttgagtacaatacaagaaaaaaacatttttctttgcatttctgatgttcatcagaacatatgggacggaagctcaggaaagagatcttaaggtagcatcaagagatagatgtcgtccacaaggaggcggtatatgaagctgtgaaatggcttggggtttccagtgtcttccaccatcatcagcccagaattaccaccttcccagttgcacttcctcctaaatctacatctctggtgccttttgccttgaacagtctcttgccttggagcttctcggccatcaaacagaagggggcaccctgcaccgtcagtcaaggcaaggaccaatctggcaatccccaaccatggaaaaggacctaaggctgggtgggatgtaggagccttccaggacctggaagggagcctcctgtaactactctctactccctttagagtccacagggctggaactctaaatgcagaataaggttaggggtgggcagagaggaagggttgtgatgccacctgacttccaaattgagggtggcacaggatcccccagaagctccctggggtacagaagtcacagcaaccctggacaatccaggggtttggtaaagtgtacttaccaattttgaagaggggaaggggttctcttaaggtgtagaaaggactatccagggagttgcaaactttgttgtaagtggacaatcaccctcgctcctcactgcaccgtcttctccttgcccaacaatgcacgcgggtcctagcaaggtattcgagtccagatctctctctctctctctctctctctctctgtctctgtctctctctctttcctctctctgtctctctgtctctgtctctctctttcctctctctctctctctgtctctgtctctctctttcctctctctctctctctatctctgtcacacacacacacacacacacacacacacacacacacacacaggcaaagtgggcaaagcgggcaaagcgagcaaagcgagagggttggtacccagtctgggcgcgctggagctaagcaactggcctttgtttgtgaattggagcagtttaggggacatcctccggtcgccgcggggcgcgcgcctccgctgagtgtgcggtgcggtacccagcggtgcgggggaggctccaccgcgccagcccagggcccccgcaccgcccccgccagctcgacgcgcccagcgttgcgctctccacggagcgggcggccgcagcgcacttggctggggcgagaggcgagaggggtgggcggactgcttggttggcgttggcgctctgcagtgcagtggagtgttagcccagctccctatatggtcggggattagcttggcgctgctgaggctgaggctgagccaggagctggaggaggaggtggaggacgaggacgaaaaggaggaggagaaagagcgcagcagcagtcagcgcacgccgagcggctgccgggggaagcagaggcgccggaggctggggcaccgccgacgcctcgggagccatggccgaagggggagaaggaggcgaggacgagatccagtttctgaggactgtgagtctccgcggcgggggcgaggccgtgggcaggtggggaggagcgcggagcgcggcgaggag

SEQ ID NO: 13519 - DNA, 2300 bp, Homo sapien
tgttatgctttaccagaaaggagctaggagttcaaacttcatagaaaaattaaaatccattgggaagaaaccttgacattaatgaaaaacatatataatattatagtcatcgatcctcataaacacaatggccccatttgatagatttttacttctctcattttggatctccactgaactctaagtcacattcaatcattgaaatggcttaataatcagtggcttaaaacttggggtatttattatagaagtgaccagtatataatgaccaatcattaccatatgaaattacaatccttttcagtatcatgcaatgttaagtgggaaaagttcaagaaaatattctaaagatatgttctcttgcataaatattcctattacaaatgtgtgtcaaagaccactataaaactaaaattcacttctttctcatacatgttcatctgtcagtgtttaaaattctattggctaacaattaaagtgtatactttgtctggattctcactcagaaaaaacctacataaagacatagtttctgagacacaaggaatttaaaatgaactggatattatatgactccagaggattatagccaatgtgttaggtgtgataatggcacagggtcatgtgaaaaagtgtccatactttaaaaatatacatactaaagtacaaataggtgaaatgagatttgctttaaaatattttagcaaagaattgaatctgacaattgttgaatcttggtaatgagtttctggaggttcatgtattatttttgtattatttttcagagttttgtgtaagtttgaaatgttccataataattttttaaaatttaaaaacattatattgtctagatacactcataaagaactcaggcagggaaaaaacgtttaaatttaaaatttaaattttaaactgaagtgcagttttaaaaatttgaattttaaatttaaaaactgaagtgcaaaaattatgaaattgacatttaaaaatctattcttttatacagctaatatggatttcatctaacttaaggaaaagctttaatgaagaccctgttaaaagtttgtatcaaatgaggacttataatgctttactccaaagcaacaaaacgcatatgcccaaaagatgtataaaaacaggcatacatttaggaaaaaaaaaaaaggcagccttttctctgctacaaatatttaaaactcacagtatactctttctatctcaaagacttttaaaaattattttccatctttagggaaaaccatatgagaaaataactcagcaacatgtctgtgaataatgcctagcaaagcttaaaaaaaaaaaaaaaaaaaaaaaaaagcttctagccaaaaagactaacaggaaaaaatgaacattttcaaaagcattttggaaccttattccagctacctccatgctaagccctctttttcctcccaaaatacgtcacttaactgtctgtcaaataactcttgcccattctacctgatcacactctgaagctgcagcttttcctggattctcttctcaatgacaagctgttcaaacagagaacacctatcaaaacgaatatcatcatctgctcctttctttcttcctttcaggatatactgctgtccagcaggggaagtaattaatgagttttttatgtatggcagcgtcatcccatcagtttgctgtctggtttgaatagctcctatcagctcttcattcatgccaagtacgctcaccgtccagagacatgataaagccgtacttccttctggatttttacctcactattcaaaaaacagggtaccagaagcatgggttacaaaagcatgaggaggacagaagaaatgccttcatcttctacagaaaggaagctgatggactgaaaagttcgtatggagaaaggaaagcaagagtgcaagaacatccatgcttctagtccagataatgttttttaaagcagcttgatttggaagcgtgtgtaattctgaaatacgaacaagcagaacttttccagggggtcaaatgcatataggaacaaccaggatttctcattgctgaagcattcaatgaatctttaataagttctcaacactcagattgtttgtgatcagatcaactgctgttaccagataaaggcaaaactcacccttctggttctataatcctatccaaatggagtcttcatctaccgcatactatcctaactaatgctacaggattatcaggaatacagatataaagacactgcaagaaataaaacactggcaaaataaaacatgaaaggaaagtagagaaggcattttggg

SEQ ID NO: 13520 - DNA, 2300 bp, Homo sapien
ttagctgggcatggtggtgcacgcctgtaattccagctactcggttacagtgagccaagatcgtgccattgcactccagcctgggcaacaagagcaaaactccatctcaaaaaacaaaaacaaaaacaaaaccggaaagcaacttatctctcctaggttctgcattagaatgaagtgcacagtactatcagatcaacaaaacaacagacttttaaaaatcttattatgtagtaaacttacaatactaatagacactgagttgggctcgcatgggtactgacctctccatctcacctggtcaattatctgcttcctggtacttgattctctgcatgtggccacatgactcttttttcttacaaatttccccctttcccttcataccacacttcagtcaaaagtatctcagcaatatttatctcctgggctacaaaatgtaacctgaatctttaaaaaatattaccaacaggagtttttgatccagtcaacaaacttttctccactaactaaagccaagtgtctctgcctgcttgtatgctatggagtatgtaatcagaaacaaattaaatactcagagaattcccttctctggtgagtggtccattttaaaccagcgtaaccgtttggtcaaaaacaaaaggtttgtttcttcttcacattcagagttctagaccattaccttctaaataactcaggttcaccaaaatatcacttgccaacacccacgtgtggtggcacacgcctgtaattgcagcactttgggaggccaaggtgggtggattactagagcccaggaattcaagatcagcccggacaacatggcaaaaccccatctctacaaaaaagtaccaaaaattagccaggcatggtggcacatccctgtagtccaagctactcaggaggctgaggtgggaggatcacctcagcctggggaggtcaaggctgtaatgagctgtgattatgccactgcattcctggatgacagaatgagactctgtctcaagggggaaaaaaaaaggtatcatttgacaaagcttctcacctacaatgaatccaaccacccgtctcaaatccacccactctgttcacctattaacaattcatccaaaagcctagaactgagctctcatacaaaatgaaacaaagcaaagcaaacaccaccaccccattttaaacagcatggagatctcatccctgttccataaagttaagcagattccccaaagaatgacatttcaaaagagaaaatatcaatcacctaagatttttcaggtaatgtccctatccccacataactacccattctcgtaagatgccaattaaccaagataagtgatttcagtatgattttttttttgttttttttttttttttgagacagggtcttgctatgtcatccaggccggagtgcagtactgcgatcagcttattgcaacctccatctcccagttcaagcaattctcctgcctgagtctctcaagtagctgtgactacaggtgcatgccaccacacccagctaatttttgtatttttagtagagacagggtttcaccatgttggccaggcaggtctcgaactcctgacctcaagtgatccacccacctcagcctcccaaagtgctgggattacaggattgagccactgagcctggccagtaagcctaaggttctaaaattattaaaaactccattgtctagcaactaagtaatgcaccacataccattttggtcaacaatggaccatatttacaacagtggtcccataaggttataatggagctgaaaataatgtcatagtgcacagcattattcacaggtctgtggcgatactgatgtaaacaaacctactacattaccagtcatataaaagtccagcacatacaattatgtacactacataatactgacaatgatactaaatggtttatgtatttactatattatactttttaccattattttagagtacagtcattctacttacttcttaaaaaagctaactgtaagcctcaagcaggtccttcaggagctattccaaaagaaggcattgttacataggagatgacagctccatgcattttgctgaccctaaagtccttccagtggtacaagatgtggaggtggaagacagtgatattgtgtccggaatttattccttcttgtgggttctcggtctcactaacttcaagaatgaagccgcagaccgtcgcggtgtgttacagttcttaaagatggtgtgtccagagtttgttccttcagatgttcagatgtgtcgagtttcttccttccggtgggttcgtg

SEQ ID NO: 13521 - DNA, 2300 bp, Homo sapien
ggagaggggttcattctggcatctagtgggtagaggccagggatgctattaaatattctacaatgcacaggataagctaccgccacaaaatgttacccagccctaaatttgccaacattgagaaactccgatttgtgcaaatgtctagtttgagattaatgtgtggatcttcaacttggtgagaggccagaccagtgatatgctggtagatatttaaccatattcttccatgccccttccccactgctatggtctaaatgttcatctccctcaaaattcatgttgaaatcttttttttttttttagacagtctccttctgttgcccatgtacaatcacagctcactacagcctcaacctcctgggctcaaatgattctctatcttagcctcccaagtagtgggactataggcatataccaccatgcccagctaatttttgtagaaatggggtttcaccatgttgcccaggctgatcttgaactcatgtctcaggcaatccacccgccacagcctcccaaaatgctgggattacaggcacgaaccacacacctggcctgtaactgtgtaatcttggaagttacttaacatctgttttagattcctgatctgtaaaatggagacaacactagcttacctcgtaggccagctattagtcccaaatgaagtgatatgagaagtatgtagaatagtgtttggtgcatataagtgctctacaagtgttactatttttaagactgtttctctggagttgacaatccttcaatagttccccctgtctggaaggcgcccctactcccatttaccaaccaggcaaactcctactcaaccattaggctttagctcaggggtctatttctcatgaagccttgggtaacccgtttaaatataatttaacttttcttctttggaccttgatcttgaatctctcactgcactcagcaacacggtactgtaatcatctattcacacgactagattatcttccttgtgggcagtgagctacttgagggcaggggcaaggttttttttttgtttttgtttttaatttcaggacatagcactgtgcctgatgcagagtaggcaattagaagcaatgaaaagtattaactatgtatggatataggaaagaaccagaaagtactgagggggaagaaaacacttattctgctaggctgacattttagcccttgctttcattattttcaggtggtttcagtcccaagttaaaaactgctttcatgcatctgtgtaaccaactgttccccttcctgttttctccttggttgaaagaagggactggagtgagaccgccttagaatgccagttccaccactacctagttattcactttagtcaagttttttttaacctttccaaggctgttacctcactgcagaataaggatgacagtcatccctacctcatagagctgttatgagaatgaaatactcatgtgctcaataaatgtcagctgtagtagtcatttctacagaaattctgctgaggactttgacgccctttctagccatctcccagtttcgcactgttctctctcccacgtgctgcagtccacctctcaccagacacaaactcttgtctttacatccacacctcctgaaccctgacttcggtatagttttaaaatgatacacattcgttgctgaaaattagattaaacggaggaaaaaaaattaactcacttcaaatctcagcagttaaccactaacattttagtatgtatttgtttagaccttttcttatgcaaatacatacgtttaaactttttttttccgagagttcacatcatacaaattttattttatgactcgtccttgcacttagcacggtctctcccccaacctatctctgatgccttgagaatccccccgccccgctgcagacccccaccacttccagctcccagcggtccggccttcccgcggtcccggttccggccccacctgcgggacgccggccgccccgccccgccccgctccgctgcggccggcctcgatccctagccccgcaccccgcgcctcgctgctaccgggcgcctttcgctcgcggctcctccgtgcggcccgcttccggtggggccagggcgtctccgccgcagctcggctcccgcgcgctcagcaccgccagcggcggccagatgcaggcggagcgaggagctcggggaggccgtgggcggcggccaggccgcggccggcctggcggagatcgccacagcgagcggcccggagccgcagcggcggtagccagaggcggcggcggaggcggcggcggggacggaggc

SEQ ID NO: 13522 - DNA, 2300 bp, Homo sapien
tgacagtacttcccagacttcttcatgtcttggcacacatagaaaatggtaatattttcccagtactctggaataacaagacaatactgctcccaacagaaggggacccacctagccaaccccatagcctgtggcaggagtcgacagtgtatgcgttaaatgggtccagtttatgccttcatgtgaagcagtttcacctattttcctgtcctatagcaatacagtaatttggctgggcgcggtggctcatgcctgtaatcccagcactttgggaggccgaggcgggaggatcatgaggtcaggagatggagaccatcctagctaatagggtgaaaccccgtctcttaaaaatacaaaaaattagctgggcatggtggtgggtgcctgtagtcccagctactcaggaggctgaggcaggagaatggcatgaacctgggaggcggagcttgcagtgagccgagatcgtgccactgcactccagcctgggcgacagagcgagactctgtctcaaaaattagtaataataataaaaaataaagtaatttaatgacctcagtaacagacctctctgtcacctgaatttggtctaaaaactcaactttattcttacattctctttttcttagagctataaagatgaactctttcagttcaaggactatcgtatatctcttttatatgccccacagcagctggcacactagtgaacacaaagtatgttctaaagaacatgtcacattgaaatcctgctctggatattattgcttcagaggtattaagaggtcatttcttaatcaccaccttatcttcagtcagcaatttgattctaccagtcaaaaggagttagatatatcttactttaaaatattcaccaaaaaaatgcaagtccagaacctcccttattcattcacacgctctttcactgcaagtccttcctcatatctaacacagtggtaccccatgtgctttaagcctactttgtcttgatttgtccttgaaaaggaaggagggagtcactcatcaatattctacataacaatatgagctggttatcatgatgtcccaatatcactgggttgtagatgccattaaagttttccactgtagttgctatagaaacaatgaagagtaacaaggacaggttcaggcataaagcttctcataaaaaaaaaaaggtgtttcagaaaacgaaggcctaacctcacttaggaaaagcctcaaaagttggcaagtccactcgacaagaaaaggaattcatttggtacacagggttaccttctttgatttttatgttgctttgcttcatttgtaatgtattgacagcagagaacaagaaacaatcggccaaggttggaaacccagaggcttttattactgtgggagtctttgtcttatgtagtggtagaaaataaacctgagatgattactgctctctcttaatgctggtatcctaaaaataaacatactctagatggtgggatgaaaaatgggaactgttaaagtttgagtaatcagggaagagctcaaaaggatccacactcccagataaccacttatatttcatttgcctctgcaactttcctcaaaaataagttaccctttcaaaaacataatcaatgatttaagaagtttattgtggaaaacattcaggctggaaactcagttttcatactcaactatcatccaaaaaaataaatcaatccatcagccgtggaacctaccttatgttccaaatctttttgtggaaagatctgtccagcagcctaggaatcaggaaaagttattctcccaaaaagtgaggcaggaaaaaaaaaaaaaacgggaaaaagagaaggcagaaaatctctaaaggctaattatattaatttcgaacaggagaaaaaaatttttttaactcaagtgattttggaaggcagagggggattcaaatgttactgcacattgcagttggaaaattccaatttaacagcccctttgtgaacgatcattccccttttctaggaacctaggaaatcattctcagccttgcaacttaaaatatggtacatggatcagtagcatcaagaatactcaggagcttttcagaaatgtgcaattgtgaaatatggccaagatggcggattagaagcagcggcagcccgcagctctcatgcaaaggaatgaaaggtgtgagtgaatacagcgccttcaactgaaatatccaggttctcgctttgggactaattgggcaaacaacttgacccacagaaaacaaagaaaagcagggtggggtgacggcccacctgggagcagcacagagc

SEQ ID NO: 13523 - DNA, 2300 bp, Homo sapien
gtgaaaaaggcaggatacaaactactacatgttgtattttactagtaaaaacctaagtcatatgattccaaaagaagctggaaaaatggtaggcaccgtggctcacgcctataatcccaaaaatgtgacaggctgaggcagaaatatcacttgaggccaggagtttgagaccacactgggcaacatagcaagaccctgtctctacaaaaaattaaaaaattagctggacatgatggtgtccgcctgtagtcctatctactgaggaggctgagacaggaggatcacttgagtacagaagttcgaagctgccatgaactatgatctcgccactgcactccaggctgagtaacagaaaaagaccttgtctcaaaaaaataaaaagaaagatacaatgaaacattaagggttgttttcctactttgtttctaatatactatttttaaacagaaattaaatgctttttaaaagaactgtatacagaagagtggccaaatggtcaattaaggcttattcctaaagcttaatgagaactttatcattaaaacatcattaattagggtaaactctaacgaatgccctaatgccagattcttaatgacagacagcagtaaaatactggttgtaaatttgtcactatttattaatctgaggttgaataaccactcaagggcacttagatgatctgaacaaatatgtaaatcagatttggatttaaatgtctacatttaagttgtctgattttcagataccatttgctggtgtacgaacccaccaaaggaaatacttcctaattatttgctttcagtttacagtttcacctccaagtaagggtggaaagatttaaaacaacatacgcgtgcctagacatttcaaaagcaggctgctgcaaaactagtgctaacaaattcatcctgtcttttaatatagacagaaaacccacttccactaatagcatgaaaggacagaagcaagaaagcaatgtagaggaaccctagtctcacataaatgacaagtgtgatatagcaaatctctcgatgaattcaactgtaaaaaagaacaacgatcccacccccaagcaaaaaaaaaaagaaaaaaaaagtgctttgattagggatttcagagcctattaattttagaagcagtaacattagcctcccagtctatgtcgtcactagaagccctttgggttttgagaattcccacttgtgtcgcatctttctacataataacaagctaccaaaagactgaagtgaatgcaaaaaacgactaggttctagggaaaccagatgagatataaaagaatccaacaagagactaataagggtccacctgtccccagggcccaggaatgatcgtccccacatggggccaaaataaggttggaaataactgactccatgctctgaccatggcagggggtgagcgcctgccatgctcattccagaggtacaggaccaggaaagggaaagcatccgactgcctcccaaggtctcccggcatagaccgttagcggcaccctccccttcagtctgagacagcgacgttgtcccgtcctgacacttaactctcctggtggggtccctgtccggcctccatcccagcctttttcccgctgccctcaggatgctcacttaaggaaaccgacgtgctcttctccgtctaccagcactcgggccgccgagatccagtcctgaggcttcacccctggaacaactgcacgcccctcaatcttgaagcgatctcctatgccgaccccactccctcccgatccctcagcagcagccccgggcacctccgagctctggacatcccccgatagcagcagcagcagcaggacgggaaagaagccccacagagcggccgccatgacagcagctctgcactcagaccggcagccccggaagccctcccagtctcccggccgccaccgccgccgctggcggcttgatgttgtcatcactgcgcgcccgtttctgtcataagctgtgggatccaaccagagggaagagatcatggccgatcgactagcgaggcggaagtaaggcggaagtactgcccttaactcccggcactctggattggaagacggcgcacagagcctgtgtcaagtgcctatgaaggggactgcccatgaagtgaaagtcaagtgtgtgttgctgcggcagccacggaggccaaggacctcacgggagtaaaagatgacgagactggcttcgggagaaacaccatccagaagagacctttcaaaaaacttctagagactccccaagacgtatgagatgaaaggcttcttctgtctg

SEQ ID NO: 13524 - DNA, 2300 bp, Homo sapien
aaaaaaagaaaaaaaaagtgctttgattagggatttcagagcctattaattttagaagcagtaacattagcctcccagtctatgtcgtcactagaagccctttgggttttgagaattcccacttgtgtcgcatctttctacataataacaagctaccaaaagactgaagtgaatgcaaaaaacgactaggttctagggaaaccagatgagatataaaagaatccaacaagagactaataagggtccacctgtccccagggcccaggaatgatcgtccccacatggggccaaaataaggttggaaataactgactccatgctctgaccatggcagggggtgagcgcctgccatgctcattccagaggtacaggaccaggaaagggaaagcatccgactgcctcccaaggtctcccggcatagaccgttagcggcaccctccccttcagtctgagacagcgacgttgtcccgtcctgacacttaactctcctggtggggtccctgtccggcctccatcccagcctttttcccgctgccctcaggatgctcacttaaggaaaccgacgtgctcttctccgtctaccagcactcgggccgccgagatccagtcctgaggcttcacccctggaacaactgcacgcccctcaatcttgaagcgatctcctatgccgaccccactccctcccgatccctcagcagcagccccgggcacctccgagctctggacatcccccgatagcagcagcagcagcaggacgggaaagaagccccacagagcggccgccatgacagcagctctgcactcagaccggcagccccggaagccctcccagtctcccggccgccaccgccgccgctggcggcttgatgttgtcatcactgcgcgcccgtttctgtcataagctgtgggatccaaccagagggaagagatcatggccgatcgactagcgaggcggaagtaaggcggaagtactgcccttaactcccggcactctggattggaagacggcgcacagagcctgtgtcaagtgcctatgaaggggactgcccatgaagtgaaagtcaagtgtgtgttgctgcggcagccacggaggccaaggacctcacgggagtaaaagatgacgagactggcttcgggagaaacaccatccagaagagacctttcaaaaaacttctagagactccccaagacgtatgagatgaaaggcttcttctgtctgtgtgcgtttaactcatttctccttagccccgagattacgcgctgctgtgcctgcgactgcagcgtttacgccgagataactcgtggattacagtgccaaccttactcccaaagtttgccacgaaatatctcgcttctgttattttcgcatggttctggtatattgacttttgaaacaaaagacatcattctgtttatagcattctgtttttagtagtgggatttccatctacaaaatatagtaattctcgatcgctgaaatgtcaaatcctagaaaacgtagcattcctatgcgtgatagtaataccggtctcgaacagttgttggctgaagattcatttgatgaatctgatttttcggaaatagatgattctgataatttttcggatagtgctttagaagccgataagatcaggcctctgtcccatttagaatctgatggaaagagctctacatcaagtgactcagggcgctccatgaaatggtcagctcgtgctatgattccacgtcaaaggtatgactttaccggcacacctggcagaaaagtcgatgtcagtgatatcactgacccattgcagtattttgaactgttctttactgaggaattagtttcaaaaattactagagaaacaaatgcccaagctgccttgttggcttcaaagccaccgggtccgaaaggattttcgcgaatggataaatggaaagacactgacaatgacgagctcaaagtcttttttgcagtaatgttactgcaaggtattgtgcagaaacctgagctggagatgttttggtcaacaaggcctcttttggatacaccttatctcaggcaaattatgactggtgaaagatttttacttttgtttcggtgcctgcattttgtcaacaattcttctatatctgctggtcaatcaaaggcccagatttcattgcagaagatcaaacctgtgttcgactttcttgtaaataaattttccactgtatatactccaaacagaaacattgcagttgatgaatcactgatgctgttcaaggggccattagctatgaagcagtacctcccgacaaaacgagtacgatttggt

SEQ ID NO: 13525 - DNA, 2300 bp, Homo sapien
gctcatcgtgtgctcaggattatccttcttgaacaggatgtaggagttcagcactgtaatgtgtagaagatggtgaaagaatttcttataccaaaccttgtgtcttttgcgctcagatggataagaagtaagcatttgatcagccgagtccactgctcccatattctcgttataatccacaatgacacgtggccttttagttttctttccatttctattgtttacttcaatcacagtatcattgtggaatgttgacaacattgtcacctccttgccgtcacaccatttcagtgccataagttcaccacagaatctggctacagtcgtcccctttgcaatcctttttttcagatcatttggaatctgttttctgttcaaacgagctgtcccaactgcatcagtcctattttgatgtaattctctgaaaagcatgggagatatattaaagttatcgaggaagacacaatacccttggccaagaaggtcattgaccaaggtaagaacaatgcgtgatgatttcaggccatccgctgaatctttcaaattcatgccaggccctgtgtgaacaagcgcattccacacataaccagactgactttcacaaagtacatatagcttcagaccaaatcgtactcgttttgtcgggaggtactgcttcatagctaatggccccttgaacagcatcagtgattcatcaactgcaatgtttctgtttggagtatatacagtggaaaatttatttacaagaaagtcgaacacaggtttgatcttctgcaatgaaatctgggcctttgattgaccagcagatatagaagaattgttgacaaaatgcaggcaccgaaacaaaagtaaaaatctttcaccagtcataatttgcctgagataaggtgtatccaaaagaggccttgttgaccaaaacatctccagctcaggtttctgcacaataccttgcagtaacattactgcaaaaaagactttgagctcgtcattgtcagtgtctttccatttatccattcgcgaaaatcctttcggacccggtggctttgaagccaacaaggcagcttgggcatttgtttctctagtaatttttgaaactaattcctcagtaaagaacagttcaaaatactgcaatgggtcagtgatatcactgacatcgacttttctgccaggtgtgccggtaaagtcatacctttgacgtggaatcatagcacgagctgaccatttcatggagcgccctgagtcacttgatgtagagctctttccatcagattctaaatgggacagaggcctgatcttatcggcttctaaagcactatccgaaaaattatcagaatcatctatttccgaaaaatcagattcatcaaatgaatcttcagccaacaactgttcgagaccggtattactatcacgcataggaatgctacgttttctaggatttgacatttcagcgatcgagaattactatattttgtagatggaaatcccactactaaaaacagaatgctataaacagaatgatgtcttttgtttcaaaagtcaatataccagaaccatgcgaaaataacagaagcgagatatttcgtggcaaactttgggagtaaggttggcactgtaatccacgagttatctcggcgtaaacgctgcagtcgcaggcacagcagcgcgtaatctcggggctaaggagaaatgagttaaacgcacacagacagaagaagcctttcatctcatacgtcttggggagtctctagaagttttttgaaaggtctcttctggatggtgtttctcccgaagccagtctcgtcatcttttactcccgtgaggtccttggcctccgtggctgccgcagcaacacacacttgactttcacttcatgggcagtccccttcataggcacttgacacaggctctgtgcgccgtcttccaatccagagtgccgggagttaagggcagtacttccgccttacttccgcctcgctagtcgatcggccatgatctcttccctctggttggatcccacagcttatgacagaaacgggcgcgcagtgatgacaacatcaagccgccagcggcggcggtggcggccgggagactgggagggcttccggggctgccggtctgagtgcagagctgctgtcatggcggccgctctgtggggcttctttcccgtcctgctgctgctgctgctatcgggggatgtccagagctcggaggtgcccggggctgctgctgagggatcgggagggagtggggtcggcataggagatcgcttcaagattgaggggcgtgcagttgttccaggg

SEQ ID NO: 13526 - DNA, 2300 bp, Homo sapien
gtggcatgatcttggctcactgcaacctcagcctcccgggttcaagcgattctcctgcctcacctcccaggtagctgggattacaggtcccaccaccacgccctgctaatgtttgtatttttgtagagacagggtttcaccatgtttgacaggctagtcttgaactcctgacctcaggtgatccgcctgcctcagcctccgaacttgctgggattacaggcatgagccaccacacctgatcaagttaccacttttagctttgcattttccaaaatgttattgccatcacctgaacttctcctgtctttgtcctcatgggttttatgtctttacaaaccttttattgtcatttaatcaggtttcaaggaagggtagaggtaattgcatgtgttcaatccattcttttaaactaaaagtccccttttttgaaaaaaaaaatctcacattgtagcattgtggacaagaccctttgtgatctaacttctatctctagcctcatttaagtcgcccccaatgtaagctccagccacaagtgtctacttaagagattgccaaacaaaccgtgttgcttcacgcctttcagttctgcacatgctagtttgtcagtgtgctgatttgtctgagtaaccttctgtcagagtacttattgtattattgcagttatttatttacttttcaaaaaatctcactctagaggtttcttaacctgggatacaggtggaagggttgtccattaattagctgtaagaaatctttcgctgaaattatttgtaaaatttcatgtgtatgttcatatttttggagaattgagaatatgcctcaaaaatacttgtggagctttttaaaaatataattgctttgggctccactgcagagagagacagtattatactgagttacagtctcttaagttagagcccacaaaaatccattttcaaaaagtttcctaaatgattctttaaaacaggatctctgagcaccatctacattaacgccagggcctggcttatagtgaatgcttagtagatgtttaaagaaagaataagggagcaacttacattcagggcatgacctaaaataaatttccaacgtgaaaccagagtgcaagtgagaaaatcacaaatttcttctgttatataaattaagtcatagcatttgtttccatcaacatgccctctttagaccctctttagatataattagtaaaataggagggcattgatttttttttttttcaaaggtagaggagagctttggagagctgtctgcaaaaatgaaagaagaatttaaggattaggcataggacaagtcagttgtatgtagtccaattttggttcctctcattgcttagggttgttttgacccagtgatttagttgcacagttttaggtttctgtacatttggatgtcatagataccaccaccttatacaccttatttcataacctgtgtgtttattaaatggctagtgacatggaaaatggggagattgatgtgttgctttggcacaaaaaaatacatacaatattattgtcactggttccaattaaagaatgaggacaggctgggcacagtggcccatgcctgtaatcccagcatttagggaggctgaggcggatggatcacctgaggtcaggagtatgagatcagcctgaacaacatggtgaaaccccgtctctactgaaaaaatataaaattagtcgggcatggtggcacaagcctataatcccagctacttgggagactgaggcaggagaattgcttcaacccaggaggcggaggttgcaatgagccaagatcgtgccatcgcactccagcctgggcaacagagcaaaactccatctcaaaaaaaaaaaaaagaatgaggacagaaagatccttaatttcctggaatgccttgccttgtgcttcctctatgtttaaggtttttaaaaatgtgtaaattaaaatgatgtcctctgccttttttatatagcattgtgctactgttgtatgtttgtgtgtgtgttaaaaatgatcagactctttttgctgttttaattttctattttattttattgtctaggtacttaagagattatggcatcagaaacccacaatgttaaaaaacggaacttttgtaataagattgaggatcatttcattgatcttcctagaaaaaagatctctaatttcactaataagaacatgaaggaggtaagtctatggtttctagaaaacagataagacaatttaaacggttaggtctctagatatctctggttgaattgtttaaacaatgggaggataataattctgct

SEQ ID NO: 13527 - DNA, 2300 bp, Homo sapien
atgagatgtgagggcctgggctgcccatcactgatacaaactttataacttggctctggagattaacctgcctgagatcctgtgccctaacaagctccagaaatgagaatatcaaggttcttctctggcctccagcaactggaggccttgtattagctgagattcttctgtgttaacacagcagattccctgagttccaggactccattacttgtcttaattctttagcctcccttgaggataacgatcatatagtacactctttttaccctattcttctgatgagaggccagcacagtgccttttgcatagtgggtcatcaagaaattcctgttcatgatgatgaagaaatgacttgagagaaagtgacttcacccatgtgtgttgaatttttattttctttaaaacaacacatctacttagtggaagtcatattcaggaaatattctttattgtacatacatggaacctagggctccagcttcctttactcacctagctggactctctcaacagtaccacctgttaacagatgtggccccacacataggcatgtatgtgccttgcttatgcttggtacaatcgagaagctctcaaaggtgttgcttatgccaaatatcctaaaactattttcccactgccctaaggtcttgcctcaattttcaacatgactttttttttttttttgattaagtaaggactctgttactagggaggaaaaatacataaagttataacaacctgatgacatcttagttctgatcagtttatctgacaggcctcccattgctcggaactcccacggcatttaggagataccttttatcactgcagtgtattggaatgatctcttttcctgtttttcaagccactgagagctgcttcaggcgatttccagcaccaggcacaatttgcctggcacatggcgggccttcaaaaagattgttaaaccaaacttaagcagcctgctccctaggcaagccttgagttccgaaatgagtgcctgaaaaagcaagccaagggatgtagtcttgtggtgaggaagtatttccaccaaaggcactgcttggttggtttctgcaaggggcgagagaaccaccatagacaaacttgctcctgtcacagcttggctaaccttgaccggtggcttatctatgaaggtgagcagcctggttctaatgaagagaactgccctcagtaattaaaagttcatcatctacagacccaaccctaacctcataatctaatttagtgttccccatcccaacaagaccgaaccagcttcctgaggacaggttctgcatcatgtacatttcttgtgttcttaagagtctagcacaaagtttggcacataataggaactaaaaaaatgatgactaacaaacacgaagggcttaccatatgccgggcactcctctaagcattttatatgtattaattcatttaatcctcacaacactaagagacagatactattgttattgtccccattttacagaaggggaaagcaaagcacctaggagtttatgtgacttgctcaaggtcacatagttccacaatccatgcttttagaaactatgccttagagcgtttattagtatcatttttatttttatagagacgggggcggaggtggggggtggggggtagttgtccccatgtcgtccaggctggtcttgaattcctgggcttaggtgaacctcctgcctcggcctcccaaagtgctgggattacaggtgtgagccactgtgcccagactcttagtgtatttaaataggtgtgaatgaataaatctctcccggaaccataactttataggaaattgtttgcacctcctggtacaccactaaggcacggtctcccacactaggttgttcctagcgcacggtcggtcattcgttgacctttacccaccctcagttcctatcgcagtatcacttctcgcgccatagcaaggctaccgtgcgaagctctagccaccagggggcactgtggccacaggtccttttcccctccggcccttagcgacccccagaggggcggagccaacgttgggcggagcccgcgagccgcccacagcgccagctatcccggcgggccgcgcgcgcggccgcgtttgaatggccctgagtgggactcggcccagaagccgagggactctctaggctgccgggcgctggtcgtcagcgccgaggctgggctgaggcgccgcggtaccatgaggcgccggtaagtgactgccgagccggtgcgagccccgcgcccgcagctgccctgccctggcagggctactccagccg

SEQ ID NO: 13528 - DNA, 2300 bp, Homo sapien
agcatctccttccccctaactccagccatatcgaataacttggagtcaaagaaatacaaattaaaaaataatacagtaccatttcaaactattaaaaaaattatagactgtgaaatgtaaatggtgccatttttcctagtggacattttaattttttttgttgttgtttgcagaggcaaggtctcactatgttgcctaggctggtcttgaacttctgagctaaagcaatcctcctgcctcagcctcccaaagttctgggatgacaggtgtgagccaccacgcctggctcctgtgggcatttaaaatgaaaattctttaaaaatgtgcatactctttgatccagcaactccaatttcacttctaggactataactttaggaaataagaaaagacatacagatatgttcacagcaacactggttataaaaggaaggaaaacaggaaacaatttaaatgtccaataataggctatattatgaaaaaggtataccatacaaaacccaatcactttaaagaatgacatacattatttaatgacacgtcattaaaaacacatcaatggtgttatttggtaatgatgtgatacatcattaaaaacaccacataacctagcactttgggaggccgaggcaggcagatcacctgaggtcgggagttcgaaaccagcctgaccaacacggtgaaatcccatctctactaaaaatacaaaattagctggacgtggtggcgtgcgcctgtaatccctggtactcgggaggctgaggcaggagaattgcttgaacccgggagacggaggttgcagtgagccgagatagtgccattgcactccagcctgggcaacaaaagcaaaactccgtctcgaacaaaaacacaaacaaaccaaacaccagatatgtggtgggcactaatctcacaagccttgaaagtaggtagattatccaacttttacatgaagaggctgaaacaaattcaacttgcccaaggtcatacaattattaagtggtgaaaccaggattcaaaaggaggccatctgctgggtgcagtggcccatgcctttgtaatctcaacattttgggaggccaaggcaggagaatcacttgaacccaagagtttgagagcagcctgagcaacatagcgaaaccctgtcaaaacaaaacaaaacaaaacaaaacaagactggggcgtggtggcgcgccctgtggtcctagctcctcggaacgctcaggttggaaggaacgctcaggtgggaagatcgcttgagccggggaagtcgaggctgcagtgagccgtgatagcgccactgcactacagcctcggcaacggagtgaaaccctgtctcaaaaaacaaacccaaaacaaacaacaacaaacgcaggctaactgaataccgagcccatgtccccttccatgcccacaatgctgccttgcctttgtgcagaatgtggttagaactgtttacctcgcaaggttactgtgcaagtgaaatgaaataaacacatgacacagtggacattcaatactcagaaactactaagtaactcgctcaaggtcaagctaggatttaaacccaggatttgaatcttttgttccagggagcgcgtaggaggttaagaagcttttcttggcttccttttttttttttttgagacagagtttcgctcttgctgcccaggctggcgtgcaatcgctcggtctcagttcactgcaacctccggctcccggatccaagcgattctcctgcctcagcctcctaagtagctgggattacaggcgcccgccactaagcccggctaatattttgtatttttagtagagacggggtttcaccatgttagccaggctggtctcgaactcctgacttcaggtgatccgcccaccaattcttaacgctgagtcagtatgggctttccttcagccccataaagtgcacctcagaggtcagggaacacataacaaggacattcaaaaggggagcgcgcggaagtggctttaggaagcactaagtcttgcctggttttttttcctccctgcttttctaaatccaaacccggactcctcaacccacagcaccaccaatttccagggcggaaatgacgtcgtattcacgcgccggaagtgcatttgcagagtgagacaaagcggagaacgctggtgggcctgttgtggagtacgctttggactgagaagcatcgaggctataggacgcagctgttgccatgacggcccaggggggcctggtggctaaccgaggccggcgcttcaagtgggccattgagctaagcgggcctggaggaggcagc

SEQ ID NO: 13529 - DNA, 2300 bp, Homo sapien
tcaatactcagaaactactaagtaactcgctcaaggtcaagctaggatttaaacccaggatttgaatcttttgttccagggagcgcgtaggaggttaagaagcttttcttggcttccttttttttttttttgagacagagtttcgctcttgctgcccaggctggcgtgcaatcgctcggtctcagttcactgcaacctccggctcccggatccaagcgattctcctgcctcagcctcctaagtagctgggattacaggcgcccgccactaagcccggctaatattttgtatttttagtagagacggggtttcaccatgttagccaggctggtctcgaactcctgacttcaggtgatccgcccaccaattcttaacgctgagtcagtatgggctttccttcagccccataaagtgcacctcagaggtcagggaacacataacaaggacattcaaaaggggagcgcgcggaagtggctttaggaagcactaagtcttgcctggttttttttcctccctgcttttctaaatccaaacccggactcctcaacccacagcaccaccaatttccagggcggaaatgacgtcgtattcacgcgccggaagtgcatttgcagagtgagacaaagcggagaacgctggtgggcctgttgtggagtacgctttggactgagaagcatcgaggctataggacgcagctgttgccatgacggcccaggggggcctggtggctaaccgaggccggcgcttcaagtgggccattgagctaagcgggcctggaggaggcagcaggtgaggcacctgggcaagctgtacatcactgttcatcccagaactgcaccagagtaatgagacctgagccctcaggcataactctgaaaaagatgggtggcacacagacatcacctggggaggtagcggcttttctgccgtggaagtttctctgctcaaacaatgcttacatcagtcctcctgataagtcaaaggactgaggaacatacgagggggcttggtctaatctgagtaggtgcatctgaagatctttattcctatgattggtagatcaggaaatgtgggataagaagtatcggaggttgcagctttagtttcttggtttggttttttaggggtcgaagtgaccggggcagtggccagggagactcgctctacccagtcggttacttggacaagcaagtgcctgataccagcgtgcaagagacagaccggatcctggtggagaaggtacagaggtatagatgttaccgtagcccatgggccagtcctgagttacacactcatcctcttctcctaggtggagttaacgtagatagctcttatcctgaagatttggaaactaaactgcttgaggctggtatttcggtattttatatatcagctacaaaagtgcttaataatttgaaaaatagaagatgtttggaacataaggtataagaaagtaggttgaaaactatcttttggtggcaacatcttccagttgaagtgatcctttttctactctggttcccttacaccacatatccaactgtcaggatactctgttggctttacctactactttttcctgtgttcacctctcatcctaatccaagccaccatccttcatctagatttctgcagtagcccggctaatttttgtatttttagtacagacagggtatcaccatgtttgccaggctggtcttgaactcctgacctcaggtgatccatccgccttggccttccaaagtgctgggattgcaggcatgagccaccgcgctcggcccggggctatttatatttctaatttctcctgtcattttgttacattttttctagaaacttatccatttcctaaaatttcaaatgtattgatataaagttgttcataatatgatcacttccatatatgcaagatctgtgatgttcattttttcattcctgatattgaatattttgtctcctctcctttcttcatcaggctcaccagtattgattttttaaaaattattttcatttatttttacaggtcactgtacccatcaccagtattgattttattaatcttttcaaaaatacttgggtttttttctagtttcttgaaatggatgcttagtttatttttagactgccattactttttttcttttcttttgagacagtcttgctgttgtcgccgaggctggaatgcaatagcacgaccttggctcactgcaacctctgcctcccagggtcaagcaattctcctgcctcagcctcccgagtagctgggattataggcacccaccaccacgtccagctaattt

SEQ ID NO: 13530 - DNA, 2300 bp, Homo sapien
ctgaggggaaaaaagagatagggattcttcctcataccttcatcccaggactcctgggatacgggaaacccttcagcattgacacataaattagcttattcccaccagtaccattaagaaagaagaggtttaggccaggtgtggtggctcatgcctgtaatcccagcactttgggaggctaaggcaggtggatcacctgaggtcaggagttcgagaccagcctggccaacatggtgaaaccccgtctccactaaaaatagaaaagttagctgggtgtggtagcaggtgcctgtaatcccagctactcgggaggctgaggcaggagaatcacttgaaccaggaggtggaggttgcagtgagccaagatcgcaccattgcactccagcctgggcaacaagaggaaattctgtctcaaaaaaaaaagaaagaaaagaaaaaggtttaaaaagaaaaagacaaaccgaactggcagaaaaatctgacttgagcagcttcacttagaaattacttgggttctctctaggaatcttgttagctgccctattgtggcttttcttcttctttcatcatttttatcttatttagagtaacacttctaggttttcccattttttaaatacacaaatgggagtctggtattatgtatgcaaaaggactggatctctggttacttcacagggttaaattcaatccaaagttcagacttttctgaatatataataattaagcagctaattttgtagctctatgatcagataacctcagattatgatgatgccaggttttaagtttgtgctcttcttttgcctgtctccttgacaagttttgaagacatggagttcctagaggtgcttaccgagggactagagcgagtcctacttgtccggggtggtggcagtgaagtgatcaccatttattcataacctactctgaatgaccgtgcttgacctgttttcttaaaaggcctacgtcctccatggaagtgccagctcattactaccactcccactcaactagaagcctgtgttctgtacacatcatactgaactcttgatgagctgagcctcaagtacctgtgtaaaagagctcccatctgatctgcagtcattacagaaaaagcaaatattccctcaacatcagaacaatgctcaagtctttcaagccacgtctgagcagtcaaaggcaaattagaattaacaagctgagccaataaatgaattggtaaaagggatgctagaaattcaactgaagaaaaaaagcaagtcaagtacgtattcagcattaaagatgaatctcagaagtcatggttcaatgttgacactgtgaggataacaactagagacagcttcatcttactaaagaatttatggtcaagtatatttggacctattatcctcggcaagccaagatgcaaacattttttagctatatttctttagtatacccactgctgtaattttatattaggatactaacttgaaacatggctgcagcctctacttcttcaaaaacatccccccaaaataccagatttaaatatccaaatactgtgtcagtgtatacttcaactgttttgtttctcttaactcaaaacccattctgtcattgtaacacaggcagtgttaccatggaaattgtttttggtaaggtaaaaattatttctttcaggttcctttcaaatggccgaactaagagaactccaaaaggaagctattaacatttactgaaatagtctgtggttctctatacaacatggacaaaacatacaagctgttgtctaagaaatgcaggtcatggtgcacattaatcaacaggttcttctccccccgcccccacccccgcgcctttttttatgccctcttattaagcacaggtcaaaaaatcttaaggaacaaatactaggaaaactggctaaacatccttccctgaaagcactggaccatcttttaaagggcacatctagcaatggaattggaagttctagagccacactctttctttagtgccaacgttactgagcggctactctccttacctactttactaaaatggcatacagattggcattgacctgttgaagaaattttaccactaagaaatcttttgcctcatctacaaagccatagttaagacttgaggcattcaacttaatgccaagtataagcatttccccctttttctttcaattttattcttcattctgactacagaaacttggccctgaactacgagattagccaagccaacagtcttctaatttgttttcagaaacttcaggccgggtgccgtggctcacacct

SEQ ID NO: 13531 - DNA, 2300 bp, Homo sapien
cttggcctcccaaagcactgggattacaggcgtgagccaccacgcccagccttgtctggctgtcttttctttaaaataagtcagatggatcaaagagacgattgctaagtaaattcacatacaatttcttcaggattcatgtgttgtgtgttctgctccataggcatgtttggccctacattttcactactttctaccttaattaccattttcttccttctagtatctagacttgttgggaaaaattggaatgacagcattacagtcatagtgtcaataatttttttccctctgtttccttctctagcattctgagcccttggtctcaggtgctttctctttccattggcttttaggaaagttcatccttctgtcttcagctcttatgttttgatgaggactttgtttctttgtttccatcatcagcctttattaaaactaatcctgaattttggtctcttggtatttgtctttgaaatcacttcaacatgagtcagttaacaaacatgttgaggccgggcctggtggctcacacctgtaatccctgacctcacctgaggtcaggagttcaagaccagcctgaccgacatggtgaaaccctgtctctactaaaaaagacaaaattagccaggtgtggtggtgcatgcctctaatcccagctattcaggaggctgagacaggagaatcgcttgaacctgggaggcggaggttgcagtgagccgagatcgcgccattgcactccagcctggacaacaagagtgaaactccttctcaaaaaaacaaaaatgttgaacattttataaatgttacatgaagctctgtctgtattacatgaagttgtaattgtcacagcaacgttaaaacaaaattcttgtctcaaaatgcttataatgggcagataggacccctgcccctcatgcccccaaacctgctcctctcattcttttttttttttttttttttttgagacggagtcactctgtctcccaggccagagtgcagtggtgcgtctcagctcactcactgcaatgtctgtctcccaggttcaggcagtcctcgtgcctcagcctcccaagtagctgggactacaggcacacaccaccatgactggctaattaaaaacttttgggtgtgtgtggagacagagtcttctatgttttccagcctggtctgggctcaagtgatcctcttgcctcagcctcccaaagtgctgggattacagacatgagccactgtgcctagccacctcctttcattcttaatcctggcagctgtgttatggctaggggtaggggagtaggggaatctcacagccatgaaaactgataccaccataaattcatcatttccaacaatgttgtactgtcgacactatttagacattctgtgtgattctagttagcttcccttctcaatccttacagagttaaaatgcttaagacctcaatcctccattctcatatagctaaaccttctacttcacagagtaaactgtatttctttatttctaatattcttcttcataagttcttaccagcatctgtgttgacacctatcctttaccaccttccttgttgtcgttcaatattgatccatacacctgtgctctagaacctttcttgcttcctaactcttgtgatttctaatttttttattgactccttcccccttgatatattacaatattcaatctctctgtcactctttccttttctttctcgccgatttttgctcatttagtcttccaaataattctcaaatttgtcccgttctctccatcttcactgctactatcctagtccattgttattttttgtctaacctcctaaagccatccattacagtaattaccagaggaatttttctcatatgtaaatctcatcctattactccctcatttaaaaccccctaatgtctccccatgctgacaaagtctgtactgcttagcaggtacatgtacctacacgatctagaacatcccagcttaatagcttccttgtttattactcttttgtacatactgcacaccagatataatgaatgttcttgaatgtctctgttgctttaacacatttattccatcctcttggagtgttcttcagttacctagcaaacaatcttcatgttaagactgagctcaaataccacttcttccttaatggtccctgtgatcactccaggaaatgtaatgtaatgtacacgctaccatactctatgtctacacctccaatatagtactttagtcacccactgcaatcacttgtcttacccgtatgtgctgtaagccccttaggggtagc

SEQ ID NO: 13532 - DNA, 2300 bp, Homo sapien
tcatgccattctcctgtctcagccttctggaactacaggcgcccgccaccacgcctggctaagatttttgtatttttagtagagacagggtttcactgtgttagccaggttggtcttgatctcctgacctcttgatccacccgcctcggcctcccaaagtgctgggattacaggcatgagccacctcacccagcctagctttttctttaaaaaaaaaaaaaaaaaattgtttattccaaaacaaggccagtattcttgctagcataaatcagttatcaacgtgattgtgcttttatatttaccttctttttttcctctttaatcctccttcccccctacccttcctagcctctggtaacaaccattctactttctatattcatgagatccacatttttagctcctacgtatgaatgaaaatgtgatatttgtctctctatgcttggcttatttcacttaacataatgacctccagttccatccgtgttgccgcaaatgacatgatttcatttttatggctgaatcgtattctgttgtatatatattccacattttcttcatatactcatgtgttaatgggcacttaagttgattccatattttggctgttgtgaatagtgctgcaagaagtggtatataactgaatgactaagaattcaaagcatcattgcttcagttaaatttagcacaaccttacttgtcagatggaaggcattcccaataacagaggccttatactacatcatcaatatggacattacacagggctcaatttactgaactcccctgctaagtacagaggtagaacctcatactctaaagtcgtcagctgagaacttgatacagttgtctgataaattatatcaagaattaagtatgttattttaagggtatgctaaaggaactgtacgccacttaaagggattttctgggacttttttttttttctttgaaacaaccactctgtacaatacaaaagttctgaactctttaaacatatatatttttttctttttctttctttttttttttagacagagtctcgctctgtcgctcaggctggagtgcagtggcgcaatctctgctcactgcaatctccgcctcctggattcaagggattctcctgtgtcagcttcctgagcagctgggactacaggcatgaaccaccacgcctggctaatttttgtatttttagtagagatagggtttccccatgttggccaggctggtcttgaactcctgacctcaggtgacccgcccaccttggcctcccaaagtgttaggattacaggtgtgagcaacggcgcacagccgtatctttcatattttaagttgatatagtgccagtcagtctttaaagaggacagtataaaaatgaaccattcccggctgggcacggtggctcacgcctgttaatcccagcactgtgggaggccgaggtgggcaaatcatctgaggtcaggagtttgagaccagcctgaccaacgtggtgagacccccgtctctactaaaaatacaaaaaaaaaattagctgggcatggtggcacatgtctgtagtcccagctactcgtgaggctgaggcaggagaatcgcttgaacctgggaggcggaggttgcagtgagctgagatcgcactactgcactccaggctggacaacagggcgagcgagaccctgtctcaaaaaaaaaaaaaaaaaaagttaactgttctctaatctttcttgtgtgaaatatgagggcagaggttgagatcatgacatgcagataagaatgacaacttcagtgaaggaaatagaggagcaagcggtagacagtagttcactgtgaattctgtccagtctccaggtttcagcagctttgggaagcaggctaaactgttcttggggttcttcaggttaataacaataagcaagggtggagtgcttaatccttttaagtgaatgataaacactgtggaaggcgtgtcttcaagcgccccactccctcagggctgtaggtcacgtgagcttaaagtacttcccgaatcccagccactgtctcttgtaggcagggatcacagtctgaaacgacagcaaggaagaggtaggcagggaaaactaactggaaggaagtttaaatacagaaagagcaaagtattatctaactataacaatgccacattttactgtgactaaggtagaggacccagaggagggggcagcggcttcgatctctcaagagcctagtttagcagacataaaagcccggattcaggattcagatgaaccaggtgagtacgcaacttgggagcttttggaacc

SEQ ID NO: 13533 - DNA, 2300 bp, Homo sapien
agacagatgattttgaaatacattactgaaacatataggaatggtgaaatgagatacttgtttcctgtcaaggaattttatttcttagcctgttcacttacttgcagggttcttaacattggatctgaaggattttaaagagttaacttagagaaattgtgaaatgggatacttgtttcctgtcaagcaattttatttcttagcttgttcacttacaggattggatataacattggatctgaaagatttttaaaagttatcttatccaattaaggggataatgattggagacatgtttcttaagcaccaaagtcagtaagtgaattttgctaccagttttttaatgttggctgcagttctgcctttatcttacaaaaaagaaaaaaaaaaaagaattagcattgctccatgctaccacctgtgtagacttaaaagctttaacctgaaaatattcctaatgaatatagaggagagaaagcaaactggcatgaatataaaaaggactttttccataagagatcccctgaggaatgaggcttcattttgcaccagaggctgtgtctccctgagaaaataaagagatccctggggtattaacgtctgagacatacatttatagagcttggttagtgctcagaaacaagaaaagtcttaacagggatagtatattggaattaggtggtacatataagtaaatgcagatacactggtaggaaattgggtttcataaaaattctgtgtttctttataaaggaaaagtctgaagtttgaatgaacggcaggcctgcctgaggaaaaaattgatcctgctgaggatggatgaaagctgtgggcctgaatcaagaaacccagactttataaagagtcaaactttaggaggtttacactttacattaggatttctcattttgttaccaggatctttttaacctttttgatcctttaatccttgaaaggatttggactttgtgtgtcatttgataaaagagaacttccgggaatacagttcccattgctaggagtgctgcttaaacataaccacttgtgaggagccaagaccccaggcaaaaccgggggccagtttctgggcccaggtgattgttaaatttagaggtcttgatcacagctataggaaatagcttttcaaacaaaacattggtgagtcagaatttatcgaacaccaccatttatacattaaataaacactaagaaaaaatattctagcgacaaatgtagtggtgaaaacatggaatggatttgagaaaatacatcaacgtcttctccaggtataaaaaaacgtattatttagtggaactttcagtctgactagaaagtggacatagcatttattaaaaggacaagaacaacaacaaaaaattaaagtaggacaaatgtgtttaaggtactttatagttttatttttatttatttatttctttgagacggagttttgctcttgtccccccaggctggaatgcaatggtgcgttctcggctcactgcaacctccgcctcccaagctcaagcgattctcctgcctcagtctaaggaatagctgggattacaggcacacgccaccacgcccggctaatttttgaatttttggtagagacggggtttcgctatgctggccaggctggtctggaactcctgagctcaggtgatcgatcacgcccgcctcagcctcccaaagtgctaggattacagtcgtgaaccaccgcgccaggcctactttatagttttaattttttttttttacataaaagtggtttatttgtatgtagacctctacataaaaattacaatgagggttattcccaggtataggagcggtgtttctggttaaagaaatcatgaatgatgttttcagagacactcatgaaagagaaatggctccccgggttctgagggtgaggagcagcgcccgccctctaggatgcttccagagtgagtgtgcagcacagccggaccgaggaaaaggattattcccctcttcacgcgggtcgggccgtgccctggactacagctcccgtcgtgcccctggccactcgtattcggccccgccccgcctgccgtgtcccgcggcgagcgcaggcgcgctgcactcggtcaccgcgggctgcggcggctgggcggggctttcgggcgcccgcgggacggttccgccctctcactgcacccccgggcttctcttcgcaaggttcacctcgaatgaggaacaagcggggagggaagggaagggctgcggcggcgcgggcgcaccccgtcgggcccggggctgggggaggccaggtcacgtaa

SEQ ID NO: 13534 - DNA, 2300 bp, Homo sapien
tttaaaaataaaatttatctgctaaggttcctggcgactatttcaggccagtaactcccagagcatcctctacagccacagcttcatccaaacgtggatttcccccaaaaggccttccctggggttcatggcatctttcttgcttcctctgagatatcttttctcttttctaaagacctgaaggctaaaatcatcattttcctttctaacaaaattaactacttagatttaaatttttttttttaaacagagtctcgctctgtcacccaggctgtagtgcagtggcgtgatctctgctcactgcaagctccgccttccgggttcacgccattgtcctgcctcaccctcctgagtagctgggactacaggcacccaccaccatgcccggctaattttttgtatttttagtagagacggggtttcactgtgttagccaggatagtctcgatctcctgacctcatgatccgcccgcctcagcctcccaaagtgctgggattactaggcgtgagccaccgtgcccggcctttaaaaaatttttaacaggtaataaatacattagcaaggttcaaaaatcaaactgcgtaataaaatacatagcaataagtctgcctcccaacccttacccctttctcctgcaactaagttctctatcccagaggaaaccagtatcatctgtttcttgtgaatacttgcagagattttttatgcaactacaagtaaatacaaaccatattcttttttttttttttttttttttgagacaggatctcgctctgtcgcccaggctggagtgcagtggcgtgatcttggctcactgcaacctccgcctcctgggttcaagtgattctcctgcctcagcctcccgagtagctgggactacaggtgcccgccaccacgccccgctaatttttgtatttttgggggtttcaccatattggccaggctggtctcgaactcctgaccttgtgatccacccgtctcagcctcccaaagtgctgggattacaggcgtgagccaccgcgcccagccacaaaccatatttttttttctttaagacggacccaggctggagtgcagtggtgctatctcagctcgctgcaacctctgcctccccggctcaaatgattctcctgcctcagcctctgaagtagctgggactacaggcgcccaccaccacgcccggctaatttttctgtatttttagtagagacggggtttcgccagattggccaggctggtctcgaacccttgacctgtgatctgcctgcctcagcctcccagtgttgggattacaggcgtgagccaccgcgccccgccaaaccatattcttaaaaaaaaaaaaaaaaaagtgcaggtttttctggttacacagttaatatatattccaatgcttttgtcattgtaaataatggcgtaacgatgatctttgtaatgatattttggttctcattttcatttctttaaacgagagtcttataaggagaacttctatattcttttaaaaattgtaaaaactcctagaaggtgcactttattacgttattattagctactcaccaccataagaaagagcgctgaatttgcggtagggacctaactttaaatcttggttcgaccgctgaaacatgcttcaccagtttcataaaataactttacgctctttcgctttacggaatattgatactcaacatgcattctttaccgccaacgctttgaaatggagcaggggaactggatgtaaaagaggggagggaagaaaacctcttctttcttccctagggtaaaggggctctgaatcctggagcccttgtttcttcaggcattgaaaactcactgctcctgaaatgggtgtgtatcttgagacaaagacaggcttctatacgtcaatattctatccacatccatccctacccccctctaacgccgtgtacctagcacacagtagggacactccacgtgttttagcctgcaaagttgcaagtagggccccaagccaagccctgctctcgtgcgcccccttctggctagctgaaaacaaggcaaaaattgactacattttccggagtgccaggagagagagacttccggttatgcaggaaggaaattgacgaacacgtgacgcggtcgggcggaccactgcagactgagcggtggaccgaattgggaccgctggcttataagcgatcatgtttctccagtattacctcaacgagcagggagatcgagtctatacgctgaaggtgaggagagaaaacagggtgtaaataggcatggcgagaaatgtagatgggaggagtgg

SEQ ID NO: 13535 - DNA, 2300 bp, Homo sapien
aatatagaagttctccttataagactctcgtttaaagaaatgaaaatgagaaccaaaatatcattacaaagatcatcgttacgccattatttacaatgacaaaagcattggaatatatattaactgtgtaaccagaaaaacctgcacttttttttttttttttttaagaatatggtttggcggggcgcggtggctcacgcctgtaatcccaacactgggaggctgaggcaggcagatcacaggtcaagggttcgagaccagcctggccaatctggcgaaaccccgtctctactaaaaatacagaaaaattagccgggcgtggtggtgggcgcctgtagtcccagctacttcagaggctgaggcaggagaatcatttgagccggggaggcagaggttgcagcgagctgagatagcaccactgcactccagcctgggtccgtcttaaagaaaaaaaaatatggtttgtggctgggcgcggtggctcacgcctgtaatcccagcactttgggaggctgagacgggtggatcacaaggtcaggagttcgagaccagcctggccaatatggtgaaacccccaaaaatacaaaaattagcggggcgtggtggcgggcacctgtagtcccagctactcgggaggctgaggcaggagaatcacttgaacccaggaggcggaggttgcagtgagccaagatcacgccactgcactccagcctgggcgacagagcgagatcctgtctcaaaaaaaaaaaaaaaaaaaaaagaatatggtttgtatttacttgtagttgcataaaaaatctctgcaagtattcacaagaaacagatgatactggtttcctctgggatagagaacttagttgcaggagaaaggggtaagggttgggaggcagacttattgctatgtattttattacgcagtttgatttttgaaccttgctaatgtatttattacctgttaaaaattttttaaaggccgggcacggtggctcacgcctagtaatcccagcactttgggaggctgaggcgggcggatcatgaggtcaggagatcgagactatcctggctaacacagtgaaaccccgtctctactaaaaatacaaaaaattagccgggcatggtggtgggtgcctgtagtcccagctactcaggagggtgaggcaggacaatggcgtgaacccggaaggcggagcttgcagtgagcagagatcacgccactgcactacagcctgggtgacagagcgagactctgtttaaaaaaaaaaatttaaatctaagtagttaattttgttagaaaggaaaatgatgattttagccttcaggtctttagaaaagagaaaagatatctcagaggaagcaagaaagatgccatgaaccccagggaaggccttttgggggaaatccacgtttggatgaagctgtggctgtagaggatgctctgggagttactggcctgaaatagtcgccaggaaccttagcagataaattttatttttaaagtttaaaccaaaataatttaacaaaaagaaggactttctactcttgaaattttaaactgcatggcagcttttttatttagtgaggcttttcagcaaagggtaaggcgtctgtggagtacagagcctatgttagtagattggacagctttccaaggaaatgatgtgcacacagcaatcgagcaccttggatcatctgacaattctaattttaaactttagttcccttgatccttacgtgtatagaccaatgtactctgaatttagttcagaaaatatagccatcattgaattaagtcaggggtctacagtcaacctgctgttaataggaagtcagttacagaactggctgggatggaaggacacaaaatgagatatgttggtgaagaatcgaagtgtagtgaaccaaacggtaaaactgtaatgtgttgggaatctgagaaaaagtttacaaatagccctaaagaggcaaacatcaattgtgttgccaaactgtagtttgaagggaattcctggttttttcatacttactagaacccttcatggaatatctgtccccaccctcaccccacttttccctctcccctcccccacagcagaatgccttgagttccgtattctagttctgtgtgatctgatctttaccttcccttccttggatccctgtgcacctactggagccaggttactctgggtcctggacctgactgcctcattctggaggcttccagacagccacagttagtgcccaaacctgagaggatggcttcagatggaggtaagtctgcaggtggtgaggaggatttc

SEQ ID NO: 13536 - DNA, 2300 bp, Homo sapien
tgaactcctgacctcaggtgatccacccgccttggcctcccaaagtgctgggattacaggtgtgagccaccgtgcccggccccttcttacttttttcacctgcattattacatatccttccatttattccccacttccttttatttattctattatctttcttcccagtttttttcatttttaagattttccttcttccttctcatttctccccttcttattctctctctctctctctctgtgacactgctcataccctcatttccaagaccacttacccagccttccgaagcacttttcccagttcccagagctgtggttccaacgccaccttcagccggcccaccacaatcacaggtaagctccctacaaactcacattcggtggctggaatgcccagagccctacaggatgaagagggatgggatggagggtaaggaagcagaagaaacttctgagggttggttcctgaccctggcccgctgactggagtagatcaggcccctttaaatctccctgcctctgtctcagctgttcaagagcccttcccactgcctgctcctcgatctttgcctgaaaacctcgccccctccacgcccctgtggttcctttgccctgtgcaactgctccaggaaatagtttgtggggcactcactgtgccatgaccctctgaacattgttggcatagagggtggggtccctgctctcctcagggctggggtgatacacaggaaggaactgaaacacagacacacacaattcttatcagaacctcaaagtgaggtatgaccactcccaccctcttttcccaaggtttcaggagtctgagatgtacttctcccaccgcccccacgggagccatacctccacatccacaatgctgcagggctgagaggctgtgagccagaggactttgagtctaagagaagagagatttcgatactcaccaatctctaactatgggctccttccctggctcccacaccccactccccttccccaacccaggtggggagtgggaaaagttctgcccattgataatagggacagactcctagccatacagtcaggtgggtgaatatgcagttgggagacacaaggaacggccagaaacgcggtagggaaagagagcagagctgcatggatatgccagaggaagaactgtaggcaagaggaggtttgagtaatggaagaaaaaggcgagaggcatgcctgatggtgatggttctcaggaagggataattgagggagaaaatcacagaaacatgggaagataaatgcatagcagccataatcacagcaggaacagtttaggtgggatagctaatctaagcacagccagattatatggggacatcagggggaaagtggtgtctcctctagagttctctcagtcctcagatgaagaagggccattcaccttgtcgggagattggaagatgggccaggaattctctgatggaccctgctccccaccctcacccccaggaataccagaactcacactccaggacccctccatgcccagctggtggtgtcctatgggagaaacacaggtgagggcataagagcattactttttccccctggaactggccaatcacctttgaacagagggcctgatcccacctctggtcacagcccccaatgcacatcccattaaagcaccaacagttttcacttatttccatttggggtggatttgtgctccccctttccactctttcttggactaagactcaccagactgttggggtagcggatgaggacaggctgcacaggcacccctgcgatgaaggctcctaaatcccatttccacccccacccccacaaggcagaggttagtacacagaagtagctagagggcatgaggtatggcagtctgggacagttctcaaatgagatatggttttgttccactcattgataattttctctctgactcctcgacttgacagcattagctaggaggttcctggtctcccttcctctcccatccctccccctcttctacttcttgggttatttcagagtccctccccaaatctggaacttctttttcctacagcccaccacccactatcattttattcacctggtttgaacttaagcaaagccttcttgttggaacaggtgccctcaggaaagaatagcacctggggtaaaaaagagcagaatgaggtgaagaagactgaagaaggctgtggagagaggaaagggaagcctcttcaggagcacatggaaagtgagaagatggtcttgagacccttacccacctgcggccacttgcctcctgaggt

SEQ ID NO: 13537 - DNA, 2300 bp, Homo sapien
gagtgaagaactggcctcaaagtggggagggactgttggcaagtgaaatataaattaacaccattagtcaaccagtcttagattctgagggctgggacagagagaaggtgttggagggagttctggtcagttctctaaaaggacaactactataaagggattgtcccagggcaaagataacaggccaggcacggtggctcgcgcctataatcccagcacgttgggaggccaaggcgggcggatcacctgaggtcgggagttcgagaccagcctgaccaacatggagaaaccctgtctctactaaaaatacaaaaaaagtagccgggcgtaaaaaaaaaaaaaaaattagccgggcgtggtggcccatgcttgtaatcccagctactcgggaggctgaggcaggagaatcacttgaacccaggaggtggagtttgcggtgagctgagatcgagccattgcactccagcctgggcaacaaaagcgaaactctgtctcaaacaacaacaacagaaaaaaaaaaaaaagagataacagaaacttctcatgctgttgaggaagtggaggctgcagatgttactgcccctgggtaggaaagaagtgattcctctttgtatccttcccaaccccagcccttcttcgattcaaccaagccatcctggtatcccggcatgacccggcttctcgacgcagagtggtggaggaggtccgaaggcgggccacctcaggaggcaagtggccgcaggtgggtaagggtctcaagaccatcttctcactttccatgtgctcctgaagaggcttccctttcctctctccacagccttcttcagtcttcttcacctcattctgctcttttttaccccaggtgctattctttcctgagggcacctgttccaacaagaaggctttgcttaagttcaaaccaggtgaataaaatgatagtgggtggtgggctgtaggaaaaagaagttccagatttggggagggactctgaaataacccaagaagtagaagagggggagggatgggagaggaagggagaccaggaacctcctagctaatgctgtcaagtcgaggagtcagagagaaaattatcaatgagtggaacaaaaccatatctcatttgagaactgtcccagactgccatacctcatgccctctagctacttctgtgtactaacctctgccttgtgggggtgggggtggaaatgggatttaggagccttcatcgcaggggtgcctgtgcagcctgtcctcatccgctaccccaacagtctggtgagtcttagtccaagaaagagtggaaagggggagcacaaatccaccccaaatggaaataagtgaaaactgttggtgctttaatgggatgtgcattgggggctgtgaccagaggtgggatcaggccctctgttcaaaggtgattggccagttccagggggaaaaagtaatgctcttatgccctcacctgtgtttctcccataggacaccaccagctgggcatggaggggtcctggagtgtgagttctggtattcctgggggtgagggtggggagcagggtccatcagagaattcctggcccatcttccaatctcccgacaaggtgaatggcccttcttcatctgaggactgagagaactctagaggagacaccactttccccctgatgtccccatataatctggctgtgcttagattagctatcccacctaaactgttcctgctgtgattatggctgctatgcatttatcttcccatgtttctgtgattttctccctcaattatcccttcctgagaaccatcaccatcaggcatgcctctcgcctttttcttccattactcaaacctcctcttgcctacagttcttcctctggcatatccatgcagctctgctctctttccctaccgcgtttctggccgttccttgtgtctcccaactgcatattcacccacctgactgtatggctaggagtctgtccctattatcaatgggcagaacttttcccactccccacctgggttggggaaggggagtggggtgtgggagccagggaaggagcccatagttagagattggtgagtatcgaaatctctcttctcttagactcaaagtcctctggctcacagcctctcagccctgcagcattgtggatgtggaggtatggctcccgtgggggcggtgggagaagtacatctcagactcctgaaaccttgggaaaagagggtgggagtggtcatacctcactttgaggttctgataagaattgtgtgtgtctgtgtttcagttccttcctgtgtatcaccc

SEQ ID NO: 13538 - DNA, 2300 bp, Homo sapien
tcaaacattcaagggaaaaatttaaacttccctacactctcatctttccctgtctcccaccttatgaacattatcttagtccttaaacctccttctaggctgggcgtggtggctcacgcctgtaatcccagcactttggcagaggcaagtggatcacctgaggtcatgagttcgaaaccagcctggccaacatggtgaaaccccatctctactaaaaatacaaaaaaaaaaaaaaaaaaaattagccaggcatggtggcaggcacctgtaatcccagctgctcaggtggctgaggcaggagaatcgcttgacccgggaggcggaggatacagtgaaccgagattgtgccattgcactccagcctgtgcaacaaaagtgaaactccatctcaaaaagaaaaaaaaaaaaccgccaggtgcggtggctcacgcctgtaatcccagcactttgggaggctgaggcgagtggatcatgaggtgaggagttcgagaccagcctaaccaatatgatgaaaccccgtctctactaaaaatacaaaaattagccgggtgtggtggtgcccgcctataatcctagctactcaggaggctgaggcaggagaattgcttggagccgggagacggaggttgcagcgagctgagatcacgccattgcactccagcctgggcaacagagcaagagcgcgactccgtcccaaaacaacaacaacaaaagacaaacacacacacacacacacacacacacacacacacacacacacacacaaacttctccccaaaggcaaggcaagggagactaatacatgcagttgtactttctcggttctggtgagaaagctgaaatcatctgcttaaaaaaaaaaggtttgggttgtacatggcggctcactacctgtagtcccaacagtttggaaggccgaggtgggaggctcacttgaggctaggagttcgagaccagcctgggcaatatagcgagaccctatctatacaaaaataaaatgtggaaatgatgtatttgtgttgggacctctgtgttatatacaaaaacatcccagtgcagctccttggtctcagtaggatgcatgagccttcaaccctctcagcctgggctcagaaaatttcctggagcagattaatttggagtttggtttaaaggagaagccagtggcggcaaacactcttggttatgagaggtctctttttctttcactttcttccttcagctcccctaactgccatgcaatgggcagaagacataaagtgaacttaaggcgtattctttcctcaagcaatgagactcttaccccttttgtcatggcaatggatctcagagtccacttaattccctggtccctgatctcaaacgatggcctgaggctaaacaatttgttttctagggtagcttggagcttgtgggtgaggggaattactactgtgtcctctgcgttcacccagagagtgacagagatcaggaaccactgcctctcccctgccagaccttgtcgggctcatgggaagcacatgcgtcagtgtactagggattcctggcgcctcaagggttcaagcaaccctcacaccagtaaaggcggccctgcctagcacaggcaggacgcggaggtggagagttgcggggcgccatgcagccgccagaggacgcaagtgcctcaagtccccgcgcgatggcgccccacggaccgggaaggaaaggtggtccgcctgcgaggaggcgcggaccgggccaaggagcccataggaagagcggggcgccgcctcacccgcgagctgccggcctctgcatccggcccacctgtccctccctgcctaccaacccaagagcctcaccccgatctgcgcttgctgggtgacctcgacgcccgggcggggacagagggcgctctgagctctgcgctcagctcccagacccactcccactccgaggcggaggccaggtcttcagagaggaacgacggaggcgcagaagcccaggggcagcccgctccagccctggcagccgcggaacaatggcccgagcggctgcgggcgccgcggcgggcgcggaggagcaggggcgccagggcgctggaagccccgcccctcggccggcgccctgacaacgcgggcgggctgggctgcgccgcctgctccccgcccctcggccgcctgcaccgggcggggcccgggccagagcgccgccgccgccgctgctgcagcagcagctgctctgcagagtggtggccggggccagggccggggtgccctccctcccaccttctcccgccatgagccagggaagtccggggg

SEQ ID NO: 13539 - DNA, 2300 bp, Homo sapien
ctgtttcctgatttcaaaagtggtgatatgatgtgttaggcactggtgggttgcaaggaagatgcacgcatgtattccctttgtgatgagggccgaatgttaacttggatggaaagtcatccaagcagccatattgtctctggccctagtactttcaaaacctcacagaacattaatttcacagtatttaggataggacttgagctctgaagacctatagtgtggttatttgttcatatggctgttttccatactagaccatgagctccgtaagggcaggatctacagtttcatctttctatcctgggcactcagttcactgcctgatacacagtaatagaggcacaaatgtttcaaaagttgaggaattttcaacacttcctgaaagaataggaagatataaaggcttctcagagaaggtattatttaagcttttctttttctttttctttttctttttcagatgatgtctcactctgtcacccaagatggagtgcaatggcacgatctcagctcactgcaacctctgcctcccaggttcaagcaattatcctgcctcagccacccgagtagctgagattacaggcctctgccaccatgctcagctattttttgtatttttagtagagacggggtttcaccatgttgggcaggctagtcttggaactactgacctcaggtgatccgcccactttggcctcccgaaagtgctgggattacagtcatgagccaccatgcccagcctatttatttctgattctttaagggtgagtagaaattttttccaggtgactaaaaccttgagacattattccaagcagagaccagcggggcagagacacggggatatagagatgttgaagtttaccaaacactgctagatttaaaaaacagaaaagaaacaatcaaaatcaaaaattaaaattaaaaatcacctaaaaaaaaagaaactgttaatgggcttgtccaaaggtgacgtcacaattgagttaactatgaccatagacacacaataatggatggaagttttggggaaaaaacataacattctcaggttgttggcagagtatctagaacaatttagaaatacagatattgaattctgggaataattacactgtagtgaaatcatttccttctctgcgtatgaagcatgtatgtgtggcacactgttcaaggtgctgaaaatcagactcttctcaaggagctcatgagcaatcaagggagatggatgggtgagccactgattatcatgtgacaagtggggtaatagagatatgactaaaatgctatccaaagaagaagaaaggaattattcatagtatatggagtgctggggaaagagttctgaaatgaagccggccgggtgtgatggctcacacttccactacctgacctcaggtgatccaccagactcgggctccccaaagtgctgggattacaggtgtgagccaccgcacccagcccaaaagctttgtgtttttacggatattaaccatgtttcctgtttaaaaagaaaaaacagcaacaatgtaggagaataagagaaacatttttccaaaaaagaaatcattttgattattttatctcattggaatgttggataatatagtctgcttcattaatcatcaagcatgctgtggatttcccacttttataggatctgtatctcagttcaggtaatactggtaatttttatacagtatttgaagatgaaaaatataggccaaaatgacagaccttgcatagaagctggttaatgaagacagctctggaggaacacatggatacacacagagagacacacacatatatataaagtatacacacatatgatttttaaagttttaagggttttaaagcaaaagccagcccctccactctcccagagcgggcggcccctcccctctctcagagtgggtggggacagcggttgcatgggcagctttcctgatgagccacaggtccctctggacacactgccgcctggccacgccccctttccctgtcatctttctcgttggccaatgggcttgaagcattaaggccacgcccctattctgcattctactgtggccctggttacgctgcctctgggtcagttacgcagctgtcttccaggtgactggatgtgttgatcagcgctcgctgggatttggctgacgtggccccagccccgcctccctccccaccccacaatggcagaagaaactggacagagtaaattagctgcagccaagaaaaaggtaaagacgtaccgggtcatggcccgctaacccagccacagatcccctccgacg

SEQ ID NO: 13540 - DNA, 2300 bp, Homo sapien
cccaaaaatcaagacgatgggccctgaaactctaaatacttgaatttttaagtaacttcatatcaagcccatttaatagaaactatgtcaagcagacacactattagaactgatacgaaagtaaaatttcaaactgacacagctgtatcaaaaaaatatataaatgaaaagagaaaaattgcttcattgccttttaggatttccaaagatgatgttaaacccagccacggttctgatctccaggaaagcaattgctgtggtacaaaaggacaagggttaaaagagaacagtgggagctctctttcccagctaactcacgcagtgtgacgcagaggctttcagcacagcccagggtgcccgggactgaaaactccttcaccagccccctccacaggtgggaaatactcggatcttcattcttgtgacacaagaccttgaaagttgctgaaaaatgctagtcccgtctgactggggcagcattttcatttattgcacaccattgggtttttttgtttgtttgtttttgtggctttatttgtttattttttttgagatggagttttactctgttggccagcctggagtgcagtggcacaatctttgctcactgcaacctctgcctcccaggttcaagcaattctcctgcctcagcctcccgagtagctgggattacaggtgcgtgccaccacgcccggctaatttttgtatttttttagtagagacagagtgtcaccatgttggccaggctagtcttgaactcctgacctcaagtgacccacccacctcggcctcccaaagtgctgggattacaagcttgagccactatgcccaaccaccattaagattttggcaggaatcattgtgctagacaccactatcccaccaatcactgagcacttttcatttcctgccgctggtgctgttggataccttacggcaagctgccgtccctgcccacccacctgaggacaggaacctccaactctgccttgccagaactgaccagtgtgtctgacagatggtgagtcctttgctgtacatggccctcaaaaaaatgagacaattctttcactcagaccaaagcaagcaaatgctgaaagaccttataatgaaacatcacattccccaatctggacttccccactccgctggccaactttgtcgtttctgattttaattctactggtgattattttccacctctctaaataatttttgaactctctttctgggtatatcaacttcggatactattgattggcgtcccattatgagaggtgagctttgcagaccacaacctcccaggctctgatgcaagtgaacagaggatggcaccagctactgcagttatgcagaggggctttccattcttagcaagagcactgggataaaagagatccttccaagagctcccacctaactgtgggaacacagaagcatcctttaaaagccctgtggtcacacagccttcagcatgcatacaggctcttttcttaactttataaagccccagataggctggtactaacatggtgcaaccctgtctctactaaaaatatacacaaattagctgggcgtggtgatgggtgtctgaaatcccagctactcaggagactgaggcacgagaatcacttgaacctgggaggcagagtttgtagtgagcagagatcacccctgtatacgcccacctgggtgacagagtgagactctgttttaaaaaaggaaataaaaattaaagaagtaaataaataaatgatggcttatttcttaatagttatgactttgtaaagctttgaaatctgctttacccagagtgtagcttttaaataaaatgtaggatatagaaggtgggagcctcttgaatggaatgtgggggcttttcctctctccccgtaggatagatatattctgtttcttgtcccccattgagtcaagaataatttaacttttggcataagaaactgctgaagaaaaataggttgaataagctaacatttttcttctttttgcaggatatagaagacttagatcactacgagatgaaagcagagcccattagtgggaaaaagttggaggatgaaggaattgaaaaagaaaatttggcaatattagagaaattaggaagactgaaagacaagagcatttaactgcgtaagtgtgtataaatagctagagcctggatttttgtttaagtaattatagttaatcccaggcaattcatgaacatgccaatctcagctgctctcctccattcctgccttagtggtagattcagtcacatgtttattggttttgagaca

SEQ ID NO: 13541 - DNA, 2300 bp, Homo sapien
tccaggccctcgggcacatagtcctccaagggcagctccacgtcctcgctctcgggctcctggtggtgggggacaggacccggccttgccctgtggtccaacatgctgctccccgcgctctgacgcttctggtgggccatggtagacgcttccggtgggccatggtagactcttctggtggggcatggcgggcgctcacacagccatcattccccagaggcagccactgtgtggaggaacattggcaaggacagagtcagaaccccacaaagcctggccacgtgtggggccactccaccgccacagcacctccaaccacgttctcccacagcactgtgaaaaatgatagctgaagattttcattgccgcaatctcttaaaaaactggaaacaacctaagtacccataaataagagaatgtttaaaaaaatgacggcagagttcacgtgctggaagagttggtggcatttttaaagaggcagggcaacacgtactacagtgagggattttacaggcctatttttgagggaaaatggcaagtgagctacagcaagcgcacgtgtgtagatcccagttacaggtccgtcaagatgtctagagaatacacacaccgcccagcccatacatacacgcaaaggcacacagaaaggggaaacccctcaaaggcttgtcagccacgtcctctggggaggggaggggggagagaggtgggaggggggagagaggtgggaggggagagagaggtgggagcagagggggcctggacattttactttattaaagatgtatgtagtggttgagtgtttcaccaaaacgcatttaatattcacctgcattataatcaaatccacctgtgcacctttgagggtctcctcttctagctggggagatatcagcactgagacaaaacaacctgtggggaagggcagacagcgaagggaggaagcaggacttcccccgtgggctgctgctctgggcatcaggagaggtgacaaacaagctggtctcctctaggaaggcagccactggagcagaggagccagcctcccacaagatcaggacatgagcacgccacagggcacagccagagacacctgagacacaggaggcggtgctgacccaagggagggcaggaccgggggatgtgccggccaggacagccaggggtgcacaggcaggcagtattaatttggggaaaactaaatcattcggtttcattcaatgagtagtttgcatgcaaatgtgtgtggcgggggtgtgtggtgtgttcatgagatacagtgtgtgtggtgtgtatgtggtaaatgtgtagtatggtgtgggtgtgtggtgtttgtgtgtgtatggtggtgggacgtcctggagggtgtggtgtgtggagtgtactgtgtatggtgtgtggtatgtggtgtggtgtgatgtgaatgtgatatgtgcgtgtggtgtgtgtggagtgtgatgtgtggtgtgtgtggagtgtaatgtagtgtggaaggcttgagcgtgtatgtatgttttgtgtgcgtggtgtagtgtttgtggtgtgtgatatgtatgcagtgtgtgtaatgtgtgtggttggtgtgtggtgtgtatggggtatgtgtgtggtgtgtatgaggtgggcatggtatgtgtgtggtgcatgtacgtatgcacacacatgcacacatgtgcactgcaggtgacaggcagaccggcagctgggacatgcagcggtgatcagctcagccagggcagggctcagggtgagagtggccaggcccctggcagctcaggaccctggatgagagtccaggaggaaagaacaagctgtgtccccatctccacccaagttcatcactaacatgaacctatagtctgcactgaaactgttccacttctgattagaatcagaaacacttccagacaggctcagcacagccaagtggggactgtcctacaacgacacggtgtagcggtgggcaaaggaatcatggcagcagctaccttttgttttttaaaatgtgaaacctttctgaatggcttaagcaacatctatttaatttaacagctctactgagatgaagaaagaaaaagaatacctgctcagctccagagacacgtaaagggacagagattgggggacagaaggaagtgcattaattccttccacgacccctgaagagcagcggtgggtctgagcatcctatctccaggaagcaggccagcaggcaagccagctgccacctcgtcctgtgcaaagcacaggcaccgtccccaaaagtaggcaaatgactatcttatttgttcaggggaagc

SEQ ID NO: 13542 - DNA, 2300 bp, Homo sapien
atactgtaattgtttttgtactaacctaataactacggtttttattatcctcctcctttgacatacagagaatatattattcttctgatatcatcttccatatggcccaaatatttaggaatttcacatgatcatttttctcaaagcaaatgcatttgtggccaaattttacagttattacatagctagcatgttaaccttgatattatgtcacgtttcaaattttgttccctctgattttaaactgaattgagaaaaaaataaacttggctctctagaaacgcaaagagtaaatgagaagtaatatgatatcgcacacttaaaatattttaaagcaggcttctactgttactgttattttttagcacaaaccaaaagtgaccattttctttgaataaataataaaattttatattttaataacattggcaagcattttctcatttaaatatctcaatttttaatggaaagtatttcgttttatataagagaaaaatataaaaggatcatgtgagtttatgaaaacgtcacagatagtgtatgatatgttttatgtttatgtttcatactccaaacccagtggcttttgtgttcaaaaacgacatttgattagcaagaggaaatggccattttactattacttatctggaatggtagcatattccagataagtaaaggagaatcagccccatctttaatactgccaactggatttgtgtcataaagagaaattaggggactaaaaaggaaacatataagccttgtctttccagattggagatggataagtatataaggactgacatactattgctttacaacagttttcccaggacaaattgagacaccagaagccagcatataggttgtgactgatctattcaaattgttcctaataatggcatcagggttttttaaaaaaaaattttgtcatgctttaagttctgggatacacgtgcaaaacgtgcacgtttgtcacctaggtatgcagctcagtgcgcgtgcgccatgtggcgcggccctgcgggctttccgtactccgctcgcggtaggctcccgccgctattcagctgtcgggctaatcagcagtcgaggtgtgcggctaggcgcgagctctgcgggagctcagcccccgggagagacccggcagcggcgcggcgaggacggcggcgcggcgaggacggcggcgcggcgaggacggcggcgcggcgaggacggcggcgcggcgaggacggcggcgcggcgaggacggcggcgcggcgaggacggcggcgcggcgaggacggcggcgcggcgaggacggcggcgcggcgaggacggcggcgcggcgaggacggcggcgcggcgaggacggcggcgcggcgaggacggcggcgcggcgaggacggcggcgcggcgaggacggcggcgcggcgaggacggcggcgcggcgaggacggcggcggaccggggcagccccgcgccctggccaggtaagctggggaacctcggctgcctgactcgctggcggcggcagccttgggccgcccgcggcgccgcggggacccggacgcgtggggggcggcgcgtaagctgcgggccaagagctcccgagcgctgccccccggactcggcggggctgcggggaggccgccgctgggatctaggggtgcagcccggcggccttacgcctctcggaccggcccatcctcctcccacgatgggcgggcgggtgcggcggggactaggcgatggctttcgcatcccgggaggggctcaccgcggcgaggggccactctcggcgccggcaagtggcgctgtctggcggggccgcccgctcgcgtctcgccgggctggtcgggccgctggtgcgttccgctgcccggcttggcgccggcatcaagtccccgtgccgggcggcaactactgagtttgggatcgcctctgggttcacttccctgggagaactcgagcccggatcttcgccccttccctttccctgtataataaggcccagagggaaaaactcaaaaaccccacaccttgttgcccctgggctgcaggcgccgggttgggggcacggtgcggacctgcgcctctgcagggccccttctccacgccaggcactgcctggcaaggctgctggagggagatctggccgcagatggtgaaggagaacatcgaggcccccggtccccaagcagggctccatgggtcgggcggcgggccttggtaagcccaggctaggggcgaacttccttttctccgggccgacgcggagggagggtgcggggaacgcccgcggaggggcctgtcctgca

SEQ ID NO: 13543 - DNA, 2300 bp, Homo sapien
atttccagcatagaacctaatactgatttataattgatgctttagtgctagtattcataacacaattattaaaatattaaacttgaactaaaattggtaatatgtctaaaacatttggaagcatgtttgtattaagtgagatttttcatttgcaggccatttgcttcgaaaatctctagaaacagagacatttctgagagcagaatcctatagtgggtaaagggaatttccttatataattatatttagaagataccaaatggaaaatgagtccttttgctgtttcatttgttatcctgaaagcctacggcattgacttcaaaaattccaaaccctaaatgatcagcattgctacctgacataataaacaataacaacactgaagaattagacatattgtatactcagtgaaaaatgaaaaataacagacataagtaaactcaatgataccatgctacattgaaagtaaaatcttacaggtgaacttatgatgagaaacagcaacaaaacccctcaaattgacattgcatttttatacttagagctatgcatgtttttctaaatacaactaagccatcaattgtgaatatttttaaggcataaaatgagtacaatggacatgcctagcctagcattcttaaattattcaaagtattaccaataattaaagacaataatcataaagttatcgtttcaaagtttaaggaaattaggttttaaaagtaataaactgtttactgatagggagaataatgaattcaattatttctctcttcctttactgacaaggagagagacatcaatgaagccaagtttgttttacaaaattacaggcaggtggttgcttggccaggaggataatctaaatttcttgattcttatcaaggattgtttactttgttctctactacaaagtttatttcaaagacgttttgtagagggaaggggggagggatagcattaggagatattcctaatgctaaatgacgagttaatgggtgcagcacaccaacatggcacatgtatacatatgtaacaaacctgcacattgtgcacatgtaccctaaaacttaaagtataataataataaaattaaattaaattaaataaaaaaagacattttgttgttccttgtaattctacttggaactgagtccatttagcagaaaagggaattatccttatcatggctttaaaataaacaatgagtgtcataccattggcagtttatacagtatgatttgaaactcaatgccaattttaaaacacaatttaatagacaatcacaaattaccaaggattccagtggagatatacaaatggagttttgtgttaaataaacataaggcaatgtgaataacaaaagcatcacttaccatgatggacagatttattattggcaggaatcaaattattgaagagaacttataggggaaacctatagctatctgaatttcctataaaactccacagcaactaaacaaaaactgatggaagaatttaagttgaacttggattaaatttttacatgtatcctaatgtcagcaacaagattttggaattaaatgtttgtggttttcagtgttcttattaatttagaagtatgccattgtctgctttggattagcgaggaaatagagtgcattttctggatattgttgtagtatatcaacaacattcagcaaaagctccagctttaaagaccactattgcacatgaaggcagaaggaagcctgttgcatactgaacgttctagctggtgattatacacacttaaatcctcttgactgatgaataaccaccctctccatgagaaggcactcctaccggaagctcgcatgtaacagtgttagaggaaagttacacgtaatgaaccattgagagccactcactcagttaactctgttgtcaaaaaatgacatgccccagtttgatcctcccttcatccaacaaaacttagtactagccgggcgcggtggctcacgcctgtaatcctagcactttgggaggccaaggcgggcggatcccctgagctcaggagttcgagaccagcctgaccaacacggagaaaccccgtctctactaaaaatacaaaattagccgggcgtggaggcgcgtgcctgtaatcccagttactcgggaggctgaggcaggagaatcgcttgaacccaggaggcggaggttgcggtgagccaagatcgtgccattgcactccagcctgggcgaaaagagcgaaaactccgcctaaaaacaaaacaaaacaaaaaaaaacttagtactaaatagcatgattttaacag

SEQ ID NO: 13544 - DNA, 2300 bp, Homo sapien
acaagaccgctgccacagtccatactactcctgacgcacaccggactttgccccccaaccccggcgcttctgggctccccctacaaaagtcttgtcagtcagccctgccccttcagcaaacagctcagtccctgccctcgccgatcaccccggggtgacgttgggcgggtgactcctggggcgccccactccattactgggccctcacctcttgccgccccaagttggacctccctgggctctttgggctcgcatatccaaggacctgggccccccagccccaggccccgccctcgccagttgtccctgggtgactttgggctggtgactcctggggctccctgctgcagactctgccctcccctcctgctgcctcaaggtcgacctccctgagctctttgtgctggcgtctccaaggacctgggtcacaaccctgtgtttccctcccgcgttgtggagtggagactcggacatcgcgctgatgtggtccctcccccgcactaggaggagtggaatgtagtgatgtcacagtctgcctactaactgtcattactggaagactggccctggtcttatgacccagtcccctaaacgttgtcaccccgtttctggttcttctggtcacagcagaaatttccagctggaagggaaatggagactatgggacctgggagcaagaggtttcaggctgccttactcccttaccatagacattgacagtgggaaaagcctacacttcccccgtgagctcaaaacgttgacagtgtctctgggtggcgatgggagaatgggtttggtttggtttttctcccaagcttctactttccaaagagattttaacatttttttccgagttctccacctcatattctaattctccatggttctgggaccagacttcagtctgggaccttcagtcagtggtctctgaagtgagatttcctcatcttctgtggaatagatcttgggagactgaacttgacagtttgaatcttcctcatattatctcaagctggggtgctttgagtaccacaggataaatgtgggacatctttctgaagcatcagtttcctttgattctcttgagatatcttgagataagagaaaaaacatgaatgtacttagggatggcagtcccataggtttctaagagtataccagacttctctctgaaatgaggcttgggttgtcctctttctgataaattcccagatttcacagaaaggctgccttctgccatgaggacacattgatataaaagtttgagaggtactggtgcacttcttcccaataacagacgtgtgaagatgtacgactctaaaccacatgacatacagctcctgcctacttaatgtttacttttctacctctgcctctgggtttggtgcctggcaaaaccccagagcttagagtgggaagactgagtttccaagttccagtatcgcttttttcttttttctttttttctagccatgatgtcgatccctctcagtccctaaatgattgtgacaccttatagagttgttggtgtcattaaatcagatggtatataagagtattttataaaaactataaaggaggatgtggctgtaggggctgatagttctcatgagtattactgctcttctttcccacagttcaaagaatattggcagagaaaccgccctggtgttccagcagcagcgaagaggaacacgaaagcaaatggcagtagccctgagacggccgcttctggtggttgccactcatctgaggctgtgagtcttgcctggacaggcttttggggacagggggcccaaggagcagtagagggcaatcgttaagattgtggatggactgttgggtactggtgaaggattctggatttggccgggcacagtggctcacgcctgtaatccccacacttcgggagaccgaggcaggtggatcacaaggtcaggagatcgagaccatccaggcaaacacggtgaaatactaaaaaatacaaaaaaaaaagccgggcgtggtggcgggcgcctgcagtcccagctgctccggagtctgagggaggagaatggcgtgaacctaggaggcggagcttgcagtgagccaagatcacgccactgcactccagcctggaaggcagagagagactccgtttcaaaaaagaaaagaattctgggtttgaatcctgcctctccgtctgctagggatatgatttagggcaagttgcttgagctctttgggcctctgttttcacgtctgtatgatagaggtggtattgtttgacttgtatttgtgaagtttcaatgagattgata

SEQ ID NO: 13545 - DNA, 2300 bp, Homo sapien; identical to SEQ ID NO: 13539

SEQ ID NO: 13546 - DNA, 2300 bp, Homo sapien
cccaaaaatcaagacgatgggccctgaaactctaaatacttgaatttttaagtaacttcatatcaagcccatttaatagaaactatgtcaagcagacacactattagaactgatacgaaagtaaaatttcaaactgacacagctgtatcaaaaaaatatataaatgaaaagagaaaaattgcttcattgccttttaggatttccaaagatgatgttaaacccagccacggttctgatctccaggaaagcaattgctgtggtacaaaaggacaagggttaaaagagaacagtgggagctctctttcccaactaactcacgcagtgtgacgcagaggctttcagcacagcccagggtgcccgggactgaaaactccttcaccagccccctccacaggtgggaaatactcggatcttcattcttgtgacacaagaccttgaaagttgctgaaaaatgctagtcccgtctgactggggcagcattttcatttattgcacaccattgggtttttttgtttgtttgtttttgtggctttatttgtttattttttttgagatggagttttactctgttggccagcctggagtgcagtggcacaatctttgctcactgcaacctctgcctcccaggttcaagcaattctcctgcctcagcctcccgagtagctgggattacaggtgcgtgccaccacgcccggctaatttttgtatttttttagtagagacagagtgtcaccatgttggccaggctagtcttgaactcctgacctcaagtgacccacccacctcggcctcccaaagtgctgggattacaagcttgagccactatgcccaaccaccattaagattttggcaggaatcattgtgctagacaccactatcccaccaatcactgagcacttttcatttcctgccgctggtgctgttggataccttacggcaagctgccgtccctgcccacccacctgaggacaggaacctccaactctgccttgccagaactgaccagtgtgtctgacagatggtgagtcctttgctgtacatggccctcaaaaaaatgagacaattctttcactcagaccaaagtaagcaaatgctgaaagaccttataatgaaacatcacattccccaatctggacttccccactccgctggccaactttgtcgtttctgattttaattctactggtgattattttccacctctctaaataatttttgaactctctttctgggtatatcaacttcggatactattgattggcgtcccattatgagaggtgagctttgcagaccacaacctcccaggctctgatgcaagtgaacagaggatggcaccagctgctgcagttatgcagaggggctttccattcttagcaagagcactgggataaaagagatccttccaagagctcccacctaactgtgggaacacagaagcatcctttaaaagccctgtggtcacacagccttcagcatgcatacaggctcttttcttaactttataaagccccagataggctggtactaacatggtgcaaccctgtctctactaaaaatatacacaaattagctgggcgtggtgatgggtgtctgaaatcccagctactcaggagactgaggcatgagaatcacttgaacctgggaggcagagtttgtagtgagcagagatcacccctgtatacgcccacctgggtgacagagtgagactctgttttaaaaaaggaaataaaaattaaagaagtaaataaataaatgatggcttatttcttaatagttatgactttgtaaagctttgaaatctgctttacccagagtgtagcttttaaataaaatgtaggatatagaaggtgggagcctcttgaatggaatgtgggggcttttcctctctccccgtaggatagatatattctgtttcttgtcccccattgagtcaagaataatttaacttttggcataagaaactgctgaagaaaaataggttgaataagctaacatttttcttctttttgcaggatatagaagacttagatcactacgagatgaaagcagagcccattagtgggaaaaagttggaggatgaaggaattgaaaaagaaaatttggcaatattagagaaattaggaagactgaaagacaagagcatttaactgcgtaagtgtgtataaatagctagagcctggatttttgtttaagtaattatagttaatcccaggcaattcatgaacatgccaatctcagctgctctcctccattcctgccttagtggtagattcagtcacatgtttattggttttgagaca

SEQ ID NO: 13547 - DNA, 2300 bp, Homo sapien
ctcaagtgatcctctcacctcagcctccagagtagctgggatcacaggcacgtgcctccatatccagctgacttataaatgtttcctagagatggggtttcaccatgttgcccaggctgatctcgaactcctctgcctcccaaagttggcaacttctgaatgtgctgctcagagctgcctgtttgccaatgaaccaggaatatgttttatacgtgaggttaatttcatgtagatagaacactgctacaggaggcggggtggggtgatgtcagagagcactggacagataatgaagacgtcccctcgtcgcagtcaagctgacctcttttggggctgtcgccagctcagtggtgtccacctgctgtctgcagtctgagaatcggggtgtcctaagctctctccagctctgaaatctttaactgtctactgggtgtatttgtctggaaccttgcctcctgtccctgtggttctgcatgttgccgggtgtttctcagggacacctgactttcctgagggtccccagccctggtgggagaagaggttgtgtgacgtctgacacccgggaattggtgggtctccattatctgaggagggtgtacttcccaggttagctgggcatgagttgagtttcagtcgtatccttccttccagtttgggatgggttctgaaatttgtattgcaagtgatgaaaaaggggtaagtggcttttcatctcagtggggttagctttgtcatggacccctgagctgagagatggcatgatgagaagtccagtgcctcaacccatgcagccttcttgaggacttacttgtatcattgtgtgttgcttgaaaaccagtaatctgtatggtaacttttaggattcttggtgtgggtgggtttaatatctgcccgtgtgcgtcatttcctgggtatcactgaggaatggctctttgattttcaattttaaacccttatcttgccacagtcagtcttttatacagagcagagtgctggagatgggctgcaatgacagtgttcctaatgggatgggttttatttcgagtgagtggactgtgacaacttttaggtaccttcatgtgactcttctcacaatagccgattttcttctcgtttaatggaaaattagtagctgcagcctgcttcacgtctctgcccccgtggtggcctgggcagaccctggctcatctcccagggcaaatgtcagacaggccagccacagcccaaggaagtgggggcaaagggggcgccccagtgtgatctcgagggcccatgtggttttgtatggagggcagagttgttgtgctgttggcttttcagcaggagccaggcagagcagctgtccgtgggctgccctgttggccagggatgttgaccaggatgtggaaggaatcaggcggttgcccccggcgggatggtcattgcggtgtctctgcacctaagtgatttgttttcacagacatcaatgctcagtattgatcaacctcaggatcatcaatgcttggaaagggtagagcttgtgtcccatcagagatgtgactccgaatctgtgggtactctccccaggctgactcataaaatgaatgggcacctgagccactccatgtgatgctgaaaaccgggagcacttgggtgacgctttcagccatgaagtctgcctttcctcaggggagtggccgccgatggtgtgttttctatttgaagcaactctaaagggtcccacccaagtttcagaaagaaactcaggttcttgacatatgcagggggaaccctttcatttctaaaatctgttaaaaattttactattgctgaaaatatcctcttacgcatttgcagtgacacctccatcctcactgcagtgacccgtgagtgcaggcctgtgcccgtgacctggctggaccctggggttttcctgcgccgctggccctgagctgcttgtgctgtcaacagggcagcccccgtctggataagaggttctgcgtgctccttacagttcaaagcaggcttgggccatcttccctgcctgctgccttgtcctccagtagtaaatcacgcccctgtcactccctgatgaagccactccactgagattgttgattttacactgaggcttctctttgtgataccccaggctcgtggttacccgatggaggaaaacttctgggagaatcggctggtgagatgcctgacaccgctctcctggcgtctgacatcaaggatatcttaattttcttagtttttaaaaattatggtaaatacacaaaagatgaaatttaccatctgaaatacttctacgtgta

SEQ ID NO: 13548 - DNA, 2300 bp, Homo sapien
atttcacagctgctgtcctaactcaggctcagggtgtgcagaggccaagtccacactgtatctaaccctagtgcagctcaggatttggttttccccagcccgttctcctcagggtctcaggtcaggccctcagggcagcaggaagatgggctctcctcaacccccaggccccctgtccttctgtgctccccctcccccccgcccccccccccgtcttcagaacttcccatgccacagcttcgcctagtccagccacaaggagaaaagaaaacgagggcaaatcaccaggatttgggggagcgaggcagctgaggtcccactctgcacagactaggcaccttgtgcctctcccacggcttaccacatctgcctgggactcaatgaaagggccagagggccgaaggtgacaccggagtctccagcacgaccttcgcccagggcctccaggggatttcgatttctcgcgctgtgggggcggaagaccggctctcctggggatgtgtgtgagtgtctgggagtgtgtgctccccagggccccgcggaggtcagggtcctctccattcaggacagcaaggagagaaaggcctggagtgaggccctggggctgggggctaaagcagcagagtatcagaaatggggtgctagggtggttactggggaccagcagggaagacttggagtccagcatgcgcctaggggtgctgcggtggggaggcagcagggggcctcccctgcccgatggggctttcggaggccgcgatccccgagggttcctagctctaaggtccccgcttacagctgcaccgggcagagcgagcagggcgcagcgccgcggccggggcaggatgcggagcctcgcgttcaccggctttacccgcgagaccagacccctgcaactccccagccagcaaggccgggacgtgcttcgggcatctgtgtgctccccagggcccgggacgttcggggcgctgagccgtccaacgtctgggttccagccccggtcccgtagatcctcccggctggacccgggtcctgggtgcacccgcccgccctgccgatgtcccagtgccggggccaggggccgcagggcctcgtgaacgcccggcacggacgcatctttttcttccctctcttccccgcgcgcggtgtcgccgggaagcgtttcccggccccagtgatccaagagcgggtgaggtaaagcggcagggaccggggcgcgggctcggcagccgcagctcagtgcgcgtgcgccaggtagcggcagccctgcgtgctttccgtactccgcttgcggtatgtacccgccgctattcagcttccgggctaattagcagtcgcggtgtgccgctacgtgcgggctctcaaggagctcagcctcccggacggagccggcggctgcggggcgaggacggcggcggaccggggcagccccgcgccctggccaggtaagctggggaaccttggctgcctgactccctggcggcggcaacctggggccgcccgcggcgccgcggggaccccgacgcgtggggggcggcgcggaagctgcaggccaagagctcccgagcgctgccccccggactcggcggggctgcggggaggccgccgctgggatctaggggtgcagcccggctggcctacgcctctcggaccggcccatcctcctcccacgacaggcgggcgggtgcggcggggaccaggcaatactctcgcatcccgggaggggctcaccgcggtgaggggccactctcggcgcgggcaagtggcgctgtctggcggggccgcccgctcggatctcgctgggctggccgggccgctggtgcgttccgctgccccgcttgacgccggcatcaagtccccgagctgggcggcaactactgagtttggggtcgcctctgggttcgcttccccgggagaacccgagcccggatcttcgccccttcccttttcctgtataataaggcccagagagaaaaacttctcaattaaaaaccccacaccttgttgccccggggctgcaggcgccgggttggaggcacgccgcggacctgcccctcccggagacctgccccggaaggggcagggccccttctccaggccaggcactgcctggcaaggctgctggagggagatctggccgcagatggtgaaggagaacatcgaggcccccagtccccaagcagggctccatgggtcgggcggcgggcattggtaagcccaggcgaggggtgaacttcctttccccggggccgacgcggagggagggtgcggggaacgcccgccgaggggcctgtcctgcg

SEQ ID NO: 13549 - DNA, 2300 bp, Homo sapien
taggccaaataaaaagatactcaagtaaccaccactgggcttagcaatgcagaggtcactggtgacattaaacaaagaagtttcggtagagcagtgtgaggtgaaagcaacttccgaatgttcggcaacatacgatacattttctgatctggttattgccaacctttgaattcaaaaattaaactaaaaatcatatatggctataaccatagcatagtgaatcagctactctctgacatcctaatcaaataggtaattttaagtgggatgactttttcctgctttattcctcccactccccagtttacaacttgttaaatcgactggaataaaattaatatctacccagagacacaggactttttactcagatgaagaatatttttcaaataattcttttgataccaatttttttaatcttcaaacttaaaaaagacaatctcaaataaaattatactatattttgaatagatgaacactaaactattttttatatatactttaagttctagggtacatgtgcacaacgtgcagatttgttacatatgtatacatgtgccatgttggttagctgcacctattaactcgtcatttacattaggtatttctcctaatgctatccctcccccatcccctcaccccacgacaggccccggtggatgaacactaaactttttaactatcaggattgtccattttatatccttacttttagtggcttaaataaacctcattttcttttatggcagtacatgtttctcacctctgttcacagagtttctaatctgtctctgatttaatatgtctcatagtttctaatatgcctctgctttaaagtacttcctaaaaattttatccacactacagactacaacttgtccatctgggaagacattatctaaatacatttatgattgtaaattctcttttaggacctttatattaaccccacaccccgccattggtaagaaatcatatttgagaaaaatgtgggaaagctagcatttgatttgatggcattaatcactgatatacagatgtgctaattattgacttcagcagaacttttaacacaactactttaatgagtttttgaaggggaaaatgttggttatatactttctgacaaaaaatagtcaagcacggtagctcacacctataatcccagcactttgtgaggccgtggcaggtggatcacttgaggtcaggagttcgagaccaatctcaccaatatggtgaaaccccatctctactaaaggaaaaaaaatacaaaaattagccgggtgtggtggcatgtgcctatgactcaggaggctgaggcatgagaatcacttgaacccaggagaaggaaggtgcagtgagccaagatcgcaccactgcacttcggcctgagccacagagtgagactccatctcaaaatgaataaataaagaaataaaataaaaataaaaactgtttttttaaatgtaggcagaactgtcttttgtcagtatatagatacgtgtgtatcttcattggactcagtggggacaaaagttttacttcaagtgcatataatttcatattatctttaaattttgtcttcaaattgtattatgtttataattcaagtttttttttcaaaatcaatgtcacaaacaataaatgttagaaaaaaactttcatttttcttgaaagaaacataagacatattaccttttatttattttatctgtgtgatgctttccttaagaaaggcatctgttttggaaataaacagaattaattttaacccataaccctgaaacttaataattatagaaactagagtagattcttttacttatctgtgctgcagttttctcacataaaatgaggaaaacacacttacttcatagggttggcaaaagggaaaatactgaactaattttgggctaaaagtttcataaattaggtacacaaaattaatacctactgatttggtttggctctgtgtccctgtccaaatctcatctccaattgtaatccccacgtgtcagaggagggacctgatgggaggtgattggatcatgggggttctcctgatagtgttccctcaggctgttctcgcgatagtgggtgagttctcatgggatctgatggttttataagtagcggtctcccccgctcttccctctcattcctgacgccatgcgaagaaggtccttgcttcccttttgccttctgccatgattgtaagtttcttaaagcctccccagacatgcagaactgtgagtcaattaaacctctttcctttataaatggcccagtctcgggtattt

SEQ ID NO: 13550 - DNA, 2300 bp, Homo sapien
gcaccccattcacaatagcattttgcaacttcttatcttctcgtttgcccccaccactgcccccacccccagttcctccaggacctcctatggactcaggggggtctctgtccagggctaggaagactgtagagtagcggcgttctcgctgcttggcggactggtgcacagagtaggtgatgaagcaaagactgggggtacacaccattatgatctggaagacccagtaacgtatgtgggagatggggaaggcgcggtcatagcaggcctggttacagccgggctgcagggtgttgcacacaaacatggtctgctcatcatcgtacaccgtctcccccacaatggccacaatgaggatccggaagatcaccaccacagtcaacaggatcctgaacggaggaagagggagggagagaggttctcacgggctgcgtcactgacaggaaacccctgctcctcccttccctttgctggtgtttaccagtcttttgactggggagctgtccatcccgggctggtactgaactaggaatctgggaaagctttttgtctcttccttttctgctgagtgctggtaggctgggaatatttcatattatagagatcccaggtacacacatctccatacactggacatagtctacttgcaacagatagatttcatctctctatatagaatgtatagaaacacaaaacacaccttcactctggatatggcaaatgcacacagaatacctttacagatggtgcatgcttcgaggtctacacacagggtgtgtaaataactactccatgtgtatatttagtttattctcaacatgaatattaaatttaatgctttatataagcagatggctatgaatatatattcatatatattgaactcatatatatataaagctaggtagatagagacatagatatagatacagacccaaaaatggcaattgggtgtgtaggctcggtaagtttacaccgccaaataagtttggtttagtaattatttgttgagaaaagaggcatctgctctgaagagcaaatccatctccccatttgcccttttctgtccaaatgcaatcctgccttctttgtagattctatttagggaaccaaatggagattggctctgactctggagagtggagggaccaagactgagccagcggctccttttctgatgtgggaagagtgaagccccagtggtgcttgatggggaagggatgggcagctggttaggagtagctagaggaggggggcatcgcggggcgtcgggtaatccctcatcgccgggaacaccggagccttgacctaggacgatggggaggaggcagaggacggactggggattggagcgggagactcagtccaggtgtgagaagggactcccgggggccgcccgacggggccccctgaccgccggcttggcgcccttacctcccgatcatagtggagtgctgctgcaccgcggcttctagcagcctctccaagatggtccattcccccatcgctgtgcatccggaggcagcagacaaagactgggcagcaccgggcacgttcccgctcctggcccctccccgggccgcacttccagaatgggagtgaattgcctcccaattaaagaagcaattttttaaaaaatcctcgaatccccctttccttttattgtacttaaaagagaagaaatggggaaagaaatccaagcgcgtcccgaccgatggggcagttggcgcggtctagagagagggcacgaacctcgggcgccgtccggggttcgggtctggatcccgcggacgccgggacgaggggcggggcggggtggcagcctgcaggtcctccagcgctcgcccgcccaggagaagtctcagcgccgctctccgccgcaggttgggggccaggggagggtccgaacaccggctctgttcctgctacttcagcgggcacctggcgctccggcgcggcagcctgcgaggccagggccgagcgcgcggagccgaatgctgggctcggggatccgcggccgccgcctctaatccgcccttaagtagtctccgcctgcgtcacgccaggtcggcggaggggagcagagcgcgccgtgcggctgtcgctgcgcgtcggagcccgaggggccggggacgcgcgcggggggagaggggcaagagtcctggaggcccggcggggagcggggcgatttcgaaaggaaggactgcagcgcccctcggggcttctcggggagcccaggtaacctcacctgaccgccagacccaagcaggcggagggggagccgggagcggacgcgtggg

SEQ ID NO: 13551 - DNA, 2300 bp, Homo sapien
ggacctagggccaaggggagtagaagggaaacctgggaaaacacaccaagtttgggttaggggatcaccattccatctggaagctaactggataatagggtatccattcgtcctcacccttgaacctcctccgtgttcagaaggaaactaataaatcactttatccctctctccattgttagtggactcttttactcctttgcagtgaaaggctgctttcttggggtaaagatgtcaaccctagcagaggatttcagtgatctttctggcggcgaagcttagaccgtgtgtttaaacatcattttatgaagaagtacactgtgagtggactgagggccatgccctgcacctttcttcccagtccctgggccaccaactacccaaccacctcggttgttccagaagtgaaggctcaccatggtgtggcttatgtaatatacatatgtgctatgatccctgtggataattaaggctaggtccctttatatgcctaggacaagttagcaaccctttcaaggtcgtgttttcgaaaggatgacaattactttcccattggacttttggtacatttacatcaaacactgccagctacagtgtctcctaatactgacccctgggctaattagcagcttagtgaggttgtttcaatttttcagcaaccaattaagtagttgctctagacagaactgacaacacaatgtgaattttaaaaaccgggatctgctggttgaggggagaaagccaaacccagtaaggcaagtgggggcagggcgaggctgtgagtggctctgtttctgctagcagaatactgggtcttaaattcagattaaatcacagtttacctgacgagtaccccgcccccccttcccattagtaaaataatagcaataatttaaaaagagccgagcatctgggttagtgcaaggggaagcgagacctttaaccatggccaccccacttgctctttgcgaggcacctgttagatgcgctcgtgtgccctgacccctataccgagagacagctccacacctgcatttacccttcagcctaaatggattcccatcaagcctttctcacttcactgtcggatccacagaggcaccgaaccgcagccactctgcagaagcactctcagccactctgtcccctaagggagatttaaaagtggtcgcccccactcgccctccctcagccagcatctccatctagggaaggaatttcagttgtctccaggaggcaaaaagcgaaaaggtgagggatgcaccgagagaagagaagatacctactcactcccctccccactcacccacgcgtccgctcccggctccccctccgcctgcttgggtctggcggtcaggtgaggttacctgggctccccgagaagccccgaggggcgctgcagtccttcctttcgaaatcgccccgctccccgccgggcctccaggactcttgcccctctccccccgcgcgcgtccccggcccctcgggctccgacgcgcagcgacagccgcacggcgcgctctgctcccctccgccgacctggcgtgacgcaggcggagactacttaagggcggattagaggcggcggccgcggatccccgagcccagcattcggctccgcgcgctcggccctggcctcgcaggctgccgcgccggagcgccaggtgcccgctgaagtagcaggaacagagccggtgttcggaccctcccctggcccccaacctgcggcggagagcggcgctgagacttctcctgggcgggcgagcgctggaggacctgcaggctgccaccccgccccgcccctcgtcccggcgtccgcgggatccagacccgaaccccggacggcgcccgaggttcgtgccctctctctagaccgcgccaactgccccatcggtcgggacgcgcttggatttctttccccatttcttctcttttaagtacaataaaaggaaagggggattcgaggattttttaaaaaattgcttctttaattgggaggcaattcactcccattctggaagtgcggcccggggaggggccaggagcgggaacgtgcccggtgctgcccagtctttgtctgctgcctccggatgcacagcgatgggggaatggaccatcttggagaggctgctagaagccgcggtgcagcagcactccactatgatcgggaggtaagggcgccaagccggcggtcagggggccccgtcgggcggcccccgggagtcccttctcacacctggactgagtctcccgctccaatccccagtccgtcctctgcctcctccccatcgtcctaggtc

SEQ ID NO: 13552 - DNA, 2300 bp, Homo sapien
tgctctacttttaaaaacgaacaacacatcctggggaaggctttctcggcaactctttcagacctccattccctttttgtgactatcctgctgatacctcttcttccctcccagtttgtgccatagctgtctgacttttctgtaattgccacggaggatgagtcctgctctgttttatttatcactgaatccttaactagcacagttcttgtcctgcaaagatttgctgaatcaatgaagaatgaaatcaacctgattctttaaaaggcagagctactactgcctccaaaagtatcattattacacatacaatttgctttgtatcttccatattacttacagcatttgtttctaactattacaatacacaataacttctgcaacaagtgttatggtatcacttttgagagggaaaacttggggcttgggaaggttaagtgtcttgctcaagaccaaacagatagttagtaagtgataaaggcagcatttgagcccagttctgtctggctctgacaccagtcccatttctccttttccttggtttttctatattttcacgagacaaggcagttctactcttggcatcctgtcaataaacattttcactgtaaaatgcctgctgtgctgcacagagtaatctcagccaggtctcttacccgaccccaccacacagctgcccatcgcgtttcttctccagaccaacccaaacatggttggggagttcagaggggagggcccagcattccccagtcgggacaagtatctaatcagcaggcctcctcagcatatcagcccaagaccactctagagagagatgccagtgcccagttttctatttttaactggtgtgaactggaggaaaaacacaagcattaaaaatcaaagctccagtcaagaactgagaatgcagggcaccccagggcaaactagtgatctgtgtccttcttacatctccctcttccttctccctctcctcatttcatgtcatttttctttttccttctcaaaagttcaagatcctgcaaaatctgttttccacagaggagatgatatctgtcatttatgccaatgcttctcacactttaatgtacataccaagcaaatgaggatcttgctgaaaagcggattgggatggctcttgagattgcatttctagctcatttccaggttatgacaatactgcttgtccatgggctgcactttgagtagcaaggattggtgtagtcctatagtttaagttgttgctatgttctccatcaaagtatttgcctttgcagtcttgtctccacctggagtgagggcctctgcccccagtttaaagatgctcatctccccaccatcaagtgggcaagctacttttggcatttgttcctttattcactttggcagcaggggatccttttctggcctgaagaccagagtctgaatttgagcaaaaccctgcagcatggatgagggctacccaataactgggctggggtaaacctggtcccttctccagcaagacttggccaagctctcacagaaacccttttctgactcttccctggccagaccctgatccatgcatgggttggaactcgggtggccttggttaatctcagctttctgacctagatgagcccagcaccagctctctgagtaaagccattcaggctggcggggactagaccagaagggtgccctgtcctgggtgccccttttgcagccactcagatgtgctgctgcggtgtcctttgtgctggtggcagccctggaagatgagaagccgctgttgctcccctgctgccctggcccagctgtcaggacccctcagcagagggcagggcgccaagccttcccactgcatgtggcttattgtccccaaggctggcagggctgcggaggaccgaatccacagaccatccagggagcacccacaccccagaaagggggaggggtgggctggcgtcacttagtcttcccctgccccctacccttcagcgcctgcccctccccagctccctatttggccatccccctgactgccccctccccttccttacatggtctgggggctccctggctgatcctctcccctgcccttggctccatgaatggcctcggcagtcctagcgggtgcgaaggggaccaaataaggcaaggtggcagaccgggccccccacccctgcccccggctgctccaactgaccctgtccatcagcgttctataaagcggccctcctggagccagccacccagagcccgctgccgccggagccgagccgacccgccccgccgacggtgagtcagcgcccggc

SEQ ID NO: 13553 - DNA, 2300 bp, Homo sapien
ttacttggaaatagagcaataaatagttgagttcttaagaagcttacattctggggaaatgagggaggagagagcacatatatttaaagaaaagatagagaaatactactccctcttatctccccttctttctccccttttcctagcaccttccctccataggtaaccagtttctttagtttcacgtttatccttatattccttttgtataaaggagaagagatatgttacttttatattattttccttcaggttattatactatagacttttgggctttgctttttcatttaatgaattgtcctaggggggtccattggattttaaataacattattttagatgttcacagtatacgtcttccctccacccctactaaaaaaaaacttaaatcttgtgtgtttaataataataagtactttataaaaagtgcctttttatttacttatttttgaagaaatgctgctgtggagaaataggaaaatggtggagagagatcatggggtggtagggtcacataaagcctcaagtgtcaggctcaagtctagacacaatcctattatatccgagtttcttgatcttttgtgggctagtaaacaggcacattcctgacaagaggtctgggacagagcctaggtgtcatcatgtgtaacaagctccccacgtgctttctatgtaagggctacatgtcacacctgaagaaatctggagtgcaggtcagacaatatcactgaacagaaggcttggaaacccatgctttagataacactcatgagttcaaggccctggggaggttagggctgagaacatctccccatcttctcctcaagagatagtgaggggcggagagtgctgtgtctcaaggaaaggcagctcttggcaagactccagaaaataagctaacaagcaaaaactcttccatgttcctagtcataatagcatggccgtatttgtacatacgagttctgaccattgcagaaaatgaccattaatcaaaagaatacctgcttagatggaatgctgccatcctgcttacttctgagaaatgttgtttaatttactaaattatttctaacttcatgctctttaaataacttttcactttgagattgaatcctccttttttggggtatgttttttaccttaatgattttctaaattgttcctatcataagaaaggataagactttataagcattttattaataactataaataggaaagttgttaatctctattttagggtggtttaaaaagaagtgcaaattctgtattttcttgatttgctttactaccttacctacacttatagagcagtgtttcttagattgttgtcagaagctacagaagaatcagctcattccacccagaccttctgaatctgaatctatagggctggagcctaggtacctgcaatttaacagtctaccccagatgattctgatagacaccaaaatcttaaaaagagcatttgaatattcaccctcttgactcatagtatatgtgttaaataaaagtaaatgttagcctcttactttttagaaaaatataagtaggacaaagagtgttaatattttctttctgaattatcttaagaactgtctttggagcatacacagtcttagaaactgctgtttcagactgtgttgacttttctctctagtcaaataattacttatcttgtactaattcttttatattagatagtaaactaaaacccatacttaacttaccagcccaaaattatattaaaagctggcaactcttagctcttctagtctctaacctttctaaatttcaatggaatcactattcttcatgaagtctttttttttttttaatgggagtcacgtggccagcaggcagagcgtgctgacctgggccccctttttattaattctatttaagtctttttttaacattcatgaagtcttcattggactcttcacacttgcattttatgtcctcttactgttaggtcttccagaccctaattgtgcttattcataagattaagaaatgggtttatgttgaagtgttaccttctagggttgttttactagatacttaacgttcttttttccttcttctagaatggagagagaccatctcatgaagtacaaataataaaaaatatgccccagatggcaaactttgtatacaacatgtacatgcatttgatacagactacacatcattatcatcaggtgagtttctcaaaatcgacttttatttttcttgctgtagaaataattttctttttttcagaataaatctttaaagtacctaattccttgtgg

SEQ ID NO: 13554 - DNA, 2300 bp, Homo sapien
atgttaccatcctttgttttttttgcctggtagtttgttatgttcgtagtatttggtcattcatttaacaaacattttcagatccatccattgtttgtcagtgtgctagattcttaatatttagtaatagatctaacattcatgatctctgcccttgtggactttagggtctagtggcagattcattaatatatccttggaagatacctacatttgaatctgcagaaaatttgtagttcaaatctcctcatgtacaacggagatcatactgacaaaagccactttactgcactatagcactgaaggctggggagaagttttctccgagaccatacagtggtcattgcaataatgctgtatctgtgctgctctgtctagagatagggccttctggatgtaagagatcaccatgaaaacaacagtttatcacctgcttccaccactaaccctttttcctcctaacaacattaaattccactataattttatttataatatttgtgtgaggacttacgctaggtatttctagcagtgtaccttcagttaccagtgttggaaccacccaactgtagcataaccccttggggttttaaggaaatgtggcgaaaataataatttggctgacagtaacttagaaaataatatttccttcatgaatccagtatgtcacaaatgtagagattcctcaaggtttctgtaaaggagtatgtcctttccttctacctaaatgagcatgtcttaattttgtttgttgctggggaaagggtacctatccctgctctgtcccttcacacacatacacgtagcacaagaatataagtgatagcatatgctggtgtcacactgtacctccttaaggaaactagatgattttaagaccatagactagaccataaaaaaaaccataaaaaatgaggccgaattagagatactccccaaataccttgcattacacaaagaaaagctattagataaatattccaattcctggttctctctgtctctctgaatgttacagagaacaatctctgtaacattagatctctgtaacactcttcacactttctttcagagattggaggtgattctcccaggctttattattcttcatgaaagtcttctcttttgcagagtactcaaaaatttaaatagccatctaaaaacatctcaggtaaaaaatctgtcctctgcatttgaaaccaaaattattttttctcactaaaacacattttatttaatagtgaggtgaaattacattagccctcttcacatttatttgattcaaaccttttttaaaaaacttagattcttttaaaaaaataaattaaagaaaaatgacatcattcatcagatagccagctacatgtgtagtttgatcattcagtttaaccgttttatcactgttgatatgaacattgagtacctattataggccaggcattgaatctaaatactagaataaatacatggataaaacatgttataggctgactgtcccttatctgaagtttcagattttgaactttcacattagggatgctcaacttgtgttgttttataacatcatactgtatttccatatgtacttattattgtaaataagtataaaacagtgtggtaagagttatctaggaagtaaaattttaccttaatggagcctgggattttggtaggtgaagtggaagaagagctagttcgaattgactcaatgacagtgatacagtaagttagtaactgacaattgaactctactgtaatactaatatattacttagacctttttaataagtgcattggttattttgtgatcctccccttcaaaaaaccaacaagaggttagtaataaagccttaacttttacttggtttattagtcacgtaacattgattaacttctattaagtttttaagaagcttaactttttattgccagggcttaacaggactatctaatgaaatctgtgaaaaaaaaaaaagctgcttaaatgttaataatcttgaagtgtgctaattattttgtttatttcccaaagggatgtccgtcgcttggtagtggccatgtctagagccagacttggactttatatcttcgccagagtatccctcttccaaaactgttttgaactgactccagctttcagtcagctcacagctcgcccccttcatttgcatataattccaacagaacctttcccaactactagaaaggtaggacttctttcttcattttataaaacagcattcctcagagtggaaattgggattttcttataggtgaccacattagcttggaacattatt

SEQ ID NO: 13555 - DNA, 2300 bp, Homo sapien
ctttttgctagtctttttctgtaatgctgttatttgtaatttttatgttgctttttttgtttttttgagacagagtttcactttgttgcccaggctggagtgcagtggcaccgtctcagctcactgcaacctccgcttcctgggttcaagcaattctcctgcctcagtctcgtgagtagctgggattacaggtacccaccaccaagcctggctgattttttttgtattttagtagagacggggtttcaccatgttgcccaggctggtcttgaactcctgagctcaggcaatccatcttggcctcccaaagtgctaggattacaggcgtgtgccaccgcgcccagccttatgttgctttttaaaaataattctttatcttttaagtgtaataatgtactaattgagcagatagtagagtttaattgtactgtatattgcttttatttatttatttatttatttattgggacagagtctcactctgtcacccaggctggagtgtagtggtatgatctcggttcactgtaaactctgtctcctgggttcaagggattctcatgcctcagcctcctgagtagctgggattacaggcgcccaccaccacacctggctaatgtttgtatttttagtagagacggggttttgccatgttggccaggctagtcttgaactcctgacctcaagtgatctgcctgcctcggcctcccaaagtgctgggattacaggcgtgagccaccgtgcccggcctgttgctttttaagtttaacattacttcacaaaaattttggcattttattaacagagtctgtaagcattcctgatttttttctcattaacgaagtgttcattgtagataaaagtttatagataagcaagcagaaaaaagttatctgccatatgtttatatccttccaagttgaaaaattcttcaagcatagatcatgttttagatctcttttttgttcttaatcatcccttgctacctcaaatgtgaatctctgaactacagacagctaggaacatgacttcttcttttgttgagtctttaaacatgggaacaacagtgattgattaaattattttagtcttattttaagcattaaagggttatgggagaccctttgttgttgtggtgttgtgaaaagaatgtgcatagaatttgggatctaattctggttccactactttcttccctaactgtgtgttttcggacaaggtactctccaaacttcagttttcttactgattcagcaaacattaagaacctgctaggtttgggtgccaagttatgtattgggatatgtagatgacagagataatcaaaaacatttaaaaattacttttcaaagcctttagatctaatctacttttatgtagtgtaaaacagtgctgtttgaagcagccagtttgtgaacttacatgttcttggtctgtgatgaaatgaactagcaccagaatgcactgtcctgctttcttctttgtgaaagtgtcttgctgtgaaaagaaagattgagagctgaactaaatggtgtatttggtgatgtagttgactttccctcctcctagaccagtaacacccttgcagatcaatactgttccatggagtatactctaagtagctttttcttttttttttttgagacggagtcttgctttgtcgcccaggctggagtgcagtggcgccatctctgctcactgcaagctccgcctcccaggttcacgccattctcttgcctcggcctcccaagtagctgggactacaggtgcccgccaccatgcccggctaatttttttgtatttttagtagagacagggtttcaccatgttagccatgatggtctcgatctcctaacctcatgatctgtccgcctcagcctccccgaagtgttgggattacaggcgtgaaccaccgtgacccacctactttaagtagcttttgtgtaaagtaacccaagaactaccaccaatagttaaatagaagccatatcttctagttttttttcctcttctttgctattatgattttcttgaattttgctgattgtttccttcaaagtctctttattacagttttgtcattttgcctaattgaaatgtctaggtatggaagagttaattatgttctggctcgaagaatagaacttttagaagaagtcaaacgattgcaaaagagtctaggggttccaggagatgcctcatatacctgtgaaactgcaggctatttcttcttataccaggtaagatattaagggtttttgaatcatacttcatcataatatgaaccccagttggaagctgga

SEQ ID NO: 13556 - DNA, 2300 bp, Homo sapien
atagaggggaacaatgcacactggggccttccagagggttgggtgggtggagggagaggatcagaaaaaataactaatgtatactgggcttaatacctgagtgatgaaataatttgtacaatgaacccctatgacacacctttacctatgtaacaaacctgcccatcctgcacatgtgcccttgaacttaaaaatttaaaaaaaattgtccatattaagtgttgacgaggtggagaacaaactagaattatatgctcctgatgtgaatgtaaaatagtactactttagaaagatggcagtttctaaaaacttaaacatatacttgccgggtgcagtggcttatgcctgtaatcccagcactttgggaggtcaaagtgggcagatcacgagcttaggagttcaagaccagcctgaccaacatggtgaaaccccgtctctactaaaaatacaaaaactagtcaggtgtgatggcgcgttgcctgtaatcccagctactcaggagcctgaggcaggagaatctcttgatcccaggaggcagaggttgcagtgatccgagatcacgccattgcactccagcccgggcgacagagcaagactccatctcaaacaaacaacaaacaaacaaacacacctatcgtataacccaaatatttcactcctaagtatttaagagcaaaggaagtatatgtccacatgaagacttatacacaaatgctcatagtggctttatttgtaataactgagaacttggaacaactcaaatgtctatcagcagatgaatagtttatcaaactgtggtatatcagtaaaatggaacgaatgttaagcaataaaaaaggaatgaactactgatacatgcaacaacatgaatccatctcaaaatcatttcgttgagtgaaagaaggcatgcactgtattatttcatttatataaaattccatgaaaagcaaactatagtgacagaaagcagatcagtggttgcctgaaaagtgggtgggaacagtgaaaggcacagatagcaaaagttcacgaggaaacttttagaggctttgatatgctcattatgattttggcaatagtttcacaaatgtatgttcatgtcaaaacgcatcaaattttacaacctaaatatgtgtgggttattgtatgtgaattatttttattattattttatttttattttttgaggctagtctcgctctgtcaccaagctggagtgcaatggcgcaatctcggctcactgcaacctccgcctcccagcttcaagtgattattctcctgaatccgagtagctggaactacaggcgcgcgccaccacgcccggctaaattttgttttttagtagagatgggttttcaccatgttagccaggctggtctcaaactcctgacctcaggcaatcggccagcttcagcctcccaaaacgctgggattacaggcgtgactaccgcgcctggctgggttattgtatgtcaatttttacctccataaaactgttaaggcctgtaatccctgcactttgggaccctgaggcaggcggattacctaaagttggtgagttcgagaccagcctgaccaatacggagaaaccctgtgtctactaaaaatacaaaaattagctgtgcatggtggcgcatgcctgtaatcccaacaacacgggaggctgaggcaggagaatcgcttgaacccgggaggcagaggttgctgtgagccgagattgcaccattgcattgcagcctgggcaacaagagcgaaactccgtctcaaaaaaaacaaaactaaactaaaacactgttaagggcagttaaaacccagcccatattcccaggctgttttttttgttttgttttgttttttctttagggttgaaaaaaaactaaatccccattcaccgcacacggcactcttcactaaccacgagaaaccccacccaacaccatccaccgggtccctcccttgccctcctaatcccgccagcgaggtgtcttctctctgccgcccgctagagggcgtgtacagaggaggtcaaagctcttggctcgctagctcagccccaacgcctgcatgaacttccggctacacgccattccgcttcccgaggaacgcttgggctgttgtacgggttccctacgggactctgaaggctgaggatatccggcccggagcgtttgtgcggcgcggagttaagcgccccggcagtaacttaagggaagtggaccagggttgccgctgcccagagcggtcctttagtttccactggagtggagggaagagtgctgccatggcagcccctgcgcagc

SEQ ID NO: 13557 - DNA, 2300 bp, Homo sapien
cctaaaaccacaggaaaatagccatgccattgtgaaaggtagagcagacagaagcacgcacaatcagttcaacaatgtgattcaacaactctgaagcttatttattcactagactttcaagtcacgtaagcccattaagatccttattgctaaagcagtttgagtcaggtattctgtcacttgcagccaaaagcaccattactgaatagggaacacatgaaattgtttttaggtggaggggaaagaacaattggagagagaaaaactagataccagaaaaagggactattaagttcccagaagtgggcaagaaaaaaagctagcttcagaaacatgaaggaacattattctgagacagatgaagagaaacagagaaaagataaagttttgagtgaagacaagtttagagagggcatgttggacaagctttgatcacaacacagtagaaggcaaattcatcctctgaaaggatctaagtgaaattgtggatttaaggaaaacataaaagattggtaataattgctccattcattaatttcttccttcatacattcaacatatatttgagaacctaatgtttgccacagtattaagccttccctataaatgatatagattcattctgttgctttccagaagcatgtagttcagtggatctcagagtgtagtctcacaacagctaaccttagtcactaaatgcaaattttggggtcctaagagacactgaatcacgaactctgaggacgcaggccagcaatccatgcttttaacaagcccaattcacactaaagtttgaaaaccactagtttctagtggaagatcaacagagttataaacaaaaattaaggggaatacaggggatggagaacttgggtaaatcagagaggctcccggaggtagtatttaagctcaaacttcaaagaacaaatagattgccaatttagatgcaaaatattacatgttctatatttcatgtaataccattatattacttttcagttacctttccttttttttctcttactgctaatagaattcccttaatagaattagcccttaaattctaagcccttctaactggcaataaggagaaatctcaacaagctagggattaaatgttccttccctgtagcttcaaaaaagcagacaccattctgcatcataaaacagtacttggcaaatgttatttctaacaaagattcttgtaaaagatttcaaagactgttgctgcatcctaaaaatataattctaattggttgtgttatataacatgtacattgaaatccgtgttctgtgcaagtcagttttaagcacttttgttttcccccataatcatgaaaaaaaagaaacttgactcagctaaactttgaacagattgtctgtttctaatttgacacaagatagacacgatggaaagcaaaaagaataacaatactagtatgtattggagaaaccaattctatatactgttttttaaagagatgatcttgctctgtcacccaggcatggaaggctggagtgcagggacatgatcatagctcacttcaacttccaattcttgggctcaagcgatcctcccgcctctgtgttctgagagcagctgagaccacaggtgtgtgtcaccacctcacgtggcttaaaaaaaaatttttttttaaatgacggtggtcttgctttgttgactatctcaaactcctggcttcaagcaatcctcctacctcggccttccaaagtgctgtgattacaggcttgagccactgtgcccggcccctaattctgtatttctttagtacaaatctgaagagaaaggccaaaaaggaggataaacagataaatacatagaccatacaacatacaatggagttaacatattcttttgtaggtgataggaagatgtcaaaggatttttttttcccacagaagggaacagcatggaaatgtaacatgaacaagagcgtaaatgatcaaatatccatgtaaatttggtgtagaaggtagattggagtggacctataaaagtatccgacaatcagtaccttggctccaatattttgtaattcccgccccgccccccaaaaaaaaggccaaactgtgtaacttggaactttatttttaaagtattctgaaaattttccaagaattttaaccaccacctacttcccttaaacacacacacatttttatcttacaattataacccctattgcagtacaaaacaagaaacaataattctaagttagccagccaatcaaactacttcagtaaatgatcatactacagcctggaatcactcaaacaaa

SEQ ID NO: 13558 - DNA, 2300 bp, Homo sapien
gtatttttagtagagacagggtttcacaatgttggccaggctggtctcgaactcctgacccatgatctacccgcctcggcctccctaagtgctgggattacaggtgtgagccaccgcgcccagcctaggttaaataacttctaaggacacaactagtaagctgcagcattaagatactaattcaaacgtatgtcatgcaccccctttatttttcattctcatactatcttttcttcaccctgccacctctgccctaccatgttctgtcctgcccccacattttttatttattcatagtctacccactactgctagttcaaatttcacatattcaatgaaatcttccttgattactcttattcatgttaatttctcttttttttccagaaggctcctgagatagctctcacggtaaatgggggaggttatgacatggggcatgtggccttggagaatagcctattcaagtcctaactgctttcacactcaatatatattcagactctccatgcaaaggccaatttgttttgcaggtaatggataaagaacgaatctcaccctccagtggtccccaatttcaggtagtgttttctcatgatatggatgtatctcctaaggctgatgtggctgatgatggatgcaattgtttgcattatttggctgagttaagtttcccaggagtagctgcagaatggagcagatttacaagggttatccggacaaacagcatccccactttgggactagcatttaggacaccagaagtctttcctttcccttctccacccctgcttctgttggaagcagacttcaacccctcccaaatctgactccttcagggttcctacatgagaagcaaaagctcatttcctattcgccatttcctcatgctaacacatccaaaacagagaatttttgttggctcagctgctttaatttttttggtagaggaaaatatatcaacattagaaaccattgatttttgttgctgatggtccttagaaagtaatgcaaaaagttgcttagagttaaaaaagtatgcctgataatctgctttcatttcctcctttctcaaggtgatacaattacaatcagaacctgcaaaaaatccacagtaaattcttctctaatgccttttgcacttaaaatctttagtagataccttagcatcttattcagtaataacatgccaacttagtctgtaactaaatatttggtcttcaattgtgactacataaaatgctgaaatatctataacttgggaagcagcagttataaatgcaggtctggtattagacaacctgtgttcaaatcgcacctctatcgtttattaactgtgtgacattaagttccttaacgtctctgatagcctcattttcctcatcttaaaatgggatcctatcatttcataaagttgtattctatatgagtaattaataatgataatagttctttgaaggcctactacactaggaattatgttgagcacttcacactcattttatctaattgtgagaacagggcttcgtacactgtagacaaccaaaacatactgaatgattgaggcggggctaatgaggtccgcagctggcacgccattagaggagtcgcgagtggagctcagtcatgtctgcccacaaagcgcctgcgcttgacctctacgttatatttactttggcaatgtacaaagtggtgaggacagtcctagcccggagggcccctaacacattgtcgtcttcttatcctcggccctctgcgttagagagggctgccccgaatcggctttgaacgctgactcgcccttttccagtcggcccttgagcccactagtcagggctacagcgttttcctaaccgaggttcagaggtgagatggaaaatgtacccgtctttattctgttctctcccctgcaatgacagggtgaatggcggtggggttgggggcacgtctccagagtcccagtccgctcgggacccgcggaccgcccggaggcgacaacggccctgaaattggggggagcttgtttccagccggactgtgtccctgggcgcgccagagcgccgcgcctgcgcgctcagcccgttgccgcgccggccctgcggacgtgcgcgcgctgccttcgcggcacctgggcctgaggtgcgtgcctcccgggccctcgccagctccagatgcgtgaggaggacttcagaaacccgactgagaagtggagcgacccccagggagggtcggacctgcctcaataccgccaaggtgcctggggacccaagaacgggggctccacaacctcagttcctgag

SEQ ID NO: 13559 - DNA, 2300 bp, Homo sapien
aaatttcttactgttcttgtatgttggtagcatgcctctaactttgcagaatttctaaaaatatgttttattatatattattataaataaatatatgtaagaaatacatatatttcttgagatggaatctcactctgtcacccaggctggagtgcagtggctgatcttggctcactacaacatccaccttccatgttcaagcaactgttgtgcctcagccttctgagtagctgggattataggcacgcaccaacacgcctggctaatttttgtatttttagtggagacggggtttctccacgttggccagcctggtcttgaactccaggcctcaggcgatccgtctgcctcggcctccagaagtgctgggattacaggcatgactcaccacgctcagcctctaagaatatatttttagatttacctttctactgtcacttcaggacaatttggaaagggatgagacataaatacttaagttcaattgatcaccttgaaccacaacaatataatcttaagattttttttaatgcttttttttcagcatctacattaaggatacatatcatcttaagatttgagggaagaacctttcacattcattaccttggggttttttaattttcttttacatttggtttatttttcagaatgtgcatagaaaccatgttgccagaagtactttcctcagtagattgccttgtccaccagagtgacctgaagattggtgatggtctctctccacttagaacaatcctgcacattcagagtatttctcactaggcacctgctagcactggacagtatagttagtctatgaaggttagtagacttgcttaaggtttctttgtttttgtggcaaccaagtaggtgaagtaagttgaccagctggctctttttcaataacaaagtttataaataaaaatgcattcgtgatcttgtgtgtatattgacagctttaaaatgcaagaccttgattacaatcctatgtaaaaatcccataaaatatatttatatatgatttcatctagaaaaaactattccaaatacattatacacattttttaaaataaataaaaaatttattttacagtttttaactgtgaaaatgattcctggatcagtttctgcagtagaagacttctagtggttcttaggtgttgtagtcttagtttaggctatgaagcaaagatatttgttgtttttagttcttgatttctagcttaattaaatagtggtcaaagaatgtacttcatatgattttagtttctttaaattcattgaggcttgctttatggcctagcacacaatcaattttggaaactgatttatatgcacttgtaaagaatatgtattctcttatcaatgtgtgcactgttatatatatgccaattaagtaaagtttactaaaagttttctttagatcttctatatctttgctaattttttctttatcagtaactgagagaggtggttgtatggatttgttttctcatttaagttctgtcagattttgctttagttatttgaagatatgtgaaatcaaatttagaattattttcttttcctggtggattttcttttgctacatgttccacttcaataataaaataactataccaactttcttttgcttaatatttccatagtatatctttttccaccttttttatttctaacctttctctatccttgtatttaagggatatgccttttaagcaacatctggttgtacttttaatccagtttggaaatatttgggttttaattggagcaattgcttttaatatacttactgatatatttgtgtttatacttatcctctattttctgcctctctcctgttatatgctcctttttttttcttctttacaatatttaagttaattaggcattcttcattattctgttcccccctttattggtttattaattatacattcatttactgtgttttactgcatatgctaaggaatacaatatattgcctggacttattacaacgtaatataacttttcagatatttacatttcttggacaatgctaggtctgtaaaatattttaactttatttattaccatcctttgtgttattaatcattttagtcctatatatgttttagctcccagaagacataataattactgttttttacaatcaataaccatttatattcacccacatttttattctttctgtcatatttcattcctttctgaatttctatgtatccatttggaatcttctttttttcttttttttttttgtccagcagaactcatgttagtatatattttag

SEQ ID NO: 13560 - DNA, 2300 bp, Homo sapien
tatatatatgcattatatataattatgtattataagtgaataagtgaaactgggattcttacatatctttctaagaagattattttccttttttaaattttttttttattatactttaagttctgggttacatgtgcagaacgtgcagtttttttacataggtatacatgtgccacggtggtttgctgcacccatcaacccatcacctacattaggtatttctcctaatgttatccctcccctaacccccaaacccccacaggccccagtgtgtgatgtgcccctccctgtgtccatatgctctcatagaacattatttttctaataaataaatgagtctttgaattttatagttgaatgttattttgaggattatccaggcagaccattcattaatttgcaatgaagtatgcaaacctaagcacattgaataacttagcttagtatcccagagttggaaactaaaatagagctgtgagacctctcacctaacatacatgtgtacttaatggagttctaagaggacagtaaggtactctgcatttcccaagcttgtctgatattcaaaaccttttgttagagtaattggttagtattttgttggacaccagtgttccacagaacacagtttggtaaatactgcttaaaaccatatttgaaatgttggcatatttcaaaataaattgtcagactcagttctgattctggatgcacacccttcagtctttaatatctgaaacaattagtcatatctttttatcctggggaatcagagcagtaaggttcgatatgggaagttgtggaagacctacttatggggataccgaacctgaagagaggaagaatggactttttaaaacttcactttggcccttgtgctctccttccacttgagaagttttggaatgagagttgttattgatgggagggtggaagaggcagaaatgttgaaaactaagataaaaggcaacaaggccagtttctgaggtgctcagtttcttgagctatgaagaggtctaaacattgcctggggatttgcaggccttaagcaaatattggaaagaagggaaacaggaggaaaaagaaatgtaaaagggagagaggcaatgataaatgatagtgggaattaggagaatattaaattacaatagcatatagattgccattcagccatattatagatgagctactgcttgtctttactaagtgatatgcgtctgccttaggtagatttagaaccagaatttagaagttcctttcaatgtgttactacatttatagctcaagcctagttctgctgccatcatatatatatatatatatatatatatatatatatatatatatattatgtgtatgtgtgtactatatgtatgtgtagagatggctgaagtgctgatagtgctgatgtttcacgtcatcagtgtaagtcagcatcttgttttttatctctgcagaatttgaacccaccaagtgtgtcaaactttgtcattagctaggtactcaaatctttaatttgatcctttaattgctgatggtagccatttgttagatttcttatggtggagcagaatttgtttttttttttactttctcatagagaatagttttttttttcccaataatttctatgaaattattttatatatatatatatatatattccttaagtggaataatatatattatatatattccttaagtggaataatatatattattatatatattccttaggtagaatatatatatttcatatataattatataataaatgtttagctgggatgtaaattgaaatcattttctatttgcaaatcacttcaaatatatttgctatcacaaagcaaaaagttaccatattttgtttagaatattcttatatatatatagtttcttaagctcctgtgagtagcagccctagacattcagattcggttgctcagtttgtttatgatttagaaattaatgggttttttttgcattgtaatatattctgaagagtcaagtaaatgatatgttctgttttgatatctagtgattttatgttgaataatggtcagtagcatgatatttgtccctctcttgatttattgtttagtggtgggaaggacagctgctataatatgatgcagtgcattgctgctgggcatcagatcgttgctttagcaaatctaagaccagctgaaaaccaaggtaagtacatgcctttattgggaagttgcctaaatgaatgaaattccaacttcataattacattgtacaggtataccgtacaaagatgaaaaaaaaagaaccaa

SEQ ID NO: 13561 - DNA, 2300 bp, Homo sapien
ctccattaagtacacatgtatgttaggtgagaggtctcacagctctattttagtttccaactctgggatactaagctaagttattcaatgtgcttaggtttgcatacttcattgcaaattaatgaatggtctgcctggataatcctcaaaataacattcaactataaaattcaaagactcatttatttattagaaaaataatgttctatgagagcatatggacacagggaggggcacatcacacactggggcctgtgggggtttgggggttaggggagggataacattaggagaaatacctaatgtaggtgatgggttgatgggtgcagcaaaccaccgtggcacatgtatacctatgtaaaaaaactgcacgttctgcacatgtaacccagaacttaaagtataataaaaaaaaaatttaaaaaaggaaaataatcttcttagaaagatatgtaagaatcccagtttcacttattcacttataatacataattatatataatgcatatatatagaatacataggcatctgtatcataagcatacaggtaaatgcttacgtattcatacttacagcatatgtccttacagctcttacgcttcagcaagaattttccaacattgcttttttagcaaactttttttattataaagcaacatatgcacattacaggttatttagtgtaactgactctaccaatcttctctcctcccctccaatacttctaagtctttgtttgttgtgctttactttaatcgttaaacttttggcaagcgatgtaaatttgaattattcacttcctggggtacttttaattcttaaaataagacacaatggttaaagcttaatcatttatgttacagaggacatttactgaacaacaataattattgtgacattatggtctagtctcctaaaaatgacattgaaggaaagggaaccggaatattccagacactacagtaggtctgaaatctcatatcaagtccttaataggtcaaaacttacagccagtatcaattacctaagggacttaacgaaaacgtttatgaaatcttcaattggattacaaaagcaagcacatcgttgcactgtatctaagacactctacagggcaaaatctcatgaaacaagtatttaagtagtctaactttttaatgttgctagtgtgttcccttctgcctcagtttatagattgagtatggaaatatttaagcaggtttgtttttggtttgtcagtcacaggacttatttagacacttaaatttatgatttggttactacagacatcaaactccttttggaatacggagtatagggtaaggtcactctaaagcaatgatgagagtccgaagcaacagcaactggatctagcataagactagtacaattcggtctctaccacgaagagagatctctgtacttgagtgcccaaaggcagaaacacacacatgccataagcaatccacatctgtgaagatgagggaggggtggacttcttgggatgggcggaaacacttacaactagggaggaagccaggctgcggcggacccagctgaccaaaggaactacagaagaggacgaagaaagcgagggggaaagggcgagggttattaactgagttgatggaataaggtagtggctccaaacttcacggctcattagagcttgaaaaaaaaaaatcagacgccgggtcgcacagaagtaattaaaccaatccctctggcggtggggcccaggcgtcggtactttttttaatttcccacttgaatccaatgggaatccaagtttaagggctagaagaccagagagcgacagacagggaggaggcgcgccagccaggggccgaggcacatgcgggccggcaacagcgaaggctccgcctcttcctgtggctcggaggagccgcggaacccccaacgcgcgactcagacggagacacccactctttcggcgctagcggcggctggaagggacgagagcctggcctaggaggaaggaggcggctccaggaccgcattacctgatcagagccgcgaccctcatgctgggcgcagtgcgcgtgcgtgcggcgagcgcgggcgggagccaggaggtcgcgccgcagctcgcgtgacgcaccgcggggcctcgcccgggtgttcgctccgccgcctgtccgcggatcggcgctgcgagccccgcggctgcctgcgggacacctgagcgcggagggtgcggcaccttggcaccttgaccctgtggcagggacatctcggcccaggaaagaatgaggtttaggcacggcctaaccacctaa

SEQ ID NO: 13562 - DNA, 2300 bp, Homo sapien
gcgacctttgatatgcaaatgcaggccattagaaactgggtccacacaaacatggcgatagccaccgctgtcctcttgcccttgcccctgtatgtgtctggcaacatggccatccccacatatcgccacacgtgtagaacatcaaggcgacctgcatttgcatattaaaaggctagggtgggagagccaggtttttcgtgggctatgtgaatgacatgcctggtcaaaccaatcccctgagccctatgcaaatctgacaccgcctcttccagtctcctcatataactgcctgttaaccccagcactgggggtttcctctctaggctttggagcccacttccatgtgtctctacaggggagcttcttcctttcttcacccttctttcttgcctattaaattctccaccccttaaaaccactccatgtgtgtctgtgtcattttacccaattcggcatgagacgagagccctggtgcttcttccactcattggagctgtatcattttaagtgtgtttcacgtatttatctcctccaattagactgcaaacttcttaaatacttgactcatttggtaaatattcataactgcaaaatcttaaagctgtatgattctagacgctaaaactgatatgtagactgtcactgctctagtcacccctactattagagttgagaatgtcaaaataaaattgaatgcttactatgtacctggcataattttaagttccctacatatattaacttacttaattcatgcctttggcatcatccctcatgactttctttctcttgtatcccatatcgaatttgattctattggctctatcttcaaaatagagctggaatcctcttacttctcaccaaattcaccatgttgattctaggctccgccatctctctactggaacactgtaacagcttcctaataggtggattctcaacactgcaatccttttaaaattttaagtcacacccttcaaaagtctgcaattacctacaagaccctatataatccttcccctccatcaccttaacctgctctccactactctctgctttgctcaatctgctccagcaacacggatctgccttaatcttccacaaacacacaacgcacctagagccttcgatttttttttcttgtctggagcacaccccaatcatacacatagcgaactctccttatttaaattggctcaactctcatcttaccaataaggcctacatagacacgatttaattctgcaatttgcctctccacctctctcctgactctcccccaccgcaccccgcccctttccaatagcacttttcactcttcaacagactatttacctttaagatatgtattgtctgttctctccatccccatttaagctctatgcccggaatgccgggtttttgttttatttacggttgtatccacagagtctaaaacagtgcctggtacacgaaaggcactcaatacatacttggcaaataaacttagaagctagattttctttctgcaaggccattgctctttggtgaagagcctggcctggccttgtcaaatacacaagcttgaccaagagccaaagccacagagggcctagaggtggggggggctagccccagatttaaaaattaccacagcccctggggatctgagtttcacatctggacacacaggtttggaggacagaggagatgtaagttaaaaagcagaagtgtacagttgtttctgttctgtggggtgaggaaggacaaatttcttctgcgcttgcacgtccgcaactgtgtcaatttgcagcaattgggacgctaaatcccctcttaccaaaacaaatcctgcgccactgggcttgggctctgcaacgcggaccttgcccttcccccggcagcttcagtgccctcacttaggtggttaggccgtgcctaaacctcattctttcctgggccgagatgtccctgccacagggtcaaggtgccaaggtgccgcaccctccgcgctcaggtgtcccgcaggcagccgcggggctcgcagcgccgatccgcggacaggcggcggagcgaacacccgggcgaggccccgcggtgcgtcacgcgagctgcggcgcgacctcctggctcccgcccgcgctcgccgcacgcacgcgcactgcgcccagcatgagggtcgcggctctgatcaggtaatgcggtcctggagccgcctccttcctcctaggccaggctctcgtcccttccagccgccgctagcgccgaaagagtgggtgtctccgtctgagtcgcgcgttgggggttccgcggctcctccg

SEQ ID NO: 13563 - DNA, 2300 bp, Homo sapien
tgaaatgtacaatattccctttaaaaaaaaatccttaacctttggcttaagacagtgtgactatttgatgtagtaattaagcattactgaaagttggcaagagcactgactctggaaccaaatttcaggagtttaaatcttactactgctacttatcctcatgacctctagaagttccttaaccttttcatgtcttagttttttcactctgtacaaaagggaagaggaggataacagcaatagtacctgcctggcaggaagttatgaggattaagcgagtctgtgcatggggagcctgtaaaacaatacctagtaaacgccctgtccatttttatcaagtagtcttacttagcctatttatttatggccaaaaccgcagttgctcttgcaccaacctaatatttcacatagactatcctctagacaccacgctatataatcttttatttgtaccagcctgttaatcttaaaaacagcccatgcccgggcgaagtggctaatgcctgtaatcccagtactttgggaggtagaggctggagcatcacttccggtcaggagtttgagactagcctggtcaataaagcgagacttcatctctagagaaaaattttaaaattagccaggtgtagtggcatgtgcctgtagtcccaactactcgggaggctgaggtgggaagatcgctggagcccaggagttcgagggtgcagtgagccacgatggagccactgcactccagcctgggcgacagagtaagactccatctctacatcaaacatacacaaataaaacacctccatgaattaaatcagttttacagacaaaagaaatgaggcttcgatggattaaggaatttattcaaggaggtatatctaaaacttccaacccaggcattattccagatgaaaaattttaaaccacttacaggttctctaaagtctaagcacctttgctttagtttgcttaaattgttgaaatcagaagagaaacacaacacatgaccttctaagaaccaaacagattttagaaaagagattaaatgagggactgatatcccaacaaattgctttaggagaactgagatccattcacaatacatatagaaaataaaaaaagattggctcattactccaaacatttattgagcgcctactattttctgagaactggggttacaataagatgcgattttagaccttgagcagctaactgcaaggagtgaaagtgacttttttttttttttttgagacggagtctcgctgtcgcccaggctggagtgcagtggcgcgatcttggctcactgcaagctctgcctctcgggttcacgccattctcctgcctcagcctcctgagtagctgggactacaggcgcccgccaccacgcccggctaattttttgtatttttagtagagacggggtttcaccgtgttagccaggatggtctcgatctcctgacctcgtgatccgcccgcctcggcctccgaaagtgctgggattacaggcgtcagccaccgcgcccggccaaaagtgacattctttactgccggctgtttgatgacgtcggatttgtttcaagtctgtttctcaacaaggacaaaactgccttccacgcgatgtacagaagttgtagggcttcctcaacacaagccaaattatgtttacagcgaccctagtgagttttcctgctcggaccatgacagacttggtagagtgaagacatggtttctcggcaggccagtccacgctccgaggagcgctcaaactggcgcgttaggaagtgtattcaaatcgcgcgctctggcaggggctttcgggggctcacgctgaaggatcgcggggcactcgtgagacctgccgcctggtctgtgcgtcaggccgccctggcttctagtaattgggagagtacaaagcatcccttgttgaccctttgatcctaggtgggcgatgccctggattcctacctgcctactgaaactctggcgcggcgcctttccaagggcggccgctacttcctggttggtttgcccttaactgacatggcggctagttgccttcggcgcaccactgcggctgctcagtaagccaagctagggcactctggtgtacagccagtccccgccgcggaggtgccggtggagcctgggaccgggcgagtctccgccccgcttttgcagctaggggtgtgtttcaggggggattggggcaagccaagcaggcgaggacccgggcctgtgccgctttgcctacccctcatccctcggcaccaaggctacttgagccccagggtgttttttccttgttc

SEQ ID NO: 13564 - DNA, 2300 bp, Homo sapien
gaaaagtgaatcctttttaaaattgattaattagctaagtttagggacattacagtgattctttcctttctgttggaatttagaaatgctctagtggtacacccgagggtttatcatgtcagaaattatttctagaaaaactcaagctcagatgttacattttcatttggtagttattccagtataaaaacagagggaagatacctaattggtaagtttcttcagtttttggtgccttagagtccttatttataaaatggaattgttatgaacttgaaataagataatacatataaaatgattagcacggttcctgatactacactggttgctactgcggttatattattggaaccattacttaatcatggttgcttgttgcagtggtatttatggttatgatagttagactcagcatattagaactgaaaatattttgcctaaaaccacccctttccaagtattttcttgtctacttttctcaaatgcaaccactcatatctggaagctgttttactgttttgtctcaacttagtaagaagggggttatgcatttatgaaagatacttgagtgagtaccaggtttagagtcagggtttctctatcaggtagtagcttgactccagtaaatatgtaagttcaggtgtaagtcttccagggcaaggagattttataggataccctagatcatcacgtcagtgtgaacattgatttagtgttcaatataggtattaatcaaatttgaagaatgaaagtttttattttgttgttattattattgttattttttgaaatggagtctcgctctcactgaggctggagtgcagtggcgtgatctcggctcactgcagactccacctcctgggttcacagcattctcctgcctcagcctcctgagtagctgtgactacaggcgcccgccaccacgaccggctaatttttttgtatttttggtagagacagggtttcactgtgttagccaggatggtctcgatctcctgaccttgtgatctgcctgcctcggcctcccaaagtgctgggattacaggcttgagccaccgcgcctggctgaatgagagtttttaaaatgatctgaaaccattcatcatactaacatactgattgtgaaaagaccttgtggtaaacacaaagaagttgcataaactcttaaaaagaatggattgattattccttaagactttggttttactaattacgatgtattctagaatggtgccttcaaagttttcttttaatttatcttatttttgcagttctgctaatcacataattgtaatagtaatgaattgggcaagacagtaatttttctcctttagttttcattgtatcatagagcctatcttcctctaggttctagatcaaagagagggtttcaggtttagacctacttcagttaaactgcttaggccagatttgaataaaagtattaaaacaggtgagatgtttttgcattaaaaaaaataccattcaaaaatttgagtgacactttgaaaaaaagttgcctattcccaaagactatggaagcaaaagcataattatgctatagattatattttagggacaattatttgccatataactcttctgaagcatggaaacaagacttggttagttgtatttcctctgttagaggtgtgtaaggagtctagatttggttcatagtcatgaaaaatattttattcatgtgatagctttttggacgattgtattctgcactgtattacaatggcacaataaattgctgaatatactgtctgctgaatatgactttaccatgaaaaatttgatgcatggagaaggaaaggttggaatatatcaaccttttctgacaagggactttgaattttgacctaatacagatgacctttgtgcgcaataaaaatgagcttaatcttgaggttaaggttgaggtgaatggcaggacagtgtggtggagcttacactgactggaggtgtattggtgcctatgtggctattggctaaatgggagtccggcacttaaaattttttttttttagcatttcaagaagcttatttatagcaagttgtttggctctttaataccaccccatttcctcaaagctcagctttctgtttagttgtggtaagttcatctgtttttatgaagtttactgtttctgagtaaaaggtatgactgtgcttttatttattttctgttccatagataagctatagagaaaaaaatgttcttatggcttatggaaaagacaactgacatatgtaaccttggaactgaaaataaatgttcttttaagaag

SEQ ID NO: 13565 - DNA, 2300 bp, Homo sapien
aaaaattattgtttttccatgtgagtaaatgtgctgtttgtttttctgatagtttagtaatatttacattgcttactctcagtaaattacatcatgatgtgagaaagaaagcacacattcagtaaataagataggtgctaaaccttcttagtgccttatgaaaatgttatgtttgtgtaagtagaataaagtaagttggtcatttactagtaagacatcacagaaagcacagttagcaaagagtatatacatcatcattgtgctttctctttttttttgttatctactgtattttttcctatgcagccatgcccacctacacctttcccaccacagcttatactcaccaaggaaaaaatgtgagaaaccagccacctcaactttccaaagtgtgactccaggacacagctattagacaaaagcataaactatgaagcaaggaaaggtaatgatgcaggaagcttcaaatgctgtgggtttcatttctgtaccatcagagacctcagtttcatgattcaacattttagatgtaaataatttacaacaataaaaatgagagcacatttatgtggaatagaagtaaataatttagttctaaagtgtgggatgcccctagtaatgagagaccattgagagttattcatcaaatgtcttcaatggactctgaaaatttgtgaaattttgtgatttaaaaatgtgttcctttattttgtttctctttagaaatttaaaaagcacagccatgtgccttggaaggcaagggacaactggaggaaaaggcaataatgatgacttagggcatgttttgctggaacataaatggccacatctcttgaattctaagatttaaaccatattcacctgtatgtattggtaaaatgcaagataattctctaggaattttttttttaataaataacgaagttttatttaagttgaactcgtgcagtgcatgatcagaatcagcttctctggtaagccaaggagtgacgtgaccaggttgacgttatcagtgaaaaggacaatgaaggtaatgattcacataattattaccaaatgcaaatgcttttgagtcagttgaaatactagactaggataacactccttttcagactttgggcaatctcatctgtttggaaaatacacagcacttccatgttctgctcctgatttcattatttaccagccacgggaccttcagcaaattccccagcctccctgaactttactttccttaattgtaaaaatgtgactaaaaggctgggtgcagtggctcacacctgtaatttcagcactttgggaggctgagatgggcagatcacttgaagttaggagtttgagaccagcgtggcctacatggtaaaactccatctgtactaaaaacacaaaaattagctgggcgtggtcacaggcacctgtaattccagctactctggaggctgaggctgaagaattgcttgaacccaggagacagaggttgcagtgagctgagattgtgccactgcactccagcctgggcaagaccaagagtccatctcaaaaaaaaaaagaggcgggggactaataatagtatctacttgtgtggctattataagatggtatctcaaagtatttagtacaaagtcttcatacattatatttaagaaatattagctattatcaattattccataattttaatactttttgagaagctatatggaggtcataaacatagacttgacagggatcttgttgttatcttatttgccactcattaactgtatgccctgtgcaggttccttctaggcctcggttttctcatctataaaataaggattgtaattatgaggataaaataacatcctaaaggcacttaacacagtgcctaccacatagtaagcactgaaaaaatatatattcatatgtatatctatttagatacatgtacatgcatacgcatacacacacgagaaaaagactcttgaaacagcctctgtacccacaccctaatccacaactctttactaagatgtctttcctgcagattacatatattcttaacaagttacttgtttggcttgccagtggcaaaagttcaacaacagtcgactggaagtgaaacaaagaagtttctaaatgttggcctgatgacaaatgtgaattcacagaagatttacagaattctctaagattaggaattcttctagggcaaagactgcctagtattctttactgtacctattaagtgcttaataaatgtatgctaaattgagttgagggattttaatttaaaaatttttttagaattttttttaaga

SEQ ID NO: 13566 - DNA, 2300 bp, Homo sapien
ctgtttttagagtaacaggaacatgaaattgagggtgggaggtgggggatttgggctctgttctcccctttctgaagagattgtcatggtgagagactttcttacttactccccttattgaatgtgcttgtgcatgcttctccctggcactgagaaaaggaccataaatgcatatgctgctggaagatgaaatgctttctggatgtttgttttcttatcggctgaatttgagattcagctccctggaactttgaagaaaggttgttgtgaccacttacgatggtgtgctccctgctcctggccctccctcaccactgctcttggtagttagctcatgtccacgggtcatctgcttttgggtcactaatgatttattggaactattttggttgtaagtggcagaaatccaatcaaactagattatatacacaaaaaaggagaatttattggcttaaatatacactggggaagtccagaggagagatttgcttctgctgtgtctcttaataggatccagaaggcaaaacaatatcattaatatcttttgtcctttttgggttctgctcttttctgtgttggctttattcttagctcacaaggtcacaaagatgattgctggtgattgccagtttgtttaatccttagagtttataatcccagagcaaagtcagtgattctcttttgccacataacaaatctcagaaagggccaggtgcagtggctcatacctgtaatcccagcactttgggaggctgaggtgggaggattgcttgagcccaggagtttgagaccagactgggcaacatagcaagactccccgccactcccccaacgtccactctacaaaaaataaaaaacagccaggtgtggtggtgcacgcctgttgtcccagctactggggaggctgagatgggagaattgcttgagcctgggagatcaaggctgcagtgagccatgatggcacctctgcactccagcctgggcaatagagtgagaccctgtctcaaatatatatatatatcagatatatatatatcagaaagggatatatatatctgatagatctatcagatatatacatatatcagatagatctatcagatatatacatatatcagatagatctatcagatatatacatatatcagatagatctatcatatatatatatatcagatatatatatatatgatatacatatatatcagatatatatatatcagaaagggatctgatcagctagtctgtgtccagccctatggcggggtgatttggggtcacattactgcccactcatgagaatcacattgtgagagtagggtagcaatgccggacaggataacatacaggacagcagaataaaaaatctccctctccctgcagaaaattaactacaggctagggttttgctcaccataaccaaaggcattgggggtcaaacacgttactgtgattgctgaattgaatcctttggtcctgtgcatgggtgcactggctcacactcacccatgtgcacatctgtctgtgtaggagatcctttttgtgtctcagaactgctagtatgcctctctccattgagattggttcggcgacacatggagctggcccagcaagaggttctaacatcagtgactacagctaaaaagaaccagggcagacaaaggctaacagtcaatctttcctctgaatcttggaattggaaagggctctagtgactgtccaatccacttgttttgattaaataaattgtcctttggccttgcatcacagctactaccctccctacaacctgtcctgtatctttttattctactatgttgatttgtcccttcatctacaacgaaaaggatttagcatgatctggtataaaatataggagaattttactttctttgctcatattcgtgtcctctgcctttccacagctaccagttgcctacctagcctctccacactgtcccagcttcttcacctccccttttttttctataaggcacttcaattttcactagtattatcccctaaagacataagcaaaggacaaggtcagagcagtcagttgtattccttgttagtggctttgataagaggctttgggggaagaggttgaaactaacggctataatgaagttttgggttctctaaagatttcatttatcggtgctattggtctccccattaaatgcatgcctgttctgtgtacctttgcacacagtttgcataacatataatatttattactgaaaccttgcaaacttcttaaattgtatagaaaaggctgtgaaacttactcttagaga

SEQ ID NO: 13567 - DNA, 2300 bp, Homo sapien
tttttttatttttccaatagcatatattatggaaggagaaatcattctcttcagtgtaagtgttctttcaagtttttttaatgttgtaaagtaaataaataaacaacttctacaagaagcaaaacaacattagttaaatcctctgtaagcaacaaaagaccacttatctaactggaagcttagttaactggaacttagatgggaagcttagttcattgtttgcagaatgttctgaagcccccagatgagagaagccacatttttcgatatctggcatttttgtaacagtgttttcagctgcctaggagagctgactcagaatctgcctccaacatcactggcctgtgttttgtgaggggagcatcagtacttggttcaattgtttagaaattatacaacttgcctgtgacctaaggaggtttatgtttaggagtggtgcgctttcgaaaatcatgtccttttaaaaagccaccccaaaaagtgtcacagtcatcaatcagaggaagaatccaggaacaaactagtgatttccccaaattccttttgctttgcctttttgttttttcaaagatcaaattcgaatagcattttatgctttctttcactgaaaagaatggcctgaagaaggtatttcacaactaagaattaacaatgacccggagaaggtatttcaatcctcttaaagaaagcttttatagtatgacaaacctatgcacctttagggggctcatcttgtgcatggtggatttgagccgtcagtcagatgtggaagtcctggctggttcctgtgctgtgccgccgctgaagctgtatttatggcaaaggcttcagtcactatcaaaagtaacatgggctcactgtctctgagcctctcctccgagcagaggaatgttaaaccagacatctgtctgctaaaacaatcaattaaacatatgcctgctctcaaaggaggatcttgttctgcctgtctcttaagttttggaaaatggcttttcctaaatgagctttagaaaagcaataataagccaagctacacaccttatagtgatttttatgttaacacaggaaacacacatttttaatgctgtatatcgttcaagtagaattttcaatgggtgtagtaatataattataattatataacacataatacaactataatatacgatactagttttattagagctatgctttatgaggtattaggcactaatcttatttaactatcataatagtcctgtgtgatgggcataatttcaattttacaaatgaagaaactgaagcttttagagagtttggttatatctaagtgcacaggcggggattccagactctcgtcaaagcttgtgtcttagccactaggctctactgcctacagttctagaatactatatactggtcattcctggtgatgatcagtagatgttcatgaattactgttggtttaaatattaccttatccttacaggaagagaagatggtaaacataatatctgtggattttttttccagtagaagaaaagtcaatataaaaattgaccaaaggaaaacattgtcttcagtccttccaaattcattcttagtggcgcatccttaggctcatggcaatgtgtagaaaatgactgtcatcaaacgctaaggattttaggatagtaaagtactgacaaaatgaaaactgtttctgtcaaaatgcttagctgatttccaccatgaagagaactgggcaggaccaaaacagtaaggttcagaatgttcattaaaaatataccaggaccctttactttgtaaatagtcaacataacttatgggattggaaattccttggagtaaaatatttaccctatgaaggaaaggacagtggacaggaagttagggggtgtagattctggtcctgcctcctattagctatgtgaccctggacaagtcacctgccctctccagatttcaatgttcgcatctgtaaactgaagcctctggcgccttccaattctcaaattctgagtcgatgaggcggatcctttggagcaagcgccggaggtccctttcccagaatgctctgcgccgtgaagaagcgactcccgggtactgggggcattttgtgttggctggagctggagtaacaagatggcgtcgtcggcggagtgacaggggtccctctgggccggagccgacggcagtggtggcagcggtaccgctccccagctcactgcgccccttttccagcccggacgtcgccgcgaaagcgaggcagcggcggctgcccagaacaggtggcccagcctggtaaccgctagaagccc

SEQ ID NO: 13568 - DNA, 2300 bp, Homo sapien
cccggtaacatgttaaattaatagatgaagttgagctgggctcacaccccaagtccgcttttatttttcaatcagcgaagatttaattggcagccctcaggctgggcgatctgatattttctcattagtttcccatcactaatcttgagtgttagattggctcaaaggttgtcaacatttgaccaattttatttaaggaaaaaaaaaaatcatgcattatggctcctggacgtgagatctgcaaataaatcctgcttggatcagcggaaccaacaggcgaaaaaaatgttgactattcatcgtcgcatttaataagttgcattaatgtatatttcaaggcgagagagagagagattatacatgtggtgcgtagatgccgatgaaaagaaagaggtggatggggaacgggatgcactataagcgggatgggtaggtaaagtgagacgtagaagcatttcgaaccgagggtaaataacccaagtggaatagctgttgaggatttaggaactacaatcccccctccctttccttttgcagctgcgtgaaactgccaagcctgtcttgcaagcacagagtggctctgctgtctagtccagagctaacatcagagcgccccctgctggcaattagagcagaacgctgcgggtcagccccctgcgaagcgaatcttgtttttctgcgcaccccacctttcactgactccttccaccgcccccacgtccattctccagcaaaaccccgcggcaggggaataccttgtcaaggactgaacatttaaatgaataaatgataataataataataataaaatgcgaaggaacccccccaccttcgcttggcctctggggaataaactatcaaaagccttggcagaggacacctttcctttttctacatctctgtattctctgcgttttcgctacagtttgtttttcctgcagaactgcagattccgagtccaaggaaatgtttttaatagatgctgtagacgttttaaaaatggatatctgatggggaaagaggccaatacaaagcaatattttgcatcctcacaaaattaaactcccaggaaactcgcactgtttagaaaagtcttgagggatagctttcggaattcagacggttccttgtccagaatgaccctttcctgcaacgcaaagcaataccagaccctgtccgaatctttttttttaagcagaaaaagtgtttaaaagttgtcaccatagctacacacacacacacacacacacacacacacacacacacacacacgtcttttccatgggtgtgtctattctttttggggtcgtacttctcaattttgctggaaacggaaaaggtagctgaagtgcaccaaaataaccgatgtctttgacatttgatcttactatagtgtttcacgtccaatgcaaggtgtgagactgctactatttgagagaattttggttctttttcaacggttcggtgcatagaggcattttcttggtttcccagttaatctgccgcgggatttatgagcaccatgtaacgcgagggcgcacaggtaacgagagccggaacaatctcaggctggcagccgcaccgcctgcaccgccaacctccactcttgggaaaggcgctggcaatgcagccctgactcggataagtcttccaaccgcaaccagacccccacataacgagtgtcaatctacaccgcggaacgacttttgtttctgagggagtttttggttttgctttccaaagtaccggattttgggattttgttaaaacagtgctcagaaatgaggcgcgggggaaggaacacgggcagggaggacagcaagggaaaggtgtgtctctggactttaatttcttgccagagtagcaggactttctggtttaaaaatccattctcctctttcgcttcttcccagaagccctgtgtcaccccttctccaacccccattcccatctttggagacactcagggaggggacagggaccccggtgactccctagaaccagcgctcctagggcaaggcagaggtgggagacaacccggtcttcaggccagtgaagtgatgcctcagtctgattgtgtttgaagatttgctggggctattgtgtgacaattgaggtaaagttaaatattgatactccaagctgttatcattttggggggtctgttttgaggaagtccattgggttcaaactgattttaaatataaatcctgctctggggaagcagaatctactgcctgcaacgggggttgactgtttgaaaggtcctcgttaagctcagaagtggaagggaagttatc

SEQ ID NO: 13569 - DNA, 2300 bp, Homo sapien
agcactatggatcaaaaacattgtttgagaacaaaaatccagagaggctaaatggtgcccaagtgaaaaaagcaaaatctctgtgaccctttttaaaaggacctagtgaaaaccttcagaggcttctattcatatttgcttaggagaagtgggtaaagaaaggccattgccataactgctagtgaacatccagtccatgccatggtaactagttgaaaatgttatactggagtggcatttccaagttcagtgcttctataaagacctgctagctcacagaatgcttttttaatgttctgcattgttgtgtgtcccccattgaacaaccttttgagcggacctcgtttttactaatgtaaacattctgactagtatccaaagaaatgacctttgagtgaacctctaaccttccccgtaagtatttgtttgaagacagtgtggagttctcctgctgagaactaagaaccatgatgccttgcagctctgtgagtaagggagtgtttgggggaactggagagaaagacataaataagggaacaacctccagatgtaaagaataaaagagtgaaattaaaaagggaaaaaaatagcaattcgttttacccgaagagttagcctataccgaaaaaaaaataaaaataaaaaacgcaaaacacaaaaaccaggattagtagcacataaaagggggtaaaacccctgccgagtgttgtcctctattagaaacttcaaggagaagagccttctctgaccctcctgagcatctctgctggtttcaaggtgagctgataaaaacggttcctggggtggaaatatcaggtcagtcctccttggttgctgtaaaagtggtggggaaagagtagataattaagttctttttctgattggaggagggatgcttctggaagtctttgtgatctagtcagatattcattcctcagcaacatttcaggtgacaggtgggaagaaagatgcagtttcaactctccttttgttttcacctctacatagctgatcactttcttttttgacaactgagctacactttcttaagtaataaagaagtccattgttttgcaaacaaacaccatatgcaaaagactcctttggttttctcccagctattattcctcagcttaattgtattcccaccagagtgctcacaggaggcccgaccgagtggggcctgactgtcctcctccaaagggacttcagcttcctcggaacacagagctgccagcacacactgaatttttctggctaatttcaaagagtgagttttcagttcctgcctgtggccccaggtggactcattaatcatgaagtccccctgtgcttaagatctgaaactggaaatattgacagatgttatcaatgggtatatttttagggagaagctagctggatgctccctgctcctccgaaatgcgtggtcagtgaatcgtgtgcatgagctcaaatgtgtggggaatacacgtcgttaagtgcacagggacaagggtaactcacaaatggtagaaaattgttttgtttttattaaatttggagaaataaaggagatttcttatcatcttactctgtttgtacatgaatatttgatgggcattattaaacattaaagtaacatgaagtaggcacttatttttggatttccaacaaaattagatccaggcttcttagatgaaataactgcttctcctttgcattcctgcgattcagccaccacctgatttgcaaacgtttcttgagctctaatatcaaacatgtgtacctgaggctctgtctttctagtgggttgaaaggtggctgggtttatggttggcagttaccttatcctctgccctgggtgtcccagcttaggctggaaaggctgcccccagctggcactgacctctgaatgacccctaactttacaggcttaaactgcaggagttgccgaagagcagaagtctttctggccagcacttattactgctgtgttggtgataaaacttcagacagcctaattgatggctttgctgacctaacaataccttgtgaaagccgagtgctagagcctggtctccatttatgaccagctgcaaggggaagctgggtctccctatcacggggagtctagggaaagggggaaagtcttccagcctgtgaactttaaccagattcctacttgtgcaagaagcagaagcacaatttgaagttaatagaagctttctcatggagaactttattccgtccctgagctcttctagcaagttgttttggagttgactacgcagtgacgacggagattacccagtcaacta

SEQ ID NO: 13570 - DNA, 2300 bp, Homo sapien
cgccaaactgaggctcttcaataagccaggcagcagccaacctgccaacacctactgacactcactcatctcccagagagagaaagagagcgagagagagcgagcgcgagagagcgagcgcgagtgagagcgagcgagcgagcgagaaagagagagagggagagacaaaatacctaccaggaaagggggggaggaagtccaatttttgcaaactattcatttttttttcttgatttttctcactgctttctttgaacaatactttaaagagagaggatcgtattatagataccgcgggggcaaagctaaaaaaggggggaggggggaggaaaaaattcaagaagcagaaacccctcgcggagttttactggaagaaaaaaacgggtctgaaagattcctcctcttcatcatcatcaaccatcattcattcactaccttgacattccgggctttgattgacagctggagtggcaaaaagccatgaaacacgacagttcggttacatgtgggctgctgacgggccgctcgtaaccttcagttcgggggcttgacaatttttttcttctttttcttctttttcttttctttctttttttttccaactgaggggaagagaagagaaagagggggaaaggaggaccgaagaggaggaggaggggaggggggaggaggaggaggtggaggaggaggaggaagatcaggaggaggaggaagaagaggaaaaaagagaaaaagaagaaatatcacagaaaaaaaaattcttcgttgtctagactgggctttttttcccccctaaaaaatagcatattggagaattgggagaagtctctttggtttggaaaaaaaaaaaaggaatcttcagcctagatcactttcttatccggactgggatattaaatatacgacacatccaggagtttattggagcgcagactgatggcgcaaagggtaggtttaaatctccaacacttacctagatataaatcctctcctaagaggggcctgtcccgatgcctcctctcccttcaacgcttctgctgctgctcgctgcttgatgatggcggccagtattttaaaaaatagcaaaattattcatcggcttctttccctcccgtgcctctgcgtgtgtgcgagtgtgtgtgcgtgcgtgtgtgcgtgtctgggcgcgcgtgttccagcgctgtgcgagcgggcgggcggcgagtgcgtgtgagtggtgtgtgtgtgtgcgtgtgcaatcgttacacgctttcgcctcgctccagcttttaccccagcagcgcgattcccccggttctcctgctgccgctgctgcgccgctgccgccgtggctcgcgcggctcggggcgggcacgggctgcgtaggagccgccgccggggccgccgctggggccgcgctgccgcagccgctgcgccgccgcctagactactagcctgggctgcttgttttgtctctgaaattgacaaggacgcagggaatccgctgctaaataatgtttctggtaactttcacgttattcgcccccccaccctccgctccctgcccccggggaggcactggccctagtctttcctagtcctcggcgttctcgtgctgattattagcgtttttcttctctttattttgtttcatttcgccttttgatttattggatcctcagaggaggcgaaggggggttaggggtgggatccggggcttcctcctcacactaactccacttctccctccgttggctcgctacggttctgttgcctccggcgggagcggggcctcccggcgccccctcaaatccccggcctcgccgcctcctcttccttctctaaacgttgctcttggttcatgctttttcatttttaaatttaataacattttttcctcacaacttttaactccgttgttttggctggtttggtttctgtgtgctcaacttgtgctcggtacttttctcctttctgactttgtttttatttttattttctctctctctctctctctctctctctctctctctctctctctctccccctctcctccttttcctcctcctcctctcttctctcttacctccctccctctctctcatctttatcccttcctctcttttctgttcgccctcttctccctgctctttttccctttccacccccctcctctgttctccctcacctcctgcgccccctcccccttcccgggttctgacagtacgatgagctgccccattacggcgggatggacggagtaggggttcccgcttccatgtacggagaccctcacgcgccgcggccgatccccccggttc

SEQ ID NO: 13571 - DNA, 2300 bp, Homo sapien
gaaatcgcccctgtgtaattaacacagccattagcaggcgttaccgcggcccgccgctgcgcctcgggcgaccacaacaaagctgggctgtgagcgccggccactcctcctcgcccggcaacttctttctcccccactctctccgtcttttcctcctgtgcttcccagctctgagtgagatccactttggagacgcacactagtcgcgcgcgcgcacgggcgcgcgggcgcgcgcgcgcacacacacacacacacacacacacacacacacacacacacgcctttggctacatcggacccagatgactgcctcctcacttcctccctcccgattccgccgcggcccccaaagactctcggggtggccccttgtccgcaccgcttggagggagtgtgctctgagttaagctggtctcttctggtcctggaaaaaaatgagtattgacaaggttgctggatctgcgcagaaaagaaagtgccacttaataaaaaatttagcccggcagtggtaccgtctgcagagcttgctgcccttggacgttagcaggaagccttcggggtgctgtaatcggcgggcagaggagagggaggccgcggaattaaaaggaacaaaagctagagcgccatgccaaacgtccccggcaagacccagttaggcaggagccgggagtgatgggaaaatgaactagaagtaagtttttttttttttttaaatgaaaagatctgaggcggtaccgtactttccctgtggttttctgcagttttcctctctgcgctctccctgtcctcttctctctccccctctccctctctccctgttcgcgcgcgcgcgcgcgcaacacacacgcgcgcacgcacacacatacacacacactcacacacacagacacactctccttttcctcccccccgccgtcccccatccccgtggaggagcaggcttgctgatttgctcgggtccgcccggctcgagcctcccctccccctcccgcccccccgcctcccccacccccccagccggggctgtccgatcgcactcgttgcatatcagaggctcggcgcggcgcgctcctcctcgctcccgctccccactcccgggatgtgtctccgccgtacgacgggctatggccaccacgacttccgggttccgtcatttcgttctcccgccgccgacccgcgccgccaaactgaggctcttcaataagccaggcagcagccaacctgccaacacctactgacactcactcatctcccagagagagaaagagagcgagagagagcgagcgcgagagagcgagcgcgagtgagagcgagcgagcgagcgagaaagagagagagggagagacaaaatacctaccaggaaagggggggaggaagtccaatttttgcaaactattcatttttttttcttgatttttctcactgctttctttgaacaatactttaaagagagaggatcgtattatagataccgcgggggcaaagctaaaaaaggggggaggggggaggaaaaaattcaagaagcagaaacccctcgcggagttttactggaagaaaaaaacgggtctgaaagattcctcctcttcatcatcatcaaccatcattcattcactaccttgacattccgggctttgattgacagctggagtggcaaaaagccatgaaacacgacagttcggttacatgtgggctgctgacgggccgctcgtaaccttcagttcgggggcttgacaatttttttcttctttttcttctttttcttttctttctttttttttccaactgaggggaagagaagagaaagagggggaaaggaggaccgaagaggaggaggaggggaggggggaggaggaggaggtggaggaggaggaggaagatcaggaggaggaggaagaagaggaaaaaagagaaaaagaagaaatatcacagaaaaaaaaattcttcgttgtctagactgggctttttttcccccctaaaaaatagcatattggagaattgggagaagtctctttggtttggaaaaaaaaaaaaggaatcttcagcctagatcactttcttatccggactgggatattaaatatacgacacatccaggagtttattggagcgcagactgatggcgcaaagggtaggtttaaatctccaacacttacctagatataaatcctctcctaagaggggcctgtcccgatgcctcctctcccttcaacgcttctgctgctgctcgctgcttgatgatggcggccagtattttaaaaaatagcaaaattattcatcggcttctttccctcccgtgcctc

SEQ ID NO: 13572 - DNA, 2300 bp, Homo sapien
cggctctagcaggcttgaagcccggcaaaaaagagtggctgaaaacctgggctacactctcctccctgaagctccgtgagtctggccgtccctgctcgggccattgggcagaaacctcgcggcccgcagcccctctccctggcgtcgcgctatccgcgcctctgccagccccttcgcactatctttctttatatgtgagggccgatttcccgcagacatcattgttatgatggctcatttaatcaaactgtttaattgctctggtaatcactatcatcatcacaggtgctcaatcattcatcatttttggagggctttattgacctccggagttcattcctcagccctattaaaacgaggccaaatttctccgactccgcttggagtctctgcaggctgcaatcttagcctagtttctgttgctcgaaagcttacagtgaagcagggaacatggaacgggggccaaaaaaaagagccctcccacccgccctcctccccgctctctctcgctctctctctctctctctcacacacaacacacacacagagtactttattctctctaatcaacctcccccatcccaccctccctccgcgggaaagtcggttagacgcggctcgcggaagacactactctccacttctcagaatgggttcaaagttggggagggatgcggctgttggagaacaacagtccgctttccactctctgggccagggactgggagggcgagagcgagaagttggggagaggacgcgcttccagcgcctgtccgcccggccgcgccacaaggggccgaggggcatgggggctgctgggcggcaaggcttgcgcggggtgaccgtggctccgcccccaactccgggctcgtagtgattgacgcgcggccgccgggaaaccagccgcgcagaggtgaagcctggtgcagctcgggccagggaggacagggcaccggccacaactagtttccacccaaacggtgtggggtagttcccttcgtttccttttcctttttggaaaagttctttcggagctggccccatctccctgaccccgcgaaatcgcccctgtgtaattaacacagccattagcaggcgttaccgcggcccgccgctgcgcctcgggcgaccacaacaaagctgggctgtgagcgccggccactcctcctcgcccggcaacttctttctcccccactctctccgtcttttcctcctgtgcttcccagctctgagtgagatccactttggagacgcacactagtcgcgcgcgcgcacgggcgcgcgggcgcgcgcgcgcacacacacacacacacacacacacacacacacacacacacgcctttggctacatcggacccagatgactgcctcctcacttcctccctcccgattccgccgcggcccccaaagactctcggggtggccccttgtccgcaccgcttggagggagtgtgctctgagttaagctggtctcttctggtcctggaaaaaaatgagtattgacaaggttgctggatctgcgcagaaaagaaagtgccacttaataaaaaatttagcccggcagtggtaccgtctgcagagcttgctgcccttggacgttagcaggaagccttcggggtgctgtaatcggcgggcagaggagagggaggccgcggaattaaaaggaacaaaagctagagcgccatgccaaacgtccccggcaagacccagttaggcaggagccgggagtgatgggaaaatgaactagaagtaagtttttttttttttttaaatgaaaagatctgaggcggtaccgtactttccctgtggttttctgcagttttcctctctgcgctctccctgtcctcttctctctccccctctccctctctccctgttcgcgcgcgcgcgcgcgcaacacacacgcgcgcacgcacacacatacacacacactcacacacacagacacactctccttttcctcccccccgccgtcccccatccccgtggaggagcaggcttgctgatttgctcgggtccgcccggctcgagcctcccctccccctcccgcccccccgcctcccccacccccccagccggggctgtccgatcgcactcgttgcatatcagaggctcggcgcggcgcgctcctcctcgctcccgctccccactcccgggatgtgtctccgccgtacgacgggctatggccaccacgacttccgggttccgtcatttcgttctcccgccgccgacccgcgccgccaaactgaggctcttcaataagccaggcagcagccaacctgccaacacctactgacact

SEQ ID NO: 13573 - DNA, 2300 bp, Homo sapien
aaaaagaagataaagaaagaaaagaaaatatagaaatcatcaatctgtctgagttgtttttactcacactgcaagggaaggaatatttttctaaaaatgcgacttaagtttttctaaatgaaagctatagagatgctaactcactttacagtatcactataaaaacagaaaaagaaacagaaggtagcaatgttgaatgtttaaaccctgcaaggcagaggttccgcatgaagttgatctttacaaaaaaaggtttatcaaggacactgaggaatttcttttaaaaagaaacgtaactggcacttattgaacaagacatttaaaacaacaataatcctattggcgacgataaacttaaattcttaaattgaatttaagaataattagaagagtaaaaactgagtacaaatttctcagccagcggcgctgcaccgggaacttggacccaccaacatcaacagctttgcaaagtcgaaaacgctccgcagcgtttttgtttttttcccctccccaccccgccgcactctcaaacctcccggtcccggctaaactgaattcgcgtaactgtcgattgaaataaaattctggagaccaactttttcttttctctttcatcttcttttcttttttactcaccttctcttaaatgtcgacgagcaactcagcaacaaataaggatacttttaatcttggagttcttctaggaaaaaaaagaggacgtggaggaagtaccctccccccaaccttcagatttcctacccgtcggctctagcaggcttgaagcccggcaaaaaagagtggctgaaaacctgggctacactctcctccctgaagctccgtgagtctggccgtccctgctcgggccattgggcagaaacctcgcggcccgcagcccctctccctggcgtcgcgctatccgcgcctctgccagccccttcgcactatctttctttatatgtgagggccgatttcccgcagacatcattgttatgatggctcatttaatcaaactgtttaattgctctggtaatcactatcatcatcacaggtgctcaatcattcatcatttttggagggctttattgacctccggagttcattcctcagccctattaaaacgaggccaaatttctccgactccgcttggagtctctgcaggctgcaatcttagcctagtttctgttgctcgaaagcttacagtgaagcagggaacatggaacgggggccaaaaaaaagagccctcccacccgccctcctccccgctctctctcgctctctctctctctctctcacacacaacacacacacagagtactttattctctctaatcaacctcccccatcccaccctccctccgcgggaaagtcggttagacgcggctcgcggaagacactactctccacttctcagaatgggttcaaagttggggagggatgcggctgttggagaacaacagtccgctttccactctctgggccagggactgggagggcgagagcgagaagttggggagaggacgcgcttccagcgcctgtccgcccggccgcgccacaaggggccgaggggcatgggggctgctgggcggcaaggcttgcgcggggtgaccgtggctccgcccccaactccgggctcgtagtgattgacgcgcggccgccgggaaaccagccgcgcagaggtgaagcctggtgcagctcgggccagggaggacagggcaccggccacaactagtttccacccaaacggtgtggggtagttcccttcgtttccttttcctttttggaaaagttctttcggagctggccccatctccctgaccccgcgaaatcgcccctgtgtaattaacacagccattagcaggcgttaccgcggcccgccgctgcgcctcgggcgaccacaacaaagctgggctgtgagcgccggccactcctcctcgcccggcaacttctttctcccccactctctccgtcttttcctcctgtgcttcccagctctgagtgagatccactttggagacgcacactagtcgcgcgcgcgcacgggcgcgcgggcgcgcgcgcgcacacacacacacacacacacacacacacacacacacacacgcctttggctacatcggacccagatgactgcctcctcacttcctccctcccgattccgccgcggcccccaaagactctcggggtggccccttgtccgcaccgcttggagggagtgtgctctgagttaagctggtctcttctggtcctggaaaaaaatgagtattgacaaggttgctggatctgcgcagaaaagaaagtgc

SEQ ID NO: 13574 - DNA, 2300 bp, Homo sapien
tggggttctgctgctcataccagcttgccttcggtagcctctcaaggagaaaagctccccaggaaggagatcgagctttatttttatcccagttaaagtccctgtccaatccattaacagcttcgataaccttggtccagggcatttcctgcagaagctataaccagctggggttaatgaactctccctaccattaattcctgggagaggccattggcctgaattgttacttaattactcttctgtgtacagcttcataaagcaatgaaatgccttctttcaggaagaagggagatggtaatgggggtcatcagaggccattaattttacaaatagtttattggaaactacagtatgttaagaagtcactctggctcacaaatcaactcaatgtggtccttactaagtagagatccaaaacttcccaagtttccgtgacttgcatacacaaaaagttacaatggtacagaatcttatcaaaggtatatagcttcaggtatgcagaactatattctttagattctgcaactgatcataccttcccctccagctcttgttcctaaagttggcagaaaagactcaataaagccagtttgagacatcataaaattttccaatttaaaattctctttcaggtaatttctcagtcttttaaggagattctccctctccagagtgctgctctttcctaagatggtggcaggtacaaggaagagctaggtacccaggaagcatcacaggaaaagctttgggttttcatgccttcccttcatgctcctagatctgctggactctgtgtccatctcagcacaactggagggcttctcttgtccaccaagcttcttaccacatctacaccccacttaacgggtctgagaatgctcagtcgcttcttctgcgccaccctaattatacttgcaacaacctcctcactcttacctccttcacctgtttatgtttcctcatggcagtgttaccaagcaaaagagtgtcactgcccaatgtgctggaagccaatactatgacacaaggtttgtgagaaaaaaaaggctttttactgtaggtctactaacaaggacacaggaatccaactcaaatctgtctctctgtgctggctctcaggcagtacttttattagaaaaggtttagggagtggattctggaattagcaaatgactggtagaagaaaaggggaggtctggaaagtcctcaggcatgcacgattatctcttcatgcctccttatgggtcccatgtgcaaattcaggggaaattagtataaaacatgcagtggaaattcaagctgtgacatcagtaagcttgttctgcacagactccagttggccttattggttccaaccaatttcagctaggttttttgttttgaaatctctcaaatagagggagtttcagcatttcagcaagttgtttattttcttatctgctattctgcaagctcaagaatttgttagtcactggtttctttaactctttggggtaaaatttcagcagtctcctcttttatcatatcaagtaaaaataattttatttattttattgattgtgttaccagtcccccctacacacacgcgcgcgcgcgcacacacacacacacacacacacacacacacacatcttagaatataaacttcatgaggtcaagggcttttggctgctttgttcattctttccctccagtgcttagaacagagcctagaagatacacatcgtgttcattcagtgtttcactgtttgttgaatgaatgagtagttagttggctacatgatgaaattagactgctggccaaaagacctagactttccattttagtcacactgaggcaggaagagagctttatctgccagagaaataaaagatagaggttgccccttcaaacagcccagaaatcaaatccattgaacctactgctatccagggaagacttggccatgaaatccacacacttatctaggctctggactctacacaaatgatgagaaaccattgccacccaccccactatgacatgttgccccgcccatcctatgtcatgacctctcagaatgttctgagattctattggatagttccagtggagaaagattagactcctcagaagctaattgactagggaaggatcaggaagacaagacacatcaaaaaggggaggtagagtttgtagaagaaataaaggggaaaaaaagaaactaaggggaagggagagacaaatgatttacatatacttggttttctgagccctctttaatactaaagatcttaatatctggaaattctggcat

SEQ ID NO: 13575 - DNA, 2300 bp, Homo sapien
ttcaggtaatttctcagtcttttaaggagattctccctctccagagtgctgctctttcctaagatggtggcaggtacaaggaagagctaggtacccaggaagcatcacaggaaaagctttgggttttcatgccttcccttcatgctcctagatctgctggactctgtgtccatctcagcacaactggagggcttctcttgtccaccaagcttcttaccacatctacaccccacttaacgggtctgagaatgctcagtcgcttcttctgcgccaccctaattatacttgcaacaacctcctcactcttacctccttcacctgtttatgtttcctcatggcagtgttaccaagcaaaagagtgtcactgcccaatgtgctggaagccaatactatgacacaaggtttgtgagaaaaaaaaggctttttactgtaggtctactaacaaggacacaggaatccaactcaaatctgtctctctgtgctggctctcaggcagtacttttattagaaaaggtttagggagtggattctggaattagcaaatgactggtagaagaaaaggggaggtctggaaagtcctcaggcatgcacgattatctcttcatgcctccttatgggtcccatgtgcaaattcaggggaaattagtataaaacatgcagtggaaattcaagctgtgacatcagtaagcttgttctgcacagactccagttggccttattggttccaaccaatttcagctaggttttttgttttgaaatctctcaaatagagggagtttcagcatttcagcaagttgtttattttcttatctgctattctgcaagctcaagaatttgttagtcactggtttctttaactctttggggtaaaatttcagcagtctcctcttttatcatatcaagtaaaaataattttatttattttattgattgtgttaccagtcccccctacacacacgcgcgcgcgcgcacacacacacacacacacacacacacacacacatcttagaatataaacttcatgaggtcaagggcttttggctgctttgttcattctttccctccagtgcttagaacagagcctagaagatacacatcgtgttcattcagtgtttcactgtttgttgaatgaatgagtagttagttggctacatgatgaaattagactgctggccaaaagacctagactttccattttagtcacactgaggcaggaagagagctttatctgccagagaaataaaagatagaggttgccccttcaaacagcccagaaatcaaatccattgaacctactgctatccagggaagacttggccatgaaatccacacacttatctaggctctggactctacacaaatgatgagaaaccattgccacccaccccactatgacatgttgccccgcccatcctatgtcatgacctctcagaatgttctgagattctattggatagttccagtggagaaagattagactcctcagaagctaattgactagggaaggatcaggaagacaagacacatcaaaaaggggaggtagagtttgtagaagaaataaaggggaaaaaaagaaactaaggggaagggagagacaaatgatttacatatacttggttttctgagccctctttaatactaaagatcttaatatctggaaattctggcataagcaaagatagagagcaaagattacttttcagggatattgtaaacctacatccatgcccatggggctttatggaaagcaactggcctagagcaaaaagagacttattgattatctctatttctttatattgtcttgtataaacttccacagggttttatgttgataaaccatctctgactatatctattaataggacgtatattccagcattatctctgtatcctgactgtatctttaatagggtataatcagaacacgggcagaagaatcaaaaggctgagttttgtcatggttaaaatgtggggattagagggagaaaatgagttaacttaatttgatttctactttttgggactcttccctagttactgtattcataaatgaacccatttctccaattcattagatacatctctgttggcattttagggaatctacaatggaaggacacaagaaagatcagctggattaagtagtcatgattatgcaaagccatatccagagaccaaggtgtaaagcaggttcgctattgaccccttgcctcatcttccagcctccttctccccttctactcctgttatgcaaccacctccgcaccctaccccaagcatgccataccttcctgaag

SEQ ID NO: 13576 - DNA, 2300 bp, Homo sapien
tcagatataatatattaacacatatgttatatgatctatgtttataattatataaatatctataatatataaatatatataaatatataatatataaatatattgagttatattatataacagacatatataatagatattatatttcatatatatatgtgtgtgtatatatatatttatatatgattcatggagacaaaggcaaaggatgcctgtcagtcatcatactgcagaaactgaatcatccccttggacatgttttattttttctattcatagtcctctctcttcccatctctttaatcaatctacctttcccctcctcatcgtagcctaaaataaattgctgcctagaaccattcagctctctctcttaacttttattttctacccagtaaaactaaagtttgggagctatccgtacagtaagctgagttcattcttccatatacatgcaagtgtgtcagcagacccagaaagagcatgtcatgtgcttgccatgacactcacctttcccccttatacaaacatgataatgttccatttatgggcacttacgatgtgctaggcacttcactttagtgcttcatgtgcatcattgttttacacaatcttctaaggtagatatcattatgcgcagtttcagttcacaaataagccagattcactgagtaaacagcacaacctaggttctgagttgaaaaaaaacaggatatatgcctgtatctggccccaaagcttggcctgtctgtaaaatctctattgcttctgacaacaggcattgagcagatggctggccagggagatgttggggcacagcccaaggtaggggaaagttcacctacctgtgaagggagaaaccccaaccttgactacatttatagaagaactaggcaccagagggactctcaaatcacagactcatagaattggcaagaaatttagagattatttctcaggtaccatgaggtactttcccaagatcacacaattaactagtgacagagctagaataagatcccagtcttgtgagtccttttttttctttttactgtttttttttttgttttttttttgagatggagtttcgctcttgttgcccaggctggagtgcaatggcatgatctcggctcactgcaacctccgcttcccagattcaagtgattctcctgcctcagcctcccaagtagctggaattacaggtggctgccaccacactcagctaatttttgtatttttagtagagacgtagagacggggtttcaccatgttggtcaggctggtctcgaactcctgacctcaggtgatccacccacctcggtctcccaaagtgctgagattgtcaactacacttatgtcttctgaggtcatgagaggatacatgttgctcatctaactcttctaagtcttacgtattctaagtgttgcttctggggaaataaagcttcatattcctctccatgcttctgtaaaaagtaaggggggcagggtagagaagaaagggtaacacttgaaatacatgaagctttttttagcaaagcacattaataaatcttaagctgtgcaaagtgtgaatgagggaggaggtggtaagtgctagagctaaaatgctcttcataataatataaggatttttttttatcacaactgggagacagagaagcagtaggagagaaagctgaacaatgtcatgagactctgaaatctaagttggtggaaatggagaagggactttcagaggaccagaaaagctaatattcaatgttagaatattttctaaacagcgctgcaacatgagtacatgattacctcaatatccagtaaaatctgccacacatagttgtagatatttgcttgtgcaagttgcttcttgttgactggttgttatggtttgaatgcatgtgtactttcaaacttcaaatattgaaacctatcaccaaggcaatggagttacaaggcagggcctttgggaggtgattaatgtccttaaaaaagaggctgcagagaacatttgtctttttttttttttttttttttttttttttgcctttccactcttccaccttgtgaggacacagcaacaagctgccctcttggaagcagaaagcagctctcaccagacatcaaatctgccagcacattgatcttggacttcccacccttcagaactgtgagacatttctgttgtttataactcaccctgtctatggtattttgttatagcaggagaaatggactaaactactcttacaagtgaattttggaagaaagaaagagtcatgtctgaactttaggtcaat

SEQ ID NO: 13577 - DNA, 2300 bp, Homo sapien
tttcctggcttccaagtctagacctctgtgtccagtgtgtccccacgtgtttgtgcctcaagtatcagtgaagcctagcgtgaaagagatcaggcccaggagtcacattgtgtgacttggccatttaacatctgtgtgaccttgataaagttaaaattaacccctctcagctttggtctgttttctgtaaaatgggggtagtaatagcatcttcctcataggctattgtgagcattcaatgagggaatgcgtgtaaagtgcttagtatggtacttggtatatgacaagcactcctctctctctatctgtgtgtatactgattcattttgtacatttagaaataacccatgcaaagtaatcctatctccattttaagattgtgaaggttttttcctgcaggacgaaagaagtcttggagtagcaagtaaccagtttttatttcgttgtattttttagccacaccaaggatgcaatacagtcggccctctgtatccgtcagttctgcatccatggactcaaccaaccgcagataaaaaatattcagaaaataaattccacaaagttccaaaaagcaaaccttgaatttgtcccacgccaagtactacattgaatccaggagaatcaagtgatgtgtaggcattgtttaaggcatcgtaagttaatttagagacgaagtaaagtataagggtggatgtgcataggttatatgcaaatatgttgcattttatatacgggacttcagcacccagggtttgggttatgggtggggatgtgtcctggaaccaatcccaacggatacgggggaatgactgtactttgaagagagagagtagcaatgttcaaaatgcaggaagtgaaagaaacacagagagcattctttggaaagatacttgaaggtttttttctaatcctcagctcaaacctgggttcccacccttttcccaccaactcagagaaaactttttctgacacaaagggagaaaagaaaacatatttttgaacaacacttttttcttggaggctttctttttgaaaattatttttaagtttgtttgaggcaatttttactgggatgaaccagcttcttttggagggcggacaagtctcttcccctcttagatcttatctgcttcttatctgtaaaatgaatgcattagggttgataagtcttcctatatctggtgttctttgattctgccattccctgtttaagccagagcctaggaatctagatctggaggctgtttctgttttagattgtgcactagaaattaagcacacaccgccccaactcccccagctgcctgagacttaagaaaaagtgagactgcagtcctttgatttggcgttagagctctccgtggcattaacctgttgttggtctaacctgtggggccagaagaagtgtgctcgaaatctgtgaacatggttgctgaacaaacgcgttttggtttctttcttttccttttttcctttttcccaggagtgaggagggggaggaaaaaactggtctttgttgtgaagccacggtcccaaacttgaacctagaggaatgttaaagctctgaaaaaaagttagggagcagccttgcaattatgcactcagtcacaacaagagggtaagaactttcaaggcactggattgaagagacacaaaagtcaggaaatgaccctttcgtcgggatttcagaggccgcagaggagaaacaaagtcctctcacaactcgggaaacttcggaccgtaccatcccgagggggcaagggtgggggaggccgggagagggcagtggaaattgacatcttcgttctcaacaagccgtgagtaaactgaggatttcccggctgaaaggactcagtgtctgcctgtccccggcccagaaatgaaagcgagtttcagccgatcctcattgtggggcctgctgaaaaagcagcccgggtcgccccggccagccccggcgtcctgaatcggagccctgtgcgcgccaggccgggccgcgcgcccgggttgcaggatggcgtgcccaggccagcccatctgcggccgcgggccggcggggaggaagcgtccctggggatgaatggggctttgttcgtaggcagccgcggctaccctctgcaggcccggcccgcacaacagaggctgtatgcgagaggaatggaaatgagcctcaggccctgccgaaggagccccatccccttccccgcgcggggctgaggaatgctggccagccggaaaggaaccctcgctgggaacgccgctctcgcgcctctgaaaccccattgagaagaaccctttgatgc

SEQ ID NO: 13578 - DNA, 2300 bp, Homo sapien
tcatttcttagtagaatattttttgaaaatgtctagctttgacttagctaaataagagggcagaaggataagtttctactgaggccaagaaatctatggaaagctgagtgccctgggggacaacccagctgcaaaacaaaaacacagaaaagtgcgctgagctgggagatgaatattctaaagggaggaagtatggggatgattgaaaattgcagattctttctggcctggggtttacttcctggaatttatgaagttctactttgcttatatatttgatttactttactaaagagtggccctttacctgggctgtcttttctttctttttttttttttttgatggagtcttgctctgttgccaggctggagtgcagtgatgtgatctcagctcactgcaacctccaactcccaggctgaagcgattctcctgcttcagcctccggagtagctgggattaccacaggcgcatgccaccacacccagctaatttttgtatttttagtggagacggggtttcaccatgttggccaggatggtctcgatctcctgacctcgtgatctgcccgccttggcctcccaaagtgctgatattacaggcgtgagccactgtgcctggcttacttgggctgtcttatactaccttttatattcctttagaatcattcaagttgcttcaggcacatgtctcattgaaatccaaattgcagattagagtaagaaagtgtatcttcccctttggttctatctctgtgtgtaagcaggaaagaactagattctggggtcaaagagttctgagttgaactttagctctgctacttagtagacaggtgaccttgggcaaactacttaacctctctagctgtccttatctgtaaagtggaagtaagaatagtaacaactacataggtttgttgagatagtaaaatgagataatgcatgtaaagcactagcatagaattggagactaagaagtgttcattatatggtagctactattcttattttttagtctatttttctctctcccacaagtgcctatttaatataggtttgttgagcaaactataatatacgaatgcaacaaggatgtactattagccagggagaaagacataacaaaaggcttcttttcagggatttgactaattttaatattataggttatattttagatccaaatcataaaaggcaacatagaaatatgaaaatagagtgatatccagtacagttgtcatagtggttaggacatcttatttgcatacataattttttattatcttaactaccttagtagaataccatattatttgatatgttttttaaaaaagcaggccatgaaacaaaaataacaatttaaaattgaacaactcagtccaattttaaagcctaaaagagcggttatatttcccttcaccccgcctaccccctaaaccctgaattagcagctttttgcatgaaagaggctatccagcagatacctttctgcctctaagtaacttagttacttttattccacttcagttaaataaatattttttattcatataccttgtactagacacctgggtttcaaaaatgaacaagattgccaacgtgttaagaacatgaaaattgtgcttttgaggaatgtggttgagctcatgggtgctttttataagactagggtgtgtttaatctaatcattccttctgtgtcctagttatagaactcagtgtttatatgtattttccaggttgttggtttactaggttagtgcgtatttattttacatcttgtgaatgacagtcaaaatttatgccccagagtcagaagcttgggtgaaccatttgctaaggcctgaaaactacctttctctctcacacaagcagttgttgtaatcaaattggctccatgcctagagcaggctgtgtgactcagtgacagttgcaatcagagcatggagttggagacaaagaagtcatagatcaggaaatcacagtgacgatggccagttgggattggatggttttatgagtggaattttttttaagaatttttttttctttaaatatcattcatcaaagacacatttaatcctgttagttctgcatgcgatttaaaaaaattgttctggtaatactctgttcaacactacaagtaattctgcatcaagagaaagctccaaatattctaacaaccattcagcatttccaatgatcttagatccacgcttggtaagtgtagggcttatatgcctactctcacttgaattagatccactttatgaagtcactttgattttaacaaccaccccaggc

SEQ ID NO: 13579 - DNA, 2300 bp, Homo sapien
tcctcagagcatctgccactattttgccatgaagtttattactatctctgacaaaacagtagtaagaactaggacttattcttactgtgaattcttaatctgttctaagtaactctgtatattattatctcgttcatcagcacaacagctgtgtaagttaagtactattatccccattttatgcaggcccagagtttcagtaacttggataagaacacagattataactgatggtacttgactgaaacttgagcagcctaactggttaacagtagtcctggaaggggaagaggccagtatcaacactcccatgtataagttcttggcaagaataagttcaaaaaggcaggtttagaggtcatgtctagcacagaccatcatcaacattgcccctctctttctcaagagtaaggacaatgctgctgctgaggcaggaatcaagttacataaagagacctcagaaatcaatgggatggttttttgggtacattgactggtttagcgcctctgttcattcgtcaaacatttattaagcacctgctacgtgcaaaacactgttaacagtgcactactgtgcacgctcattctcagaacaacaatcctgcgattcctggagagggatggtagaagaggagtgctgccttgttaacgaggttctcccaacttctttttttcctcgggaattgttctctttaatgtggcaccagcggcaaccttcattcttaggtcgcacaaatctgagaaggaagagaaaaacattgcacgcagggcgagacttatatctgggaagatgcgtcaggaacttgggagcacttgggattcagtcccctaaggtggttcatgtacaggctggttttctaagtggagaacagataatagaatttgcagagccaggagctctgactcctgtggctgggctgaccttaggctccagcccgcaaccccagtaggtttctgtgcaaaaatcttttgagatgaatgcatactttgtcttctaacaatgcattcgtgacagctgtctatccaatcggtccgcctccgttcagagcagttcgtgccacagaagcatctcctgcgctatagttatgcaacctcactcgcagcgggagttatttcctccgttctggctgcgccagattcatgtaacacgcctaccctgggcttcaatggaagtcgttctccattaacaatcactccagctttccgagatgaatgccctgatagcataccccttgcgcagtaagaatccaggcagcgaggcgaggtgttaaaacacacatacattctcatattctctctctctctctctcacacacacacacacacacacacacacacacatacacttcgtgcatgcagctaggggactgcagcagtgcaaccagggggacagcaggaggagctctctttgcagtccctgcttctaacccccactaactaaagatgaactcatgccagttccattctttgctctgcaaagaaaacacacacacacacacacacacacacacacacacacacacacacacggcagaagagagtagcctccagatttcccctctgagcacactgtctttctagcctcttcgttcaagcaacccggatattccaagcagagtaacggggagtaacgcgccacaacaatgcaacctccctagcagctcccctcgcagctcccacccccgccccctttcgcggcgtgccaagagtttggagcgcgcgcacgcacaccgagcacggtgcagggaggatatccctccgcctccctccccctttctccgctaagtggctcgacaacgatttgggaaatgaagggaggagggaactactttcctgaaacttgctatgctgcacatgacttcgagttgcagtgattcgcccggaggccgcggcttttagtcctacccacacaccctcacagcctgggcaccccgctcggcagccccaccccgcgcccgctctggcctccggggaaagcgggcggccgggagaagtcgcgagggactacttcgcctccttctctcgcgggcgcccccggttcgggcagcggctgcggcggcggaaggagcgggcggcgtgagcgcttccgccgcccccctcgcggctcccctctctcgggcgtgaggagctggcccgctgagctgctggtgggcactggctggcggggaacctgcagccgctcttgtcctctcccgccgcttctcgggatcctgccccccggacccgggcccgcccgctcttctccggccgggtgggaacgatcggtttgcctgcccctcgcctcacacgctccccgccgc

SEQ ID NO: 13580 - DNA, 2300 bp, Homo sapien
ctacgtgcaaaacactgttaacagtgcactactgtgcacgctcattctcagaacaacaatcctgcgattcctggagagggatggtagaagaggagtgctgccttgttaacgaggttctcccaacttctttttttcctcgggaattgttctctttaatgtggcaccagcggcaaccttcattcttaggtcgcacaaatctgagaaggaagagaaaaacattgcacgcagggcgagacttatatctgggaagatgcgtcaggaacttgggagcacttgggattcagtcccctaaggtggttcatgtacaggctggttttctaagtggagaacagataatagaatttgcagagccaggagctctgactcctgtggctgggctgaccttaggctccagcccgcaaccccagtaggtttctgtgcaaaaatcttttgagatgaatgcatactttgtcttctaacaatgcattcgtgacagctgtctatccaatcggtccgcctccgttcagagcagttcgtgccacagaagcatctcctgcgctatagttatgcaacctcactcgcagcgggagttatttcctccgttctggctgcgccagattcatgtaacacgcctaccctgggcttcaatggaagtcgttctccattaacaatcactccagctttccgagatgaatgccctgatagcataccccttgcgcagtaagaatccaggcagcgaggcgaggtgttaaaacacacatacattctcatattctctctctctctctctcacacacacacacacacacacacacacacacatacacttcgtgcatgcagctaggggactgcagcagtgcaaccagggggacagcaggaggagctctctttgcagtccctgcttctaacccccactaactaaagatgaactcatgccagttccattctttgctctgcaaagaaaacacacacacacacacacacacacacacacacacacacacacacacggcagaagagagtagcctccagatttcccctctgagcacactgtctttctagcctcttcgttcaagcaacccggatattccaagcagagtaacggggagtaacgcgccacaacaatgcaacctccctagcagctcccctcgcagctcccacccccgccccctttcgcggcgtgccaagagtttggagcgcgcgcacgcacaccgagcacggtgcagggaggatatccctccgcctccctccccctttctccgctaagtggctcgacaacgatttgggaaatgaagggaggagggaactactttcctgaaacttgctatgctgcacatgacttcgagttgcagtgattcgcccggaggccgcggcttttagtcctacccacacaccctcacagcctgggcaccccgctcggcagccccaccccgcgcccgctctggcctccggggaaagcgggcggccgggagaagtcgcgagggactacttcgcctccttctctcgcgggcgcccccggttcgggcagcggctgcggcggcggaaggagcgggcggcgtgagcgcttccgccgcccccctcgcggctcccctctctcgggcgtgaggagctggcccgctgagctgctggtgggcactggctggcggggaacctgcagccgctcttgtcctctcccgccgcttctcgggatcctgccccccggacccgggcccgcccgctcttctccggccgggtgggaacgatcggtttgcctgcccctcgcctcacacgctccccgccgccccctccacccccctgaggaggagtcccggctggagcgtgtctggaggaatccgccgccgcggggcccctagccctgctctgccggcgcctgaggaccgacccagacgccgccgggggttgaggggcagccggcggcgaggcgggagatggtggggtgggctccggcaggaccgcgccgccgctgcccggagcctgggctcggcacccccccgccggcccccaccgagcggagctctgcttcctcctcgccgcatccctgagggaagcgccgcctctgctcccgggttctccgcccgccgactccttcctggccggaccccgctgcgctccaccccagtggctggaggagcagctctccagtcagcctttgcagcccctctctttttccctttccaccgggcctcctcggatcccttggctgggcactgaggcgggggaagaggctggggtcgccacggcggaggttgctgccgccacccccctgcgggggtggccggggttcccggctgggggggtaccgttctgggtgaggcatccac

SEQ ID NO: 13581 - DNA, 2300 bp, Homo sapien
cctcccaaagtgctgggattacagatgcgagccaccatgctaggccagtcatgcttttttgtttgtttttagttctttttctgtgcataacttttgttattcatttatttagattttttaggaaaaccagcagcagaacacttaagatcaataataataaagaacagttacctcatttctatttgatttttacagagactttttgccaagagtactaagactagtaccttctatgacaccccaactctgacaagaggcagtaaccactaatatacattctcctctcccttatttggagatgaattcagatacattaaactgcaagtaattttacgcttaagccttgtacaacactaaaatatacagtaataatagtcattatacaaatgtatggttgagtttatgatatggttaggatctgtgtctgtgcccaaatctcatgttaaattataatccccaatgttggaggagggacctggtgggaggtgattggatcatgagggcagagttctcttgaatggtttgacaccattcctgccttggcactgtatagtgagtgagtttatcatgagatctggttttttaaaagtgtgtggcagatcacgaggtcaggagttcgagaccagcctgaccaacctggtgaaaccccgtctctactaaaaatacaaaaattagccgggtgtggtggtgggcgcctgtaatcccagctactcgggaggctgaggcaggagaatcgcgtgaacccgggaggcggagtttgcagtgagctgagatcatgccactgcactctagcctgggcgacagtgcgagactgaaaaaaaaaaaaaaagtgtgtggcacctccctgcctccctgcaccctctctcttcctcttactccggccacgtgatagctgcactcccccttccccttctgccacaactgtccatttcctgaggcctccccaggagtggagcagatgccagcatcatgcttcgtgtacagcctgtggaaccatgagccaattaaaccccttttctttataaattacccagtctcaggtatatctttatagcaatatgagagtggactactacagcttacctttgagtgttttacacatttatgggtatgctttttgtttgtaaccataattaggaaggcgagagcattactggtctttattggactggggctacgaatgctatgtagtctgcaatggaagggacaggtccatacaagggatcaatagttatacttcatgcaggatttccaacagttctgctagagtattcatgtaggtgacatgcctgctaataatgatctaaccttatactcttagtaccttttacatatgaaccctaaaatacattttttaaatcctttagataagagattgaattcttcatggatagtacacagagggtatattatgttttgtttgtttggaactttacagagaattcgccacaattttggaaaaccacatcaactaccttactttgctggcggtatgtttgttgcttatacaactaatgctttgtcagcaatgaagcacatcatctgaatatgcagttgaggggattctacatagatagatgcaagcatctgatcacttcattggtcttccgcatttcataaggagaaaaatattaccttgttataaattacttcattttttccttcaagttgaagcatcgtcgtgtatattgatttaaaaattatatgtgtaggcatgtgatattagttactaattttagctgaagataattataattttatttcagatttctgttattaaaaaggtctggaatcggataggttgagatcaacccgataccacgatatttgctaaaatttatttgaacacacagaaaagtcccaacacagagaactctttattactattatttattatttctactattcttttaaaaaattattatcgttacacgcagcggttttaggcactatgaagtgtttattgcctcggggctgggaacctttgcgcccttcttcagctgtgctctcaggcagttaccggccagacccggaccggaaccttggcgcggtgacgctagtttccggcgggctacttagagcgccgaacagctctgggccaaaggaccatgagagggccggagccgggtccccaaccgacgatggagggagacgtgctggacacactggaggcgctggggtgagtgcttttggagacgccttttccctgaaaacgcaacctctccttggcctggctgcttagcctacttcccttgggcctctgtgggcctgggcggccatgtgtaggcctccttccctgc

SEQ ID NO: 13582 - DNA, 2300 bp, Homo sapien
aaactatattaacaaaacactggaaacaatccaagtgtcctttagtagatgccgattaaataaaatatggtgcatccagacagtgaggtagtatataactgtaaaaatggttgaatactatgtctaaatattgatctctactctatgtaaatgtatgtgtgtgtgagcatgtatgtgtttaaagcaaggactagaacagtacatagtaggctaccttttatctggaaaaggagacaaaaatgcatatatttatactgaaaaacatgatggaaggacaaccccaaactaataaatatggtcacctgtaggggagggagagaacagagtagaggatacaagattaaaattgcaaactagatttttctgatgcattttgttttttaagttagactttgaaactgcattaatgttttacataattataagacaaaaatgaaataaaaagaaacaaatccctacaaattaaagctgaacaaaacaaatgtctattgatatattgagtaggtggtttaatcacatgggaattgtttttctgtatatccttacaggaatacgtcgtaaatataaaaaaattaaactgtaattttattgttagtagtaatgctggatttcctattctgaagccataagtaatttatacctattttaatatatattaggaatttgtaaatgttattaaaacaagaattgtcattgtaagagaagataaataaaaatgtaaaacaaaataagtaaaacccctacaattctaaattccagttggaaatagcaatatgaaactgatatagtttctctgaaaaaggcatagaaacagtgaccaacctttggtagcagattatgtactctaaataccattaaaagaatcggggctccttggagaaatgcctgattccaagtctaaggcaggaagatgttgttgtagaaagcaaggaaagtattcagagagtacggaggacaagacaaagggctcgactggcctacctgaatgggctactataaaccagagacagaagaatttgagtatcaaaagaataactgtgatggattaaaacacatcaagtatattatctgtgactttataatgttaacaaaagttcagttgcaaaaagaaccataaaagtagaaaactgatcatctaattcagttaagatagtatataaagtgttttgaaaatttaagattcttgtgaaatacaatttgcagaaatgtttagaagtgtaaaattataaataaatgaggccaggcacggtggctcacacctgtaatcccagtactttgggaggccgaggtgggtggattgcttgagctcaggagaccagcctggccaacatggctaaaccccctttctactaaaaatacaaacattagctgggtgtggtggcaggcacctgtaatcctagctactctggtggctgaggcatgagaatcccttgaacccaggaggtggaggttgcagtgagccaagattgtgtcactatactcctgccagggtgacagagtgagaccctgcctcaaaaataaaataaaataaaataaaataaaataaaataaaataaaatagtaaagtaaaataaataaaataggtttagattaaaatgatctaatagattcttttcaactttagcttttttaaatttgtaatttgtgtctgtgcttttttcaccatatttttattgtaattaatataaggctattagactttatgctgtatttgactttgtgatacctgtggtatttatctgaaaattggtagataattttactgtaaaatgttaaaacataggaaaaaagccaaatgttaattatatagagcaggaatcagcaaaccatttctttagaaggccatgtagtcatcattttcggttacaaatacttagctcttccattgtagtgtggaaacagccgtagccaatttgtagattaatacatttaatggctgtgttccaataacattttatttacaaaaacaagcagcagaccttgacacagagtgttggaggtttttttgtttgattggcttatttagtttttaacttgtatttcttcctttctaggtataaaggaccattgttagaagagcaagcccttacaaaggcggcagagggtggattatcttcacctgaattttcagagctctgtatttggttaggctctcaaataaaatcattatgcaacttggaagaaagtatcacgtctgctggtattgccattatgttgtatttacttttctgtttaatagtaaactgataacttacggtttatagttttatcaataatgtgcccactgtacaaagaaaaat

SEQ ID NO: 13583 - DNA, 2300 bp, Homo sapien
gatcttattttcttctttgaggtcagcacattttgcttttcaaaatcaaatccacagcagttcattagtaatgtcccacaggtactgcctcaagttggcagctgtggaagctaaagaagcataagacctgattcttgacctcggacaatttacagtttagctgtggaggtaagacagggacacagaatattatgtggcaattgaaagtgtaaatattatagatttaagtagggtaaagagctcattctgtagtagaggggtcagtgaaaagtaattgttcacctggtaataagagaagatctctgtgaacaaagtctaagactgcaaacttaggactgttgggagatagtcagatagattcatatatagatacaaatctttaccatcctcagacatccgccaacttggttgtttaggttgtagggcttacatgaggaagggtgtataatagataactctaaaaatgtttgagccttagacccagtgagtgagaaagagtgtcatcatttaatattctcctgacattcacctgccccttctgcatctgtggctgtgactgaggacttggttctttatatcacccagtgttcatgaggattctctggagaaatttcttgctggtctcagtatcaagaaagggggatcttctcttgagcaattttgtttttggtcttgcatgtgataggaattgaactttagacaaggcctctctttaaacttgactgctagaaatgcaggagacaaattttggtcccacctgtagcaagggtatttgactctatgagatgcatttatttcaaatgatgttcatttttggctccatcttgtgtgcctcatttttcatttcacacacttctttttgtaggttatgtgctcttgtaagctatctcgaattctgttttaaggacaaggtagcatataaatataaggaaatatataaatgaaacagaggaaggctttaaagtccagaacactatggccaggaagacaactatgactgtggctagagttatggtctgtggccgtgataatgagtgtgttattagggcagtccagcagtgattacagggagtcagacagacctcagtccaagtcagaggtctctctgctgtttattagttgtatgatctaaggcatagcattctctaaaccttcattttctcatctttacaacagtgatctctttgtatcagggagagtggattaaatgaggtaatgtatagaaagcacttagcacaaccgcactcaatcattagctattgagattatcagcactatcacctggacaagcagcggatgggccgcccctcttggccaggtcttctgtgcgcactgacgttgtatgaaagttgtccccacatctcctacacccaccgacgccaggcggccgcgtctgggccagatatggatcacgcctgtggagcgcacctccacacaggcagccctcgtccaaggtgcagggcgcagggcacagggcacatgtctacggcccagtcctgcagacggctacctagagaccccagggcacaggttaaggcaacttcacaactgtctttccgttcctttcccctgccggactccgcgctctgatatatacaggagaggccctggaggggagaaggcgtcctcactgcagtgctccgagcagcggccgcaggaagaggcgtggaagctgcgggtcggctgcgggaaagggggtcccatgggagccgctaggcgcagcccgtttcccgagctgaggtggaggtcgacgggcacaggtgccctgcaaggcgcgggcgtggtagccgggagcccgctcctctccaactcccctgagacttaaccctttggccaagagaggtcgaaggcgggcaggggtgagagaaccgcgcgaggcgcaggccggggcacccgcggaaagggggcaggtttcggggaagagcggcggggcgccgcacgtttcctgcagccgccagcatcagcgtgtcaggtggttgccaggcgggtgtgagcgcgcgcgcgaggcagagggggcgcgctcgcacaaagtttgtgcctgcggtgcacctcggtcgggctcgccgggctcgagggctggcgggcgccggggctacgaggcccgggggggagagagccggcaggcggcggcggtggtggcgggggcgatgcgccgcgcccggccgcgctaggtgagccggcaccgggagcgcgggccgcggccatgggcaccctgggcaaggcgagagaggctccgcggtgagtagaggcggccgtggccctcgggagcgcctgtgtcctttcttgggaaagaggcccct

SEQ ID NO: 13584 - DNA, 2300 bp, Homo sapien
ttaggccaattccaggacatgactggacacttatgttaatggttcctaaaagatagtgtaacagttgggaagttaccagatgttctatactgggagccttgtcttcccagaactcatgagagtctcccagtgacagcattgcctgcttgcctgaaaggatctcaccttcaactttaaggacagggacatccagtttaatgtcactctggtctgattcattgtgattccattatttaaaaaacatgaatctttatttccatgacatccgtagaagtttttccctacattccaagagctgtcttccactctcaatcaataagagctaacagaactacgtgttctctgcattcctgggcagtgcatgatactacaaacactctcaaccaatgagctctctcctcagttgaggatgttctgcaacgtgggactttatttttgctattgattttgtgtactcgaaattattagcctaagtccccagtaaagagattgggtctatgacctgggctagtctcaatgaaaaggaagagggaattcacccgtttcccaaaacttgggtggttgagatgatgtaggcagttttgaggtagagcagaattggggggcgggtgcggggagtcaaggattcttccattccaggttgggaatctgcaatccctttgatgtaatagcatgccagatgtttgaactatgaaattgtttctggggttcagactgtagaacccactgaggcagaaatgtgggaacttggtaggaaaacataaagatgacagcatgttggatacttcaagaaggtacaaggtcctttccacggaagttttgctaaaagtggatcaggaacaagaggtgaattatgtaactttgcttcagaagccacatctacctgtaatcagccatcagaggctgaggaaggtcagattatcttgtgtcttccttatcatcgccatcactatcagcagcagcagcagcagcagcagcagcagcagcagagttctctgtcacactctattactaaagctaaagattgcatgtgattatagatatttattattctggtcattgtcatggtgatctttgcggaaagatattagaggaaaactccctcctagtcatatctggaggccaatgtccttaaacagaaaactggggtcataccctgtaaaacctatcagaccaagtaatccagagctgggatgggggcaggatctctttagagtaagacttgccttccaagccacataactgtcatctggagcttgtcactgctgacaattttcctccttgctgccagcttgctctgtatcacgcagggctatcatcagtaacttagccctaagaggggtacaggaaagattaaaaaaaggaatgctatatttgtgggggaatcattctctaaaagtctcccttgccagcaaattttaagtggtaggagcagtggttgtcaccacagctggcactttgggttttgtggtgtgaagcaaaggctttttaactgagagaggactggtgcccattcctggtggcagctcctgccactggaagcctggttggccagaatgtgatgctgtgatggggactgcatctggatcccagctgtcaggacctggcttccagatctgaattctagagcagagggagggaaggcagaacacctaccagcacactaatgtttcaagtttggcctagagcaaagagcctgagttgctgttggccaaacgttggcctgtgtttgtcagactgggctgaagacttcctccctggtctatccttcacctcttatgccacagttttgggaaacactgtgctcagcaagctgaactgcttcttgggtgtgcgactagggtgccagccaggccagggacgtccaggactggaagaaatgcaggggcaggaccacagcacaggctgatcaggaggctgccccaccaggagctctgctgaaggctgcatcctctctgctgagagtcaaccactgtgctgactcaccatccttgtggttgagaacccatcagcaaattggtggctctgatgagccctggagctgcaaaatataggccggggtacctcagccggaagggacttcagttagtgacaggttttctgttctgatatggagctacaaggggcccaagaggacctgggcatttccctctctagtccccggaggaaccatgaaaccaggccaggaagcaaggctaagggcaggagcagcatctgtctccaggcgtctgtttggatggctgtaagtcccaccttgctctgtttttttctgctatggctgaacctggatctagcagggt

SEQ ID NO: 13585 - DNA, 2300 bp, Homo sapien
atcattctgactagttactctccatctggtgctttgtctatttcgtttcctcttttggttcagtctggaacaaggccaagaaaccaaagttcttctctggaaaggactttctctgccatggcagggaggaatgggtatgtcttcatatagtgcctgggggcagcaggatatcctggcagggtgtgtggctgtcccttccagggaaatagctatgggtttgttctctacacccagagttggagaatggctaatcacacaaaaatttgaaatagttactaaagagagagacattactttgggtggctcataagaagttgccgttattattcgagaatagtgtcttggactgactcatcatggctttagagcttgggttaaagtgtctgcccagcacagtgctaccctaagcatagtgcttagtgttgctcccttagaaattcttccctcaaagcatcctgggggtcagctcagcctcaagtcactttgggacctcagggacagattttggggggtggtaagaaatggcaaccaggttgggtgtaggatgacccctgagaaaagcagtcagaagtccagaatattatatcccaaagcactggaaatcaggctgacttcactgtttttgttcctggactatggtcaggtaagtagggattggtggaaagggttcttgcagcaagaatactgaaaattaaatgaattatggctttgtggatctatatagatagaactccaattggagatccaggtgaggggtctgccataaaccaaggtatctgacaaacaggcaaggccctaggcgagactctggactcagcagggaaaaccagagcctgaagcaggtacaccaggctgaaatcaaaccgacaaggagaacacaatagggcagtaaaggaaagcttgactcagtttgtgcatgggttcccatgcctcatccctgggactaggtagagtagggctcctcaaactcagcgctgtgaacagctggggctggacagtactctgttggtggggggttaccctctgcattgtagggtatttaatgacattcctcacctttacccactaggtgctattaattaatattccctcagctgtgacaaccatagatgtctccagacattgacaaatatctctgggtggaaaaagttgccctaattggaaaccattagttgacagcaaaagactaattcctgtcagcactgactggtgggaccactttcttgatcagaattggttcaggaataggcacagttgaatctgtcaattaaggctctctggatctgcagacaagcagggctagtacttgacagaaactgtccaaagacctttagcactaaaatgagaaaaaccattaagtgttggagaggagaaggctatcattgtgtttggagttaagaagagggtggagaaggaagatgaagatgtcagggtgaagttaggtctataagtctgagccaagttgagagcttatggtagaggccacgcctgctccattgggcttgtctagaccaagacctattattcagaacccccagtccttgccatttggtgcactttggtatccaaatcctacattttgatagagcactgagcaaaggcctaggtggatctttgatgatgaagtccgtgcttgtcactccaacttgatgatccactctcttccatatggctgtctggttcattatgagaaggcttacaggaggctacaatggcaactttccagcaatatgaatgctttgaaggctcagatgaactctgttaagagaagaatgcccagcaaggtccaggataatgtttatgctgaatcttgtccaagtttctcttcctgggaaagatattagctgactctggagctaagtctaagttgaggccagtgagacctgtcctgtagcttcatccccataacaatggttgatactggctttattcatggcttcctatctactgtttccagagatgatctttcacagtcttcaataagccttcaactctcaggaattttaccatttctaaattcaggatttctgctatttcctgtggttatattggccctataaacagcacatctttcttttcagtgaagaaattaaatgtcacatagtctgctctgagaaaagagccaagttcagggcagagactaccttcctgggtaccccccaagaaggagtcttgatcacttctctaaacatgccctggatgttcccagagctcatgaaaacgctgctctccagtggtgctagcagctctgatgaaggctaagtccaagctctgaattcaggagagcagagctgcctcct

SEQ ID NO: 13586 - DNA, 2300 bp, Homo sapien
aagtcaacgcatttgagaacagcctttcaaaagatacttgtaggaataacagaaggtagttcaggacccagtcaaaaggactatctggctttatttacaataattttaatgcctctgtcctaactcctccaaagttattaatattttgtctgtagatggtggttgccaggaaagagaatcttgcaaagtcaagggcatgacaaagctgagaaatagagaaggctagcctaagactttgggaagagaaaggtgaaggaaaaaaatagtaggaatcagactatggaacaagaagaacgggacaaagtttcaagtccaaagtgagcaggtaagacaaaaataactgaacttaaatgacagagtagtcttcagggaaaaaaagagagagagagaagagactagagaacacatttgcttcaagtgcttgaggaaagcacacctccagtgtgtagaggaatcacaggaggagattttgcatatggtgtccaaactcccttcccaagaatttatgtttcctgaagaacactgccaacttcccccctccatcttaaaatggtaagaaagagagttaaagagaaggtaagggaaacaaataaataattacgataatccagttatattagatatgtgtgcattttaaaataacttcaacaaccatatgaaattgtggctcttgttcctgttttttttacagatgagaaaattgtagcttatggagtttaaataatttgctcacagtcacagaattagcgctagaatttaaaatcaagtggtatgactaaaaaaccatgagaaaattcattccttcttttacaaaacaagtcactctctactgacaatcaaacccaagtcctctagattctccataatattatttacatctatcctcttctatccagccctactgtccctccctcatagcttactaagttttccccaaaagcctcctgacctcccttctctgtgtccccccattcttttcctttcttctttccttttccttcctctctcaacatgtatctcatcaattccaacctgcttaaaacccttcagtgacttcccactgacctaagattaagtcattgctctcaaatatggcactgcttacccattgttctgcatattatattctctctccatcactttctatgttccaaccacattggacttctttaatatcctcaaaactacaagtcgtataccagggaagggcttttacacaggctgtttattcactgtggaacactccctcctcctcttctcttagctcagccattcgcaaacttttggggctcggcccctttgtgctctcaaatcttctgaagaaccccaaagaccttttcattttaaaaaaggtagattatatcattatatcatgttgcaaattagaaccaattcttttttaaatatttaattcattttaaaacaacatagtaaactgattataccttaacataaataacattttatgaaaacatagccacgttttccaaaaccaaaaatacatgagtgagactagtagtgctgttatgcattttttgcaaatcttaccaatatctggcttactaaaggataaatggattctcatgtctgcttctgcattcaatctgttgtgaaatctatgttatgcagcttctgtaaaactccattgtacacttgtaatgcaataagaatgaaaaggcaaatgacttcttagtattataggaaaacagtcttaactcctccctaaaagtgtcttaggcagagacatccaggaaacccaaggtatacattaggaactcttaattatccttaatatcttgtcttaaagttaaaatttgcaaagatgtctttcctgacctcaaagaataggtctgagtcctcttgttatatgtttctataacattcttacctctctgtcaaaacactcaccgtacctataatttattcaataatttgcataaggacagggaccataccaactttgttcatagtgagtctccagtgctcagcacacagcaaggactcagaaaatctttgtgggaggaagcaggaaatagaagggggagagcaaggaagtaaggcctcagactcaatgacacagctccctgacaatcgctccattccttcagcaggatgtacacagagatataactttctacagcatccactgcagctctgggctccatttccctttgaaatgggatgggagaaaggggcaggtaacagactggagtgaggagactgaggagaaactgtagagaataatacttaggagtacacgtgctggattctctcattaaggtaatcattcaatatttact

SEQ ID NO: 13587 - DNA, 2300 bp, Homo sapien
gtaaagcatgatgaagtttggaaactgttgtccttgttttgttgaaagaagccaagttccaagaaatctgcagaggcattcctacaatccctcagccatggcagcatgaatcctgaaggggcagtgagtgctggtttctactctgtctgcacagctaagcctaggggagataatcttttcatacaagatgcattctgcttttgtgggcctcttgcagccctcaagcccccatctgatttgtacacaatgatccagtgggccagaggagcccagagccatgagcggcccatccctccaagaactatttctgactgtccagtatcatggagcaagtggaaagaagaaaaaaaaaacccaattacttttcgaagagcaagatgaatgctgtagaaggagaaggaaggggagggagatggatgggtgccgattccagaatcttcagatctgcttggatgaatcattacctatgatttgcgggacaagaatctgattttattcatcaaccagtagaaacttttctttctgcctcccaacatctgaaatccaacaaacatgtgccttaggaacataccggtcatcttttagaggcattttatatacatattgagtaactagaaaacactctttccgtaatacacacacacacacacacacacacacaccatcttgtcatacaacactcccacgcaagaaaagcgaaactgctgtttgatgaatgtaaacacttggctgtttgcagcagtcgggagtcctgccaggtttaagtgctaagatgggaggtgaaccccaggggtttccccctgcccgtgctgagatccttatttggtcaagcttctacctatgccctggcctcggagcgagcccgatagcgctggatcacagcagagggagcgaggcggctgacgtcccatcccgaagagatgaatggaattccaggaagctagagtcatgctggcttgggacagtggcttggagaccagacttcaatgacagaagcactaggcagcggcactcatggcaatgtgtgcacccacagaaatgtaacccacacctcgggttcaggagccgaaaaatgaaaagaacgtttagggaggaaaaagggaaatacaataataggcagagagtaatttattactctatgggtctgctctgtaaatagctgaagactctggagccagatggttctgcaaattctccaaacaggagtcacgttaagaagcacgagtgggcacaaaaactgtttttcaagacacaatttcaatttggcttgtggaaactggatacgagtaagtttccttaaaattcgagtagaaagcagctgtcctccccgggccccttgatgagaatacgcacaccgcccccaagcggccggccgagggagcgccgcggcagcgggagaggcgtctctgtgggccccctggcagccgcggcaggaaagggcccgaaggcagcgaaggcgaacgcggcgcaccaacctgccggccccgccgacgccgcgctcacctccctccggggcgggcgtggggccagctcaggacaggcgctcgggggacgcgtgtcctcaccccacggggacggtggaggagagtcagcgagggcccgaggggcaggtactttaacgaatggctctcttggtgtcccctgcgccccgtcggcccatttttctttttacaaaacgggcccagtctctagtatccacctctcgccatcaaccaggcattccgggagatcagctcgcccgaaagcccctgcgccaccccgcgggccctcctaggtggtctccccagccccgtcccttttcgggatgcttgctgatcaccccgagcccgcgtggcgcaagagtacgagcgccgagcccgtgcgcgccaaggctgcgtgggcgggcaccgacttttctgagaagttctagtgctcccaagccccgacccccgcccccttcactttctagctggaaagttgcgcgccaggcagcggggggcggagagaggagcccagactggcccccacctcccgcttcctgcccggccgccgcccattggccggaggaatccccaggaatgcgagcgcccctttaaaagcgcgcggctcctccgccttgccagccgctgcgcccgagctggcctgcgagttcagggctcctgtcgctctccaggagcaacctctactccggacgcacaggcattccccgcgcccctccagccctcgccgccctcgccaccgctcccggccgccgcgctccggtacacacaggtaagtcgcccccggcggccgccgaggaccaaagctgcccgggacatcca

SEQ ID NO: 13588 - DNA, 2300 bp, Homo sapien
gagtcctgccaggtttaagtgctaagatgggaggtgaaccccaggggtttccccctgcccgtgctgagatccttatttggtcaagcttctacctatgccctggcctcggagcgagcccgatagcgctggatcacagcagagggagcgaggcggctgacgtcccatcccgaagagatgaatggaattccaggaagctagagtcatgctggcttgggacagtggcttggagaccagacttcaatgacagaagcactaggcagcggcactcatggcaatgtgtgcacccacagaaatgtaacccacacctcgggttcaggagccgaaaaatgaaaagaacgtttagggaggaaaaagggaaatacaataataggcagagagtaatttattactctatgggtctgctctgtaaatagctgaagactctggagccagatggttctgcaaattctccaaacaggagtcacgttaagaagcacgagtgggcacaaaaactgtttttcaagacacaatttcaatttggcttgtggaaactggatacgagtaagtttccttaaaattcgagtagaaagcagctgtcctccccgggccccttgatgagaatacgcacaccgcccccaagcggccggccgagggagcgccgcggcagcgggagaggcgtctctgtgggccccctggcagccgcggcaggaaagggcccgaaggcagcgaaggcgaacgcggcgcaccaacctgccggccccgccgacgccgcgctcacctccctccggggcgggcgtggggccagctcaggacaggcgctcgggggacgcgtgtcctcaccccacggggacggtggaggagagtcagcgagggcccgaggggcaggtactttaacgaatggctctcttggtgtcccctgcgccccgtcggcccatttttctttttacaaaacgggcccagtctctagtatccacctctcgccatcaaccaggcattccgggagatcagctcgcccgaaagcccctgcgccaccccgcgggccctcctaggtggtctccccagccccgtcccttttcgggatgcttgctgatcaccccgagcccgcgtggcgcaagagtacgagcgccgagcccgtgcgcgccaaggctgcgtgggcgggcaccgacttttctgagaagttctagtgctcccaagccccgacccccgcccccttcactttctagctggaaagttgcgcgccaggcagcggggggcggagagaggagcccagactggcccccacctcccgcttcctgcccggccgccgcccattggccggaggaatccccaggaatgcgagcgcccctttaaaagcgcgcggctcctccgccttgccagccgctgcgcccgagctggcctgcgagttcagggctcctgtcgctctccaggagcaacctctactccggacgcacaggcattccccgcgcccctccagccctcgccgccctcgccaccgctcccggccgccgcgctccggtacacacaggtaagtcgcccccggcggccgccgaggaccaaagctgcccgggacatccacctggagcgctgaggcttcagtccctctggtggaccccggaacctacactctccccgctcgcctaccccagcccgctcctctcagccgctggaggactcttcagggcaaggctccagagccatcctctccagccttgaggttcacaaaccaactcatcaggacaccccaagatttccttactctctgaagtcctccttaagcctttgtatcagcactccagggaagagtctgtacttcccctgccctccctgcaaccccaaactacagttcctgatcttgctcaccttcgacttcccaaaagcccccaaattgttggtcttgcgccccccacactttaaaaccagcatctctttcctccacctctctctctctctctctctctctctctcatgctctctggaaagtaatcctgttgtccttcatttcagcaaacgcggggtcaaagagggatggtcccggccctgtccccatgcccagccccgtttctgcgcaccgtccctccctgcctagctgatctctgaccctcggctcttgtgcttcctgctacaggatccctgctgggcaccaacagctccaccatggggctggcctggggactaggcgtcctgttcctgatgcatgtgtgtggcaccaaccgcattccaggtgagtttgtgtggcacctttaggggaaggagggacaaggaagaggtgctggctatcccaggtgtgccccctcacgtgctgtcctctccctcttgagcct

SEQ ID NO: 13589 - DNA, 2300 bp, Homo sapien
ataattattttatacagggtggttgggaaaggccctcctgaggaagcggacgcctgaggaaagagaggagcaaaccaggtggatagctgggaaactgtatttcaggctggtgtgtgtgtgtgtgtatttggactggaggaacaacaagtgtttccaaattcctgacagatactgatctttgggatgcagaaacaggaaatcagaattaccagctgttctcaaaatcttattcttaaaatattctctaccttcttcatattctttactcattattacaagtatctgaagcctttgtttaaaaaatgagaactattaaatttagaagtgtttacaagaagtggggtttatagcaaatattcaaatgctggaaaacacagagaacattattgaggagtattcaaataatagatctcctagcagggttaactgtactacccagaatcatgggttggaaactgtcaatttaaggatttactttgaatccaaaacccgttacttttttgaacactgctcatagaatttgtataaagtatacaatgagtatcaacctatttatattttatttgcaagaatgactcactgccagcggcacacagggccaggaacataggctttcatggcaccaactacaaacaagactgactgatgagattgtggccatgtctctcccaagtgctcctgacctggttcctgaaaatgttcacctcaacctcgaactcagcatttcctgtgctggttttcaacttgacattggtgaatttcttcagtaacatctctaggtcggctgctaagttttaattctcataggaggattaggatactttctcccattttcttcagtttgcaactttttttcttttgagatttggaaagccacataaattccctgagaaatgctgggaagaaatccctgcacagaaacactaacaatgaggacagtgaggctggaaccaggtttaccaggggaaagcagtaggtaggagtggaggtcagagagccaacagaaagccttatcatttagagatgatgtcagtatgaacctgaatggaagcactgaagttgtgacgaatgtttggattctgaatatattttgaatgttgagctgataggacaaatagattgtagagtgagagaggaagaagaattgaggatgactccaaggtttttggtctaggcatggcaggctgaaattaccatttgctgagatggatagaaagtgggtgggggactctggagaagttgttttttcccgtgttaagtttgagatgcttacacatctaagtggatatgccaaataggcagttaggtaaaggagtctggagttcagggaagtctgggctggtgataagatgcaggattcaggagcatagggatggcatttatagccaggtttttatacccagcactcgcctagactgcagctgtgttctttcggcaactcagcctacgactatttgcttcgctgaaaaaaaaccacatcgtacctagttaaaacaatgaggacaaaggggccatgaatgtgaaaatgccctgtaaacggtaatgtgctgttcagactggaaagcaggagaaatgatggcaatggaggtgaggaaaatcagtttgtggacgtagggaaataattttcgtgcactgagaattagagaaactacgaaatgaaagaaggtgcaaaaagcaattataactctttttggactgtagccgaatctgtgcaaaactcatatttttaaaatttccatagcaccccaaatttactagagcttcacatacatggtctttttgagctgcacaagtcttgtaagaagggaattattattgttcccattttacggaggaggaaactgtgctcggagaggataactgacctgtaaggcatcacagcaatatgagggacagagatacacaagcatccagacgtccgcgttccgaatccaacctaaagacgaaaaatcgctcccaacccccaccgtcggcagcgaagacggaaggacacacgccggccgtcccagctcgcagggctccaacagccgccggccccggtcccatttccggatggtacagccctttccgctatcgcgagaccggaagcatcgcgcatctggttgccagggaaacagcggtcccacaggcaggagggatctggaccggcggcttcttccactaccagagaggctgaggtggcgggagagacccctctcctctgggggtaagtggctggcgcggcgagtgtctgcggcgcgcttctgcggccatctgcgccctgactgacggcggccagttcctcgaggaggcccggcggg

SEQ ID NO: 13590 - DNA, 2300 bp, Homo sapien
cacatccttataaacgccatatcggggacacaggaaaggaagccacatatatccaagtggtatgcagtatgttcaacagaccttaatagaaatgaatattgcttgtatcatttaacgtttgaagaggagcgataaagactattatcatttaagagtagtgagaagtacaggtaattctcacactagtaggctaatattttactagccactcattttaattcgttgatcttttcttccctgaacaagtatacctaaatctgggatgtgtgtgtgtgtgttttatcctacctttattctgtaccttaaacaacacatagatggggaagtagagtgggtttggttttgttttttttaaataatcgacaggcgacatacagtttaacttcacagggttgtttaccagcaggttggtgttccgaagaagcacgcagtaaaacacgcacaaaataagggtctatcaaaataattgtatatattattatttcgagatatatatggaaagatgggatcgcaaaacatctttaacagaatgggtaacattccgttcaattatcagtaacaaattcccacagaatctttattcctcgctatttgtaaacaagagctgaagccagccgggcacccaggagcattccgccggggccatctgaggagggggactcccgcctggatcccgctccatcctcgggccacgagaaagccctatttgaactcttctgctcccgcgtgggggctggagtccaccgtccctgcttaactacactgcagctacccgggatccttaagcttccttcaactctctgcactttgccaggcacccgaaacccacggcggctgggcggccctgctcccggctctccgagcctgtaccctcggggaggcccggtccggaggcgccccgcgggaggcttaccgagcagcgagcctatgaagatgacgacctgcacggtggtggtgaactggcggtacagctgcgcctcgccgaactccccgagcgcgctgcggttcacacccgcagcctcggcgccggacgcgttgtgcggctcgctggcatttggagagatccagctcccgttatgtcccatggcgaggctgggactccggctccgcgcgccgcccgcctcggagccccgcgcggagcctctcctcctccgggtgaggagggacgcgcgggcgcctggcggagtcctggagaagccggagcagccgacgggtcccctcacgtctccacatcgccaaccccggcgcccgggaggcggggagggagggaggcgcggctgcgccccatgcccactccctcctggatcccagtcagcagccacaagaaggcggcacggtcagagcccgccgagcgtcgtccgtccctcctccagggtggtcagcgtggcccagcccactcgacaggaatggaaacacagaaggaggcattcgatggtcaaggagggcgctctccgctcccgctgcctccttcaaccgcgggtcctccgcccctcgagggctagggcatccctctccagtcccctcgggctgacgcactcgacccctctccttagcgggaggagaacgtttggccgaagctatttttcagtcctgttggcttcgaggctggatggcgatgtgaagccaacgtaatgcccacgccgagtggccggagccacgaggggacccccgagtgcccgacagcgcccatggcttgggtggaaagccctgagcgtccccagcagcctggccctgcgcccggccgcctgccaagacgcccgtgctgggtcctgcttcccagcccctcacttgtggctccgacctcctgcctcagcactggcgacggggaccccgttccgcagcgcctttttgcctctgcatggctgggcgccccctttcttagcccccctcggtccctcggccgctagaacacagcttgacagccgggcggggacgaaggaggacgcccccagtggggcagtggcaccgtctgcgcggccgccagactcggtgcgcgcctggggcagccgggggcgcgcggctggcgaggatggtcacgtggcacgcgcgaccccgcccctcgcgcccaggctgccgcggggagggcgccatcttggccccgcggagcgtgactgtctcggctggaagcgtgggaggccggaggatcagtgactggctgtcgtggacatgctcgctacacctcccggggcttcgcttcgtttactattaactgtcgttactcctctgtatctcgtcagcaggggctgcctgcggtgttagaattacacgcccctgccacctgggcacggagcccagtctcc

SEQ ID NO: 13591 - DNA, 2300 bp, Homo sapien
ctttagcccttcatttttgagaggcaatccttcctcaagtctgagaatcatggtgatctcagctgattgggttatttcttgattctactgaccatataccctaacaccaattgaggggttgtagagaatttagtgatatcttttcagaatgaaaacatgagagcggtttcttgctttctccattctctacacttgcaaaactgattcttttctatacctttatcccaactgttactagttttgaattcgggatggagggtgaagatgggtaaagggatatttttataactgttatcaaacaactctatttacacagattcttcaacccttcctaaatgagtatgctggatgttggtgaattattataatttttggtttctaatgattatagtgtaaggggttttatcttgaaaactatgtttggactcctggaactaatgttaaccgctggtaatggcgttcttgggggtaaaatacaattagtgtaattagtaattttccgtctctttctctttcccctttttggtctccaaaatgtttaaaataattctcacatagattactatgtgaaggtattgtgaaactccaaatatgtacaagacacggatttttaccctttcaagagtaaataaggattaccagtgaaaaggaaatagccatattgtaccaggatcatccttggggcaaccaaggaataactgtagttttaatcaattctcgagttgttgtccttggtcccagtcacataatcaacatgtcaaagtcttctaccatgtacctcacttattaaaaagaaacgagtttccataaagtcgaccacgcatctttgttctctttatcccagatcctctctctgcatccgtagtttcctctcccacttggcatctctttaccatttcttcttgtttacttgactatcccagctcccaacattttctgtcccggaatccactaagcctgggttatactgtgtacatgttagaaatgatattcaataaaaaggcccaggaaaccatgcactgagttcctatatttcatttttcttaaatgctccagctacacccaaggactgactgaggggccgggagactgggctccgtgcccaggtggcaggggcgtgtaattctaacaccgcaggcagcccctgctgacgagatacagaggagtaacgacagttaatagtaaacgaagcgaagccccgggaggtgtagcgagcatgtccacgacagccagtcactgatcctccggcctcccacgcttccagccgagacagtcacgctccgcggggccaagatggcgccctccccgcggcagcctgggcgcgaggggcggggtcgcgcgtgccacgtgaccatcctcgccagccgcgcgcccccggctgccccaggcgcgcaccgagtctggcggccgcgcagacggtgccactgccccactgggggcgtcctccttcgtccccgcccggctgtcaagctgtgttctagcggccgagggaccgaggggggctaagaaagggggcgcccagccatgcagaggcaaaaaggcgctgcggaacggggtccccgtcgccagtgctgaggcaggaggtcggagccacaagtgaggggctgggaagcaggacccagcacgggcgtcttggcaggcggccgggcgcagggccaggctgctggggacgctcagggctttccacccaagccatgggcgctgtcgggcactcgggggtcccctcgtggctccggccactcggcgtgggcattacgttggcttcacatcgccatccagcctcgaagccaacaggactgaaaaatagcttcggccaaacgttctcctcccgctaaggagaggggtcgagtgcgtcagcccgaggggactggagagggatgccctagccctcgaggggcggaggacccgcggttgaaggaggcagcgggagcggagagcgccctccttgaccatcgaatgcctccttctgtgtttccattcctgtcgagtgggctgggccacgctgaccaccctggaggagggacggacgacgctcggcgggctctgaccgtgccgccttcttgtggctgctgactgggatccaggagggagtgggcatggggcgcagccgcgcctccctccctccccgcctcccgggcgccggggttggcgatgtggagacgtgaggggacccgtcggctgctccggcttctccaggactccgccaggcgcccgcgcgtccctcctcacccggaggaggagaggctccgcgcggggctccgaggcgggcggcgcgcggagccggagtcccagcctcgcca

SEQ ID NO: 13592 - DNA, 2300 bp, Homo sapien
ccctttacttaaatgtggtgtttttgtagctgcttcaacaagtagagtacagtggaagtgacgctgtacaacctctgagattaggtcataaaaatcaatgcaagctggtctgagtctgagtgcagtggtgtttacaactaattgatcacaactactttacagatttctttgttccttctccactcccactgcttcacttggctaacctaaaaagaaagagagaaaaaaaaacgtcagtgcagcttctgccttgtcctcttgggactcttgtctctcttgggatgctcacttttggagcatagctgccaggctgtggggaagccaaacagccacatggagaggccacatatagatgttccagctgagttcccagtcaacagccaacatcaactgccagacatagagtgaacaagccttcagatcccagacccaggcagcaacgctgagctacacttctggagttatgctctaagccacgaaatttgttatggtttgttgtgcactggtagatgaccagacaattataaaaaacactactacagacatttaatacatatttaaatcgtgtccaatcttttacatcacaaatcttaagatcttttgactcatccttaaaaaaaactcatacagcacacaactattaagaattgtgccactctattcctgtctttagcccttcatttttgagaggcaatccttcctcaagtctgagaatcatggtgatctcagctgattgggttatttcttgattctactgaccatataccctaacaccaattgaggggttgtagagaatttagtgatatcttttcagaatgaaaacatgagagcggtttcttgctttctccattctctacacttgcaaaactgattcttttctatacctttatcccaactgttactagttttgaattcgggatggagggtgaagatgggtaaagggatatttttataactgttatcaaacaactctatttacacagattcttcaacccttcctaaatgagtatgctggatgttggtgaattattataatttttggtttctaatgattatagtgtaaggggttttatcttgaaaactatgtttggactcctggaactaatgttaaccgctggtaatggcgttcttgggggtaaaatacaattagtgtaattagtaattttccgtctctttctctttcccctttttggtctccaaaatgtttaaaataattctcacatagattactatgtgaaggtattgtgaaactccaaatatgtacaagacacggatttttaccctttcaagagtaaataaggattaccagtgaaaaggaaatagccatattgtaccaggatcatccttggggcaaccaaggaataactgtagttttaatcaattctcgagttgttgtccttggtcccagtcacataatcaacatgtcaaagtcttctaccatgtacctcacttattaaaaagaaacgagtttccataaagtcgaccacgcatctttgttctctttatcccagatcctctctctgcatccgtagtttcctctcccacttggcatctctttaccatttcttcttgtttacttgactatcccagctcccaacattttctgtcccggaatccactaagcctgggttatactgtgtacatgttagaaatgatattcaataaaaaggcccaggaaaccatgcactgagttcctatatttcatttttcttaaatgctccagctacacccaaggactgactgaggggccgggagactgggctccgtgcccaggtggcaggggcgtgtaattctaacaccgcaggcagcccctgctgacgagatacagaggagtaacgacagttaatagtaaacgaagcgaagccccgggaggtgtagcgagcatgtccacgacagccagtcactgatcctccggcctcccacgcttccagccgagacagtcacgctccgcggggccaagatggcgccctccccgcggcagcctgggcgcgaggggcggggtcgcgcgtgccacgtgaccatcctcgccagccgcgcgcccccggctgccccaggcgcgcaccgagtctggcggccgcgcagacggtgccactgccccactgggggcgtcctccttcgtccccgcccggctgtcaagctgtgttctagcggccgagggaccgaggggggctaagaaagggggcgcccagccatgcagaggcaaaaaggcgctgcggaacggggtccccgtcgccagtgctgaggcaggaggtcggagccacaagtgaggggctgggaagcaggacccagcacgggcgtct

SEQ ID NO: 13593 - DNA, 2300 bp, Homo sapien
acagctcactgcagccttggactcctgggctcaagcaatcctcccactcagcctcctgagggtgggactacatgtcacctcgtccagctaattttttattttattttttgtagagatggggcctcgctatgttgcccaggctggtctcaaactcctggcctcaagtgatcctccaccttgtgctgggattacaggtgtgagccactgtccctggccaaagggttacatttttagggtataagattagtaatatgttatgttggttccttttctagttagagatatatccttaggtatttattttttaaaatgatatgattgagacttaaaaaaaacactcctgagggatggagagaagagatgaaataaaattgacaaaatatctatggttgttgaagctggatgatgagtacagaggagtttacttctaagtatgtttgacattttcataaatataggtttaaaagaatttttttaaagaccaatagagaaatggagtaattttaaggattagagtgcaatggccatatttgcaatttagaaacattactctggctgcaataggaagaatggcttaatgtggggcaagaatgaagacagtgactaattaagagagttattgaagtaacccagggaattggtgacagtagcctgaactaagttagtggcaatgggttagagtgtagtggatggacagaagtggtgactatttggatgtgagttgagagaaagggaattcagaatcacactcagttgaatggtgccatttacctagtcagagatcactggagaaggaacgggtctccagcagagggaagatgatgatttaaattggccttgggtcaagctagtgcatttgtgttatctggccagaaatgagtggatagatggcagcaaggaatttacacaatcattatttagtgaacagtggaggagtaagcaaggtagacagaagaaacgtcacttaaacctaacttgggttagtacaataggattattcgaaatggacatgcagcattagtaagttactgaagatgaagtgcaataacaatgtctgggtagacaggttattattttataaacttgaaaaacgacgacttgaggcaggatataacacaaagactccctaaattcacactgagtgaactgggaagggaacatgattctcttcatgggaaggtagctcataaagatgcctgagtggaaagacagttttcaattgaatttgcaaggtggtagtggagatccccaaagctggggaatgtagagacagagaacataatgagggtgttgaatctgtggctcagagaataagtttgggggtactaaagtgggaggaaggagggtggggggggtcacaatttttactcccggtagtcttgttctgggaaggtacaaggtgaaattagaagtgacctcagaacccatcgacgtctgccctttaagagtttcccggccgggcgcggtggctcatgcctgtaatcccagcactttggaaggccgaggcgggcggatcacaaggtcaggagatcgagaacatcttggccaacatggtgaaacaccatctctactaaaaatagaaaaattagccgggcgtggtggtgcgcgcctgtagtcccagctactctggaggctgacgcaggagaatcgcgtgaacccggcaggcggaagttgcagtgagccgagatcgcgccactgcactccagcctggggaacaagagccgaaactctgccaaaaaaaagaaaaaagagtttcccgcactagccatgccagggtggagaagttccagcaagcacttctgttaaagatacttgtttcgtgaaaactatacaatgtggcgttttcattcctatctgtgattcatttcttaagttcgtggagttcctttgctccccttcccccagcaggatgtgggcaaagctgtccccctgccttcttccttcgcctgggcttctggagcctccggagctagctcccggcgcggagctccgcctacggcccgtccccggcgcggaaccccgcccacgagcccgtttccagcgtggaacaccgcccatagcccgtccccagcgcggagccccgccccgcaggctgccgggggcccaccgccgcccaggcaaggccgccctgccttgggcgcagcgctgccatggctgggggccgtggggcccccgggcgcggccgggacgagcctccggagagctacccgcaacgacaggaccacgagctacaggccctggaggccatttacggcgcggacttccaagacctgcggccggacgcttgcggaccggtagga

SEQ ID NO: 13594 - DNA, 2300 bp, Homo sapien
gatataattaaaaagtaattttaaatttaaaggaaaatacggtatcttatacaaatggttttattagaatttttttgcctgttcaagctatgaaattaggagtaccttgctttttactgctgcaacataaaaaaaagttaccatttatgatagttgctgtcaccactttgtatgtatagatttttaagtccagaactcacaacgacagttgattcttttaagtatattgttttaattataggtcaagtgctaccaagtcgtactacttgggccgttgtaatgaaagtagcttggcatggtggttcatgcctgtaatcccagcattgcaggaggcctaggtgagagtatctcttgagtccaggagttcaagacctgcctgggcaacatagtaagacctcatctctacttttttaagtattccagcacagcagggcgtgatacctcacacctgtaatcccagcactttgggaggctgaggcaggcagatcacttgaggtcaggagttcaagaccagcctggccaacatggcaaaaccccatatctactaaaaagacaaaaattagccatgcatggtgacactcacctgtaatcccagctacttgagagcctgaagcaggagaatcgcttgaacctgggaggtagaggttgcaggttgcagtgagccaagatagtgccactgcactccagcctgggcaagagagcaagacttcgtctcataataaaataaaataaaatgaaaataaataaacaaaacattccagcatggtggtacacgcctgtagtcccagttactcaggaggctgaggcaagaggatgctttgagtctaggagttcgaggctgccatgagtgatgatcgcaacactgctttccagcttgggtgacagagcaaaaccttatctcaaaaaaaaaaattaaaattaaaaaaaaaggccagcttaaatcagttacagtttaactacttagactttaacttagactttagcttgcattgaaatcatttggagctcttgttaaagcacagatcactgtccaaacctccagagatgctgatttactaggtcaggggtatagtagaatttgtatttctaacattttttaggggatactgatgctactggccagggaccccactttgagaagccctgggttaaaggtatggcttgtttttcttcattaaaaaacaaaacaagaattgtctattacaccattaaacagtaagttaatgggttcaaggaatgaagattaaaagaaagtatatgaggccgggcacggtggctcacgcctgtaatcccagcactttgggaggccgagacaggcagattgtttgagctcaggagttggagaccagcctgggcagtgtggtgaaaccctatctctacaaaaaatataaaaattagccaggcctggtggtgcctgcctgtagtcccagctactgagatgggaggattgcttgagcccgggaggcagaagttggaatgagctgagatcacaccactgcactgcagcctgggcgatacggcaagaccctatttcaaaaaaaaaaaaaaagcataaaccaatttttaaaaaaagtatgcaatagaatatgggactttaaaaaagccttccctaaatgtttccaacttgcttcatcctgtaatgagcaggcttcatctaaagctcgtcatactgagccactctgctgcaccaactctctgatttgctttgtctttcgaaagctttatttataaccggttcctgcaaaggcttagtttggcatgacaaggcattaaactgttcatcgaggtgaaaatttatagcctacttgtgctaccttagacttttaaaaaattgttccatgagggtaagtcttctcatctagagatgcctttttttgattcgcctcttgtacccagcctgtcgcatagcatgtaaatcctgcaggaatgtttattaatttaaattcacctatgagagtacattctggtctttgagtaacatgaattctataatgtgtatctttaaaaaataaacccatagttaatgccttggattaactagtttagcactgattgtttgtgatgctaagattcttccttccctctcaccgagatgtgtgtgcttggatgacaaggaaagatggagtccccagcagttgttgaaacacagctttataaatccccagccaaaaatgcctctagtggaacaaagtcctgaaggtgagtctgttacctttctttatttggtaacctgtttgacattaaattattttgaaagtatacataaaccaaaaactggaaggggctgcatgtgttatttt

SEQ ID NO: 13595 - DNA, 2300 bp, Homo sapien
gggtgggcctgtttcagggtattagaacaagataatggacagaggagggcttattgccactaccaaagattaattggccgagaggattaccatatggaggcccttttccccagccttgaactcatgctttcctgccacatatcaggagcagccacagggcagctctgggctcaggctgtgtaagttcacatcctggatccacctgttaggactgcatgaactcgggcaaggttcttcagcatcttgtgcctcagtttccccatctataaattacataatagtagttcttatagacttgtaaagaataaataacatgtgaagtacttagaaccatatctgagttccataagtgctagactgcatgagcacagaaactctactttgcctaaccacctgaatctggacaagtaagatatgatgtgcacacatgcctgtacatgcaaaagtaacaccaaggtgactttaggcaaagtggcttgaccaggaacctctggagaccagtgcacaggcaagccagttccaatggggcatgactgagaagtctgagctttggcctgcctacctgccagagcaacaacatcctaaacaggggtgagtgggctcttccagtagaggagtggccataaaacaagttggccgggcacggtggcttacgcctgcaatcccagcactttgggaggccgaggcgggtggatcacctgaggtcaggagtttgagaccagtctggctaacacagtgaaaccccgttactactaaaaatacaaaaaattagccaggcatggtggtgtgctcctgtaatcccagctactcaggaggctgaggcaggagaatcacttgaacccaggaagcggaggttgcagtgagccgagattgcatcattgcactccagcttgggcaacaagagtgaaactctatctaaaaaacaaacaacaacaacaacaacaaaaacaaagaagtctttcctctgccccaagggaacaggactgtgggtcactgttagtatttcagtcataactgcaagcaggcagatctttaaatgtgagatacagaactgggcagaaaaaggaaccctcgacaagttacagcattttgaatgagatgaattaggtatttgctttcctggagttggagctggttttaggtattccgtaacataaatatctttgaggtaccacttacacagataataaagcattggtcccccaaaccactgtttatcctctattatattccattaccttctacacaattagaatgagatagaagtacacaaaggaggtgcatccgacatgcatcaggatcacggtgtgggcatcagagggggccttgtgaggcccggagggtgaaccagagtttactgacaattattccgaaggtgatagaacaaagtctggtcttcctctctttaaaaacaataaaacctttcttcgtgagaaatctcaactctggcactagttgaagcatataggctagtttcataaatcaaatggtgcatgttgatttaagatttaagtcatgttgcactgttttctgatatgtgaatacactcaagaaggggtgagacagagcccctgtgtcactgtcccaagaagacttgaatgttttaatatttataatatttttctctaaacttgaaggtcatttgtgtttaatgtaagaaaagctaatgatataattaggttaactaaccctccttgtaaatttgggtttggaagcgatcttgtaaaacaataaataaaattttacaacattctcagttttttatgttaattgtgataagtattttaaacaagtcatatttttaaatgagcaataatataaaaaattaaaaatggttatgttggagtgccaagagtatgcatatttacccccaaggtattttttaatactgttggtttctttttcgtgtagaaaaccaagtctttcccctaaccgtttaaaacccatggtacacgttttaaaatggaggattatgtaaattgcagttatactccttcacttaaaactgttgtgtaatcaaattctcctggtttgtctgtatatagatggagtactgtgagaagagcactttacgagacaccattgaccagggactgtatcgagacaccgtcagactctggaggctttttcgagagattctggatggattagcttatatccatgagaaagtaaactttacaacatttcatatctgaagacttatgtttacataaatttatgactgcataaaaatatcaaatgtaagattggagaaaaactgaaatagagggaaagctatgggtatattgacataatctatt

SEQ ID NO: 13596 - DNA, 2300 bp, Homo sapien
aaatggagaagaaaccattaaaacaagatgttttacattgcttttaggattccagcagttattatgcattacaatttctactaaaattaggcatgtaaagctatttgttttatctttttacatctttttatacgatattttctgtgtttataaggcctaatttctgcttctatgtagttgttgatttgattttttttggttgtgacaataaggtataaaaacaaggggcctccttttaagaaatgttcatactacattgttgcacaactctgtggtcataataaagcagaaaaaataatgacctattcagaaatttcagaatgtcagttaagtgcaagaatagtggcaccttttctttgacctgaactgactactgacttgtccggagaatagctgagcattatccattgcatcccattagcagtgtgcctgggttttattgtagaaatcagtcatctcctggctgttgaaccacgatccagcaaaacggcccacagccacagaactgctcaagagtgagctgctgcccccaccccagatggaggagtcagagctgcatgaagtgctgcaccacacgctgaccaacgtggatgggaaggcctaccgcaccatgatggcccagatcttctcgcagcgcatctcccctgccatcgattacacctatgacagcgacatactgaaggtgggcttaagccacgctgcacaaagggagcttcaccttgtccacaaaaggatcaagccagtttctcacagattcttttaatgcctctaacataagttcttatgtgaggtattggaagcccctaaaagtacatgcaaaatgtgtgtatatgcattcagggaagaggacccatactttcagtcacctacttgaaggagtccttgacctttcctcctccctacccacccaagagattaagaagcagtgcctacaaaaattagccgtgcgtggtggcatgcacctgtaatcccagctacccgggaggctgaggcaggagaatcgcttgagcctgggaggcaggcggaggttgcagagagccgagatcgtgccactgcactccagcctgggagacagagcaagaccccaactcaaaaaaaaaaaaaaaaaagaaacagtgcatttagagactgatccctagcccaaacgcccagagccataagcatcaaccagctcatatctagatgaagtataaagtagttcccagtgctggttgcacatctacttcatctcagaaactctctgacaatgcagatgcccaggtcccgtagcccatctagtggctcagaatctccaggtgtgaggcatttcagaatctcattaaaagctcccaagcagtttctgaagtgtagccaggttgccagtttgggaagactttaacatttaatttcttttaaaaagaaaaaaaatctgaagcatattagtgaaatgttaaaatgtgttaaagttgggtgagtaggtaacaggtatttgttatattctctattatgtttctgtttgcttaatatatatgatataatttaaaaagatagagtagtggaggaagtcatagtaaaatttatgaaagatcagtatagattttagagaccaaacacaatttttactggctggcaatattattatagaaagatatttgcaggattataggtgacttttttatagatgtcttttttcatatgtgttgtttctaaattttctatagtgaaatggtactacttttataatacaaaaacaaatgaaaaagaaagctattggcaaaatatgtaaatgccatgtagctttcaacaggcctgccatgaatcaccttggtatgtgggaggggcctgatgctgttaggtggtcatcgcgccacagtatccctgagagtcagagagaatgtgtttatttgattatctccctctgaaaggcaaatatcaatgtggccaagaatttggactttgaacccaggcatccttcccattggttgaaaggttagctcttgctttccaaagcaggccatgaaagatatgtgtcctcttccctgatgtgttcaaagagggatggacttgtcaagacttgttttttgaacctggaaataagcagtgtagtgcctactgcaagccacagattaatattttaaaggatccctttgataaggcttcaatgatgatgttttaatcggtcctgttttagggcaacttctcaatccgtacagccaagatgcagcagcatgtgtgtgaaaccatcatccgcatctttaaaagacatggtatgtacgccctttttaaaaatgatatttcttctcataagacttttttcatca

SEQ ID NO: 13597 - DNA, 2300 bp, Homo sapien
aggagctctgcatctttttccacatgagaattgcaccaagaggtgaaaggcagtaggctccttttggggaaaaaaaaaaaaaaagctttgtttctcacctcttgaaatcccttagaaaggtggcattgggttttctccctgggttctgagaaaagtcagaggacttctcagtattaattttttatacattaatagaagatatatttaaactactccctccccatcttatttttaaacctgccttccattaattcaagcatatttaagcacaatgcgagctaccacaaaataaattctacctctgaagaacactccttaggtttttgttatttcatgatatctaacttaatctgtaaaaccacataagcttgttttactgtagaagtcctctcaagataacttgtccttaggtttttgttatttcatgatatctaacttaatctgtaaaaccacataagcttgttttactgtagaagtcctctcaagataactcaagacttccaactaagtatagtctacattttcatgcagtcagtatcctacactaatgtgatttctgccacagcagaataaagtagtattcactcaattcaaggagcctcttcctttgccttattcaacctccactgaaagactagggctcttgactaaatgtatattttctcaagtgtcaaacctaacatctagctgcacattcgccatgtgaaccacaaagataaggaaataatagcatcacctggtaccaagaaactgcttattgaaggcccagcacagtaaggggctaaggaatcaaatatttatgccagctgctccttacagtactacgaataaggaccaatatgctactttcatttccacaagagctttagcagaactaacgactgtctgacctctaccttcttattttattcttgaggtttccactactaaagtataggaaggtcctggtctcaaaaatagccacacagggcaaaagggaaaaacaaataaaagcctggttcagaaacgccccatcctctgttaagttcaagtctttacatttcaaaagacagccttagaaattaagctcaccacagtgctgatcttcttcttcccatcggtagctcttaacagacacttgttgtctgcgggctcaaagccctccacagtacccttctttggaatgggtttggttcgaccgtcatctgaaggaaaaaatgcatcctggtgaacacggccgcgtacgtggctgagcggcagacaaacagttaaaacagaggagtggggtaagtgatgacctaacccagccccgctgctctagttttgttaaacacctcatctgctatcacggtctggcgaaaccctggagaaactattatttccacgacggaaacatgtaatatcgaagcacgttaaattccactcaaagtggcggcgtctgggatccctgacaaagagccctgggctgcttggggcccattgttaccagaagcaacctaggcggctcagtgctggggactgagccagctacaatccctactattttccgggcccgaagccccgaatgtgctcagtacagggtggggaaaggtagaggaaggcggcggtccgcggcagacagactccggtggctcccagacaccgggaacccagggagcatcgcccggctcccctcccgctgcttacacttcttcaaggtgatatagacgctgcccgacgtccggcacttctggaaaagtctggtcagctccgtcaggaactggaaaacaacaggcccagccccgttagccagccccaaatcctcgtcctgccgcgtcaaggccctggtcctcctgcaggaggcacaggtctcgagtaacgcctgagccgcccccttccctcggccggccaggcctagccatacctgctcgctctccaacaacaccatcgcggcgacgctggctcgactccctccgcttaagcccctagcagtgagagccggaagttcggcctaggctgggcgggacttccgctactagacttccattgtcttccaccaatctcttctcttccaccaatcccggcctgcgccctcccccctccccgcccgcctagcgcccgcgccctgggacgtccgggggcctgtgacccggaggcgctggggctgtcctgggtcgtcacatgcgagaaatcgtctcaccccagccagtgtgacggagtgagagcaaaagaaagttttgatagcagcgtacgatttatattcagctgtatgctgggcaggtaacctaacaactcagtgactcagtttccttatccataaagtaagggtaatgatagtatct

SEQ ID NO: 13598 - DNA, 2300 bp, Homo sapien
tttggcttccctgggccacattgaaagaatcgtcctgggccatatgtaaaacacactaacactaatgatagctgatgagataaaatttttttaaaaagggcccatgcataattttcatgatatctgccaatacagatgagcaaaaacatcctcacattcaaatgactggacacccatgcaagagccctgggccttggtattactagctcagaagtcaaagtcctggttgagagcaccagattgacccacgttaggtcatatgcttgagcccaggtgctgagggcagttgagagagtgaccctctgacccttctatttatttatttattgcctctcaccaaaacccacacaacaggggattgcaaacaggttcaaatgctggagaaccaaaagccaatacaggttggctacacaaggtcatcagcctagggcaggaagtgggcaacgggcgctggccatttggaagaaaatgtgaaatcagagagtgaacatatttaagccattaagtttgaatctcctaactgggctcctcatttcctgccctgtctctctacagtgcattctccacaacacagacagggggatctttaaaaaatataaatcagattttcagtgttctgttgaaaacttccttaacgagtcttctctttgtatctagaacaaaatccaggcttactatggtcacgggccctacataatctggtccccagctacctctccatactcctttactccttgctccacaagccctcctcacccccacccgcacctgccagtcttacagacacagggcaacttgtttcccctttgaaggttttgctctagccgttccctgtgtctgaaacactgtgtccctagatctttggatggctggtcctttcagctttcaactcaaagttctccttttcgacgagaactcccctgaccccaacccaggcagtccccttcccactctcattatacagccctgcttaggctgtctcacggaattcattatctgaagctgtactacttacttgtttgcttcattgtttatttcctccctgcccctttaacccaacttccaggaaaccaggaacttagcttttcttatcctgctgcatccccaacctctacaaccgtgcctggcacagactgagaggcactcagcgaaaacctcttgtgtggtggaatgcttgactttatagagggcccagggttcaagttggctagtggcagagagggcttacaacctagttctcctgactaatcagaggtagaactaaagactgggctccagcccctcattttttttttttttttttttttttttgagacggagtctcgctctgtcttccaggctggagtgcagtggcgcgatctcagctcactgcaagctctgcctcctgggttcacgccattctcctgcctcagcctcccgagtagctaggattacaggtgcccgccaccacgcccggctaacttttttgtatttttagtagagacagcgtttcaccgtgttagccaggatggtctcaatctcctgacctcgtgatccacccgcctcggcctcccaaagtgccgggattacaggcgtgagccaccacgcccggcccagcccttctggctagagctgcaggtcagcgtttagggagagtttaaaggatctctacaggaacttataatgacaataatgaaaagaacaatagctgatacctactgaacacgctctatgtgccaggcactgttctacgtatttaatctgagtttcatttacgcttcacgaccacactgcgcggtagatactatcattacccttactttatggataaggaaactgagtcactgagttgttaggttacctgcccagcatacagctgaatataaatcgtacgctgctatcaaaactttcttttgctctcactccgtcacactggctggggtgagacgatttctcgcatgtgacgacccaggacagccccagcgcctccgggtcacaggcccccggacgtcccagggcgcgggcgctaggcgggcggggaggggggagggcgcaggccgggattggtggaagagaagagattggtggaagacaatggaagtctagtagcggaagtcccgcccagcctaggccgaacttccggctctcactgctaggggcttaagcggagggagtcgagccagcgtcgccgcgatggtgttgttggagagcgagcaggtatggctaggcctggccggccgagggaagggggcggctcaggcgttactcgagacctgtgcctcctgcaggaggaccagggccttgacgcggcaggacgagga

SEQ ID NO: 13599 - DNA, 2300 bp, Homo sapien
cgaaggagttgggtccaggtaggcaggggaacctggggtgcactgctgagcagacctgggcgcccgagaacggcccagcctctgggtctgactttgggataggacaggagctgtggggcatcctgcctctctgcggagtctgaaggctcctctccttaacagctgggctttttccctccttcccaatcgagtctgggcgtccagcccccgagtgctcgtcacgctggaccctggcgcggagccctggcatcacgactcggaggccgagactctctcctggagtcacccaggtctggggtgtgtgtgtgtgtgtgtgtgtgtgtgtgtgttcctagtcactgtcgaggatctgggtgtctgactactgccttctcctaagaggaggaggagtctaagttcagcatccctcttccagcccttaggggttgggatggctgcagcggggcttgagttcctttgctaggaataaagcattccctggccctgttctcaggaagtgccctcctcctcccaccgctctggacatcacctcttaagctcaggagaaaaatttcaccctctcttagtttacccttgaccttggccagcacccctccagaggcgcccacctacaggcaagccacctacagtttgtggagcgtgagaggggtccctggggcttgcagagccacaccttctggctgcacctcccccactgtccagtccaggcaaaggttgaactttggggctttgctgggagggggaggggaaggtgataggcttcaaaggaaaaaccaagacaatgactcgtgctggtgattggctttgagggccccttcttaggtcaagattgctagcctgagaagaggaggttggagagctggaggggagcccctgccaggtgactggcgggacagcacttggtcctttcatcaggaaattttgtttcctgttgttaataagctggagtgcaccacctcacccccctccccatacacacacacacacacacacacacacacacacacacacacacttgggaaacacggtccaaagaacaccacgtggctgcttgccatcctagcaggcatctcctcattctccagggaagagggcacagacaggaccatagacagctcagggacagggatgggatgggacgaaggcagggcccaagcaagcagctcacagcttgtgtttggcaaaggcagcattctgaattgaactgagattcttttagctacttcaccaatccatagaccatttggcttgttcttcaaaggcaagagactaggggacagaacccccaggaatctctaattgagtctgacaagaatgaaattcatctctttttatccttagctgttcaggtggttgctgcttctggctgctgcaggggccctaagcagttcctggtatgtgtagggagctgggttggaagcttaagatgctgagtagctccaagctcagactttcaagagccatcaggtggagcaagaggaacttctttatcaccaagaaactcatatcaataacttcagcagtataggcagtgagtgaggtcacagggagagggctgaatttcacttccttctgtaagaccagttgtaccagtctcaggttcagagctggcaggagcgggaggctgtggaatcagggatttgaagtcgtggagactagtgaggagacttagttgggagaggctggacctaccctctaggccaaactttggtgggcagacagctcaactctgctcaaagagagccgagacggcagctgcaatgactagcttgggtctttatcccctctcccaggacacattcttaccacactgcagagcctgtttgttgtgttgtgcaagcaaggggtggagattagagtagatgggcagcagggcggggcttagaggtttggagggaacctggctgtcctaggattgctggcttttgtttttgctgctgagcctggagctcagctcagactgagataagaatttccttgggacaatgactctgtatgtgtgtgtgtgtgtgtgtgtgtgtgtgtgtgtgttgtgagcactgtatgtatagccagtcacagcacccttgacagcaacttacagaggctagtcttgtttatattttcccaggtaccctgcatgcatatagctgctgattctactcctgctattgctcacaaccctcagagtcaaactttgtgaccggcctaggtcagaaaacgtgatcaagaaaaagggtggttccaggcgggcccagggaagaggtgtggagagcccctgaacattcaggcagtccacatttggggagtgaatgtcaccc

SEQ ID NO: 13600 - DNA, 2300 bp, Homo sapien
aaatcacggagggctgccggtgcccttcacagaggctaggtttggtttctgtatctccctacatgtagcaggagtgcaaggtcactctgaccagctcagacatgcacttttggccaagcctctgggtaaaataatatacctccttttggcttagtgccttttgctggaaatctatcaatttcgggggactgtgctactggctaaccttgactccccactctttcccttttccctctttgtcctttggagacagtatttttctattctagcaaccacagccctcaatatggctggttcattctgtttcaggtgacttctgagggagcaaaggaaagaatgatgggaaaaaggtacaaggagacttcaggctctattgggctgaaggtcccagctccactgaacttaaatctaagtttacaacccagagagcagctcggtggtcagagcactgctgagccctactgcccctggtgggtcagggttgttgcaggactggctccctctcactgctctctggactcatcattttatctttcctaaaactcaggcttggtcaagtcactcatctccaataaaatctttgctgcctcccctttataaaatacagattcttcagtctggcattccagggacacctctgtagtctgacctgaacccacctgcccatgcctaccgttcgtaaatctcagtgtgcacccaatgatccagtcaccaagcctccctctgctccctgcacaggtaagctctccagctcagcacttcagtctgctacccttaggcctgggctattcttttttattttattttatttttatttttttgagacggagtctcattgtcgcccaggctggagtgcggtggcgctatctccgcccactgcaaccttcacctcctaggttcaagcaattctcctacctcagcctcccaagtagctgggattacaggcatgcgccaccacgcccgcctgatttttgtatttttagtagagacagggtttcccgtgttggccaggctggtctccaaccactgagctcaagtgaaccacccgcctcggcctcccaaagtgttgggattacaggcgtgagacatgtgcatctggttttccttattgaaaaatatttcccattcaatttaaaagctgtctccctgaggccttctccagcctttgtattctgaatttttctgcattcctcaatagtcattatccttggaatgaatacaattccaataacttttcactattttcagggctacctctcctagtagactgtaagctccttgagggcagacgccaggtttctggcactcagcccaatatctggcacagagtaggtgctcggtaaatgcctgtgaagtagcccatagactcccttacgcggtctgcaggacatgctgctctcctggcagcaccagcacagtctctaaatgctgccatatgcgagatatgtgtcaaccgctcaagcagccccggccttcttgagcgctccgcttctcagccaggtgcttattttgccagtgcccacgcccagtcaagaagaggacctaagggctcccctggatgtgtttgtttcaaacacaccttcagctttggagctgcagttttcttccgacctgctcggcaggcgggagggagctttcccctgaggctgggatcccatagggacccgcaccctgcaccctgcacccactggacgcaccagcctcataaaaaaactccccgcctccttcccccctccctttgtggacgcgcagcaattattctgcccattgccgtgaaaaagaagacaaaagttactttggcgccccctctcccacacctaatacagaggattcagggactctctggcgcttccagagcctgtgttagggacagaatccgcactggcgacggcgctccgactgcgcttctggcgacggtcggaattttgctcggccccttgcaatgtttccatgggaaggttcgtacattcgtgaccgtccctggcagcggcccagcccgggacttggcgcttcactcgccattggtcagtcctcggcgtgacgcgcaggggggcggggcctcatcagctgtttgcgggatgccccgagcaggcgtattttggaaacaataccgcaccgtgcggagtggcctcctcccgccccggcctgtgcccgccgccgccgccgcccctgcctgcgcctcccgcctcctgccgcagcccggtgagcgcccgggtggccgccgggggccgggcggagttggatcgcagctccttggggaagtggggagcggagtcgcgctgcgcacgggggcccgggaa

SEQ ID NO: 13601 - DNA, 2300 bp, Homo sapien
taagtgatccgcccgcctcagccttccaaagtacatagaaccagctcttaaggccactgcctcaggccctcactccacaaaaccgtaagtccttgggaccaggccaacaaagggtcacaatccaaggtggatatcctgtgccccactcactccagttcccccaagtccacagacaaaccctgctgctttcagcattcctcttcctcaaaggcaaaccttgcttgctgggagctccacccatcagttcatgggacatccctaaaaactcattttccaaattaaaccacagagtaccttctgtcatacattttggagttttgttttacctacctccttcttttcccgtagtgaaacaagcaaggggtttagcctgaatgcattctacatcgtagcagagtttatggggaatccgactaggttataggaaagactgagatcaaaagaccaaacactacgtttccaagattgtttgtaggaaatagtcaaaattgagaagctgtagatatgaacaggacaccctgttgaaagaaaatgaagtgctaggccagtactgacataaggtaagagataaaatgagccagtgagagaatcccacgcaccacacctcatatgatccaggaaagcttcctggatgtggaggactttgatgtaaagagtaaccaaaatttcctatgaggaatcaccccttcccctctctcagtcccaaggtgaaacacatgacttggttctgaacaatcaaagccctgaatccactatccccagtgactgtttgggaggaaggggttaagcagggtgactcctaagtctgaatttgaacctgtaaggataaagtcgtgaatctgttacccaatggagaatgacaataagccaacaacaagagtagaggcgagaaatggagagaggcccagtccacatgagtcctgggttaagctttatctgaagtcttttatatataaaagacagtaaattcccttttctgagtaggccgatttaagttggatttctacttctttggaatcaagagtcctgatgattcagaggaaagaaggacttatataacatgaacaaagacagaaagctgggaactaagaaccagagggtagtggacagtatcctcagcatctgcctctgggaagtgccacctctctgaccatccccacagtcataaaggagaactcccctgtacctgggctttcttaaatgaccctgttccttcctcaaggtggctaatgcctgtaatcgcagctactgcggaggctgaggtgggaggatcacttgaccccgggagttggaggctggaatgcagtagccccatgatggggctactgcactccagcctgggcaacagagcaagaagaagaccctgtctctaaaacaaaaccaaccaaccaaacaaacaaaaagactctactcccctggtcacatctgagctatcacaatttcttcctcagaaaattgaaattgcaacaaacagtttaatgtcagtcaaggctagtcccctgaaggggaaaagaggtaacaccttgggaaccatagcatggctgtgtttactgcttgtggactgagcagaagagaaagcaagacagtatcatcactttatagatgaggaaaactgatggtcagaaagattatgtagcttgcctaaggttgcacatttggtatgattttacagaactagaatccagctttttgaattcaagggtggggcaggaaacagctaggtcagtggcctaagaactccggacgggtgagatttggggcagacagcaggggtagtcaccctacaagagtcacgccaagtgcaagcactcagagacatctcccaacactcaaaacagcaaagaagttctggtgctttaagtgttcctcgctcggctcagagactcggcttcgagccgcgactcaagacagcacctgggggtatttgttttgcctaagcctgctgcacttccacggccattgaatcccaaaaactacaattcccattatgcaccgcgagttcgcggactaaacaggcataaactacaagccccagaatgccttgggcgagacgcgagagcacggaggagcggaggggcgtggccacgtcgaccgcgcgggaccgttaaatttgaaacttggcggctaggggtgtgggcttgaggtggccggtttgttagggagtcgtgtacgtgccttggtcgcttctgtagctccgagggcaggttgcggaagaaagcccaggcggtctgtggcccagaggaaaggcctgcagcaggacgaggacctgagccaggaatgcaggatggcggcggtgaaga

SEQ ID NO: 13602 - DNA, 2300 bp, Homo sapien
gcatggggatgtaccatcctgtatagatctgtcacccaattaatctgcccaattgatgcacattttggtggcttcaaattctttgcagttacaaacagtgctaccatgaatattcttatacaaatatcttcaggccgatgtgcaactatttcttaacttggattcctagaagtgcatttgctggatcaagtacatacacattttgaaattttggtcaagactgtaaaattgccctccaagaagactgtaccaattcactctcccacctgccatttttttttcactgtataatgacagggagtggtatatcccttttgttttagtttgcatttcctggatcattccttagtgagacagagcagaagtggattatttataagtttacacacaaaattacattgagatacaaaaagaagaaaaatacagagttcctctccaaaaggaactgataacctagttaaagggaaaatgtttcatattgaccacaaattgaactttttttttcttttgagacagagtctcgctctgtcgcgcaggctgaagtgcagtggcacaatcttggctcactgcaacctccgcctcccgggttcaagcaattctcctgcctcagcctcccaagtagctgggattacaggcatgtgccaccacgcccagctaatttttgtatttttagtggaatgaggtttcaccatgttggccaggctggtctcaatctcttgacctcatggtccacccgcctcagcctctcaaagtgctgggattacaggcgtgagccactgtgcctggccacaaattgaaattcttatgtttaatgccatgacatctaacactgcgttcaatcaaaatgtctacgcatgcagcttgagacctttgcacagaaggtgcctagggtcatgatttgggaagattaatctgccatcagtggaggggtggataaaaactaatgtttattgggatcaagatgagcagtctctgtgccagaaactttattcctttaatttccacagccctgtgaggcaggtgaaatcatccccattttatggatgaggaaattgaagttcaattggttcaataacatgccaaaggtcactcaactgatgaacagtggagctgagatgcggaagactgaagactcacagcctggacttttaaccaaacaccacatggcttcgctacagaagaaagttagaaagttttcaaaaataaaatgtagagccaagtgccaccttggatataagggactgggggacgggaagaggcaagaactcccaggcttccctctggctgtcaatagctagtgggtcctggcagtgggagctgggccatcagaggtggcgcctgaagtggggcaggcacaaaatgggttttcgggcaagcatttgcccaggtgatggtcaaagccacagaaaaaaggtgttttgatggagtggtggctgagtgtggggagagatgagcaggggaccaagcctggagcttgggcagcccacgattggacactaggagaagaaaagaagccagtggaggagacactgaggctagggatggggagggcactgtggaaggctgggctccacctggcgctccggggagctggcaggggggcacatcaaggagctcaagctgcctcaccagcaaatgcctctgtttctgaccaggggcaatgaaataaagggacccggttgagtaactggtttctggtccctgccagcccaggaagccagcacccaccctgccttacatcccatgtgccactctcagccttcgaagcaaaaccagctgagaccagcacctgccagatctgaatgcgcagctccaagttctggggggtgggggtgggggtgagccaaggaggtctggcttctctagggcaagggtaggaaggacagcagggaggctcaccctgagcccggcaggcagcccttcctcctcctccccttcagcaaagaaaggcagataaaaacgtgtttttataaatagctccagccccagctgatttgtaaattcagtgggttttttgtgtcaatgacatcaccttcctccccatggcaacccccgacgatatcaaaattgccaagcaacgttggagcagctcggcgccccaaacgagcaggtcgatgcctgaggatttaatggagaaatcccaaagtgagccggggcgcgcggtggaggaggggcgcgccgcagccggggccgctgggccctgatgggcgggagcggggtggagcggcctcgcctgccaggcagccctgggcgcggggctcggcggccacactctggagacagccacggtccaggcaggt

SEQ ID NO: 13603 - DNA, 2300 bp, Homo sapien
ctggccacaaattgaaattcttatgtttaatgccatgacatctaacactgcgttcaatcaaaatgtctacgcatgcagcttgagacctttgcacagaaggtgcctagggtcatgatttgggaagattaatctgccatcagtggaggggtggataaaaactaatgtttattgggatcaagatgagcagtctctgtgccagaaactttattcctttaatttccacagccctgtgaggcaggtgaaatcatccccattttatggatgaggaaattgaagttcaattggttcaataacatgccaaaggtcactcaactgatgaacagtggagctgagatgcggaagactgaagactcacagcctggacttttaaccaaacaccacatggcttcgctacagaagaaagttagaaagttttcaaaaataaaatgtagagccaagtgccaccttggatataagggactgggggacgggaagaggcaagaactcccaggcttccctctggctgtcaatagctagtgggtcctggcagtgggagctgggccatcagaggtggcgcctgaagtggggcaggcacaaaatgggttttcgggcaagcatttgcccaggtgatggtcaaagccacagaaaaaaggtgttttgatggagtggtggctgagtgtggggagagatgagcaggggaccaagcctggagcttgggcagcccacgattggacactaggagaagaaaagaagccagtggaggagacactgaggctagggatggggagggcactgtggaaggctgggctccacctggcgctccggggagctggcaggggggcacatcaaggagctcaagctgcctcaccagcaaatgcctctgtttctgaccaggggcaatgaaataaagggacccggttgagtaactggtttctggtccctgccagcccaggaagccagcacccaccctgccttacatcccatgtgccactctcagccttcgaagcaaaaccagctgagaccagcacctgccagatctgaatgcgcagctccaagttctggggggtgggggtgggggtgagccaaggaggtctggcttctctagggcaagggtaggaaggacagcagggaggctcaccctgagcccggcaggcagcccttcctcctcctccccttcagcaaagaaaggcagataaaaacgtgtttttataaatagctccagccccagctgatttgtaaattcagtgggttttttgtgtcaatgacatcaccttcctccccatggcaacccccgacgatatcaaaattgccaagcaacgttggagcagctcggcgccccaaacgagcaggtcgatgcctgaggatttaatggagaaatcccaaagtgagccggggcgcgcggtggaggaggggcgcgccgcagccggggccgctgggccctgatgggcgggagcggggtggagcggcctcgcctgccaggcagccctgggcgcggggctcggcggccacactctggagacagccacggtccaggcaggtgggggagggcgctgctcccgtcctgatgtgccaggagccgccagcagccatccaggtgactaagccggcccactagcactgagtcaccgcccgcctcgagctgttcttgcttctcctttgcatctgattattttgggagctggaaacttggagctgcacctgagtcccgccccttctagctctcccctccctaccttgggctccaggaagatgggacttgctgtgagtctgctgccaccccctaaagatatggaagacgctgtgggggccagaagtgcccggggggctgtggcagcaggcagagtgcaatagcagatatggtggtcaggctgcctgtgtgtgtcctctggaggtgttgggacagaagggcagtcttgtccgagctgactggagtcctcccgggctggctctgaactcatctcccacggggatgtttcggtaaaggagtggcttctggggtcggagtggcatttggagagcgaggctggattggcttaggctggcctgggcaggtaggtggctctgtgttgggtgtggacccacgtgtgtgtgagtgcgagagtgtgtaagccagtgtgtgtgccgtccccctgctggggacagcagctgggtccagcagagagctggctgggggcttgacaggagtttatcctaactgatgctgggtgggcgcaggccctgagatgggcgtcagggagaggggacgccagacacacggcctgagcagggtgaggagcagctgccagccccggcaggcccaggccctgtctgggtgcacagga

SEQ ID NO: 13604 - DNA, 2300 bp, Homo sapien
gcctacagtattgtccactcagaggaaagagaaagaatccgcgtgggaaagacacaaagaggaggaggaggaggcgacagagtaaggggaggagaacagaaactaaatataaatatgtgttggggatgttggggatggcagcagggtatggttagctggctggctcccacaccactgtcccacagcacagagggccagcatctgcacctggcaccatgctttccctaggaaagccgagggcattgggcttgtggtgcagccacacagggtacagacctgtttgggactgtcaggttcccacgggttgcctgagctctattaggtgggcgccttagagtaaattgtgtgaaaccaatacagcctataatgcaaaagattgagccgtgagtagattgatgcgtctaaagaatcagtgaacaaaaataagtggccatagtgacctcagttaatcattgaagtctgaggtgcccaacaatgatttttaaaatccctgcactgtccttggtccccgctctgtgacactggcagtcacccagccaccacttgacggcagccatttggagtccacatgtactgagtttccaagccagaacttcctcagcactcagccagaacacagcctttctctgggggcccaagacaaggagagcaaaggtcttctcacttctttatctggggaagagatgagtgattcctgtcccttcccccagtatagaaaacaccctgtaccccaaaagaaacatggcacaggggcagccaggagtgagccccttggaatggccattctgatcttaggcagggactgctgaggacaagcagaggatgccgactctgggacaaaatcacaggcggaggggctccgaaacaggccctagccgctctgggggtgcgggtctcctgccctaggactctcaggctagaaagtcctcaggactcaggactgcgcaagggctgacaagggaactggaatcccttaaatcccgctttcctgcctgcgcaaggggctaccccagcacagtcttggggccctgtccacatgggacagatcatccaaggtgacaggttttccgactcccgcgtgggctctccaggatgtgtgggtgggcacacgcggcccgctcaggtccgggagagtcggcccgcggctctggagcgtgcatctgcgatgccagtgaacgaggtgattacacacagccggcgctcagctgattctccaggtcgggtctccgcgaggcggccactgggccgtggagccgcaggcaggtccccgcggctgtggccaggccagggcccggaggcgaagggcgggcgggaactggggccaagcaggtggagagaaagagttgagcagcacggcgcccctcgggcagaggggctcctggccaaggccccagcgacacttggcaacttctcccgcgctctgggttcgccgccgcgtcctacctgaggccacaccctgaaatcaaaatcgcggtcaggtgaagccggcgctgcaccaacgtgtaagcgcggcccctcctcggcgttcccgcgccgaggtccctcccgcggagggcgggcccggctcccacgacctcttcgagcgttcctgggcttcccgctccgcaggtgggttccccggctgccccggaggttcgcggcgagaggacgggcctcccaacacgcgcagcccccttcctgggtgcccatgccccgaagttcgggaccagccggcgccaggcgaggggccttgggcgcaggcatctggagctccgcgtccctggagcgggacctccctccgcgggcgcccgcccggcgcggggcattcgcgtccccgagagggcgcagcagtggggcctgcgagctggggccgggtggccgcgccgggtcggagtgtggctggagaggggccgccccggaagcggtgctgcgcccaacgtccccttctccccgtaagccccgcaaggagcctgccgcctcttgcacctgagccaggagttcagtcgggaggcgggcgcggagcggttcccagcgcctggacgtcagccagtcgcaacacccgcgggaacacttgctacatttgccataatgcatttctgatctgtttccgcgcaggcctgcggaggactggcccagcaaggtcccaggtcttccctctcctcagcgcctaagagagaggcccagtgcgggtgaggagtcgcgaggaagaggcggaaggcgccggaaggtgagtgagcgagcggcccccggccctagagccttctgcacccattttgaagagcaggcagggagggacagtgggcaggcaggtggccctcctg

SEQ ID NO: 13605 - DNA, 2300 bp, Homo sapien
ttcacctccttaacactcacaactttacactcacaacaccattgtgagttgggctgaacctgctttcctgggcccattttaaagacagcagggagctggagagagaaggaggaggcaagaaaagaaaggtatgcttataaagtgcccaccacatggatagactgtgctaggtgctttttattagtacatctaatggctaattgtagctactgcgagctctgttttacagatgaagaaactgaggctcagagagaagtaattgtccaagacagtaagtgtggagctgggattcaaagtcagatctctccgactccaaactccaggctcatccacaatgcccagtgcccagagaagtcaagtgacctgctctggatcacacagctatgcagaacagagatgggactggaagctcaagccagaggctccctctatcccaggcaacagttgaggttccagggtcacccatgaacacatgaacatgtgtgatgtgcagggggcgctgctgtttctgatgcccaagccagatcctcttccaggaatggccccttccctgggtcaccacgaggtccagagaccctgaattagggtctctcactactcgccctccaaggacccctacctttactttattcctattgctttgctctaataccctctgacaatagcttgccaaacagccagactgccctcaaagctctccaggatgggagaacttggagtggcttagcccttcccaacatagcagctggaggctgatgaggcagttactccccacaaccgcctaatgaggaggaaggcattcgcattcccattttacagatgaggccatttataagtttgtagagaagtgaagcaacttgtctaaggagtcaaaggcaaagtctggatagattcaaaccccactctcttcggttccaaatgtgtcttcggccactgtcctatatactatggaggagaattcatggcactgcaggctgaacctcaccttgcatggaaccaggcgttttcttatccaatgcggcaacctatgccacaccggccaccaaaaacgagcatggacacagacctgagcccctctgcccccttcacccagaaaaacaagtcagaaaagcccccaaaaaaccaccagaatggggcaagatacagaaaacgcaacctacaccctgggagctcttcatggcttagcctccagtgctcccagcagcacctacactccagatcggatgccacctgagcaggtctggagatctggggaatgagcggtgggctgggatgtgtggagcggcagcttcacctgtaactcctgcgggagtctcccacggctgcctcccaccctgccctgcacagccactgggcctgccaccacccttcctgtttgggaacctcttccccggcatgaattccctgcactctgccgcggtgacaccctcacccaggacaggcatcagacctgaagatgggcccgggggcagggcgggccatttgaggtcttgacgtctaccagcctaccgtggggccatggggcaaagtggtgtaagtgacttaacatgcacccactaaggatcgagagacggcacctggaagggaccacctccgctgcctagcagtaccaggaaggagccagcccaggagggccacctgcctgcccactgtccctccctgcctgctcttcaaaatgggtgcagaaggctctagggccgggggccgctcgctcactcaccttccggcgccttccgcctcttcctcgcgactcctcacccgcactgggcctctctcttaggcgctgaggagagggaagacctgggaccttgctgggccagtcctccgcaggcctgcgcggaaacagatcagaaatgcattatggcaaatgtagcaagtgttcccgcgggtgttgcgactggctgacgtccaggcgctgggaaccgctccgcgcccgcctcccgactgaactcctggctcaggtgcaagaggcggcaggctccttgcggggcttacggggagaaggggacgttgggcgcagcaccgcttccggggcggcccctctccagccacactccgacccggcgcggccacccggccccagctcgcaggccccactgctgcgccctctcggggacgcgaatgccccgcgccgggcgggcgcccgcggagggaggtcccgctccagggacgcggagctccagatgcctgcgcccaaggcccctcgcctggcgccggctggtcccgaacttcggggcatgggcacccaggaagggggctgcgcgtgttgggaggcccgtcctctcgccgcgaacctccgg

SEQ ID NO: 13606 - DNA, 2300 bp, Homo sapien
ctgtttcaagagtgcaaaacccaagtttacagaagtttacttggtaggcagagtgtgtgtgtgtgaagattagaggcagaaatgtgcactcagggttgaggttcccatgggagtcttttgccccactggatacccactggcaaagctgtcaagggctatctgtgccaggccccctcagccttgggctgcaaatccagccctcctcccctgtgtggaaccagccatggcatgtgctgtggggatgtctttgtatatggcctagagtgtgccctctgtctgtcctcaccaaatctggtgacactcaccatgttctcacactgatgctgagacttctggagccagggagggggtcagcttggctcctctctcccctcccagcctgtcatgtccccaactctccccagatcttgatgcctgagctggcctccctcagagtggctgtgatggaggaaggcaacaagtttcttggacaccgcatcatccccatcaatgccctaaattctggtaaggagtggggtccttcactgttccaagatcagcagcaggagcctgtgcacagggtggggcagcttctgggagggggcctggagtgaggccttacctaagccctcacattgtaaggagtagggcagaacagtacctctccaggaacctaagagaggcgggaactctgcccacctaacagaattgctgtaattttctgaaacggctggggcagtttctcaagtagctgacacttatgggcatttaaaatttgctaagggcttataatacattctcacttcatcctcacaataaccacatgagtagacactcatcccctcttcatagatgagtaaagtctcagagagttaaagtaacctggctgaagtcacacagccaggatggtgcagtgccagactcagacccttgggtcctaggctgtgtgtgcacagtgctggcaggaacgggctctggctcactgcctaccctgtcctgtctcacagggtaccaccacctgtgcctgcacagtgagagcaacatgcccctcaccatgcctgcgctcttcatcttcctggagatgaaggactacatacctggtgcttgggcaggtaggagcccatggcatgccaggagcctcggggtgtctgttcccccttccttcccatcaagccagcttccagagttggggtgggatccagatggggcatcctggagtgggtgaggacaggggagacttccagccacatctccatatacactatgttgtaatgtcctgtgcacccacccagatctcactgtggccctcgccaaccccattaagttcttcagtgcccatgacacgaagtctgtgaagctcaaggaggccatgggaggtctgcctgaggtctgtgttgcctgcactgctgccaggggctcaccagagattagccctatttatgggagaggctggggagagggccgagtcccaggctcggggagagagggctgtcaagccaccttcctgacctgctctccctacacagaagcccttcccactggcgagtccagttgccagccaggtcaatggggcgttggccccaacgagcaatgggtcaccaggtatgagcttcggtccgcacacctactgggggcacctccacctctgcacccacaggcacttccctttaaaaaatttcacctagggaaagtgcggggcagggggcacatactgcgactcccagggggcggtgtggaggaggcgaacggagccaaggggccccccagagcacctgacagcccagcccgtggctcttgcagcagccagggccggggccagggaagaggctatgaaagaagctgcgggtaaggcctgctgagcccggtgatctcggggatgagcctggggcgggtccggggctccttgggggttggacgggcaggacggcctggccggtgttgcgcctcacccgggcctccgcagagccgcggaccgccagcctggaggagctccgggagctaaagggcgtggtgaagctgcagcggcggcacgagaaggagctgcgagagttggagcggcgcggagcgcggcgctgggaggagctgctgcagcggggcgcggcgcagctggcggagctcgggccaccgggcgtggggggcgtcggggcctgcaagctcggtcccggcaagggctctcgcaagaagaggtaaggctcgtggcggtgccctgccctctgcagcgcgggtggcgcaggatctcagggcctgtccccacgtggcctccccaggagcctgccccgcgaggagagcgccggagccgcgccgggcgagggccctgaggg

SEQ ID NO: 13607 - DNA, 2300 bp, Homo sapien
gctgacacttgtgattgtctgttttttgttttagccatcctagtgggagtggtatctcattgtggttttgatttgcatgtctctaactacaaattatattgagcaccttttctgtgtttattagtcacttatatatcttctttggagaaatacctgtccaaatccattgtccatctttcaactgggttgtctttttgttgacttatctcttatcggatatctgatttgcaaatattttatcccattctgtgggttaccttttcactttcttgatggtgtcctttgaagcacaaaagtttttaattttgatgacgtttaatttatctttctttgtcccggtgcttttggtgtctccaaatattattgttgaattgtcctcctttcaattctatcagtttttgttttatatattatggggttctgttgttaggtgcatatatgtttatattcaaattgcttctttttgaatatttgtcctccacttaaaaaagatagcctactagcctggcaagcagcatcatttcttctgacctcttttctacctcattctggttattcttagttccgatcctgccccagccaatggaatagccactgtacaaaatcagggtcagagcaaaccagctaagcatgctctctgctcagcaaccagggccttgagaagtggatgcttgggtgtccttgaagttcttctgtctgccttgagcccgccttctgaccaggtccccttgaccagggctgggccgagtttgtggttcttagctctgagaaggtgagggcaggggcaataaggttactatgcccctagaatgacgccatcaatcctgaggacttcccagaacctgtctacaagagtttcctcatgagcctctgtcctcggccagaaatagatgagatcttcacttcttagtgagtttcttgggttgtgctggtcatgggaaaagggtggtggctaacaatcccctcctcccacctgccatgccgggagtcaggaggcttcactggacaagggggttgtctaagcctccaggcccaagggatatggacctgtgctcttctctctggcttgaagccatgctaaggccaaaccctacatgacgaaggagcacctgaccaaattcatcaaccagaaacagcgggactcccggcttaactccctgctgttcccgccagcacggcctgaccaggtgcagggcctcatcgacaagtatgagcccagtggcatcaatgcacagaggggtgaggactaagggaaccccttgtcccctgtggtcctgtcctgccttggcagcggggttgtagcctgacagctatctcctgtcccccaggccagctgtcacctgaaggcatggtctggtttctctgtgggccagagaacagcgtgctggcccaggacaagctgctgctccaccacgacatgacgcagccactcaatcattacttcatcaactcgtcccacaacacctacctgacaggtgggccctgataacattggtgccaacctctgctttcacaggggttccctgcatcctccacaggggttgcccacatgctgctggccctgagaataacacagaccatgatggagtggcggtagggggagagctgggctgcctttgggtgatgccctcacctcttccccatcctctggctcagccggccagttctcaggcctctcctcggctgagatgtaccgccaggtgctgctctctggctgccgttgcgtggagctagactgctggaaggggaaaccccctgacgaggagcccattatcacccatggcttcaccatgaccacagacatcttcttcaaagtgagaccctgggcacagaggctggtggccgtggcagtagggaagggctctgggccagaagctttgaggggttggagggctgaagctagagaagatgaatggctggaaggcctcagaccattggggaccagcagggattgggggccaatggcggccatgcagttatatgtgtgtattgaaactaggcaggggggaaaagtgctatcacgagacaggcagtcggaacgctgaccttctgttcatggagtctccttctcctccaggaagcaattgaggctattgcagaaagcgcctttaagacctccccctatcccatcatcctgtcgtttgagaaccatgtggactcgtgcgtatccaggcccattcagccacattctcacccagcccccagtctcctgtctgcaactgtcctccccacaactgccccagcctctaaccattgcctacagcttctcccacgtctcagtataatcaccctaaggcctc

SEQ ID NO: 13608 - DNA, 2300 bp, Homo sapien
ttaaaagcaaaaagctctttgatgaagattttccgctctcctgactgcctggattttctgcatttttggagctagctttgcaggaggtcaggatgtgagcaggagagtacaggcccccactgaagctacagttgtggtcccaagaacagtgcaggcagtgacatcactgagtaaagatgggcaaggctttgttctgtggattcggagctggagatggaaaggaacagagtgaggagccctgaaatcctgaaatgaggagaggaggctgtccctttcctcctcaggctgagggggaggaatggactggtctctccaggcccaaagtggagagggggctgatggctacaggacagatgaaagggagggacttgggtgccgggaccagggcagccgcaggtgacaggtgcaggggctttgggaagggacagggatttcccttgcaaaatccattcaaacagatatcgagggaacctgatcccagggaggaacccagaacagcatgggctgccagaggggcccccagaagggccccagactggagggagggagagaggagagatgacgctaagggactgggggaaacgaggaagaagagtcctctgaattgttaccatttccagaggcttggtcaggccctgctccggctccatcccccggccctagaattgctcttctgcagattatttctgtgctgggaattcccttagctccagcctccactgggcagtttattatcttaattccgcatgaagagtgtcctccctcaccctccaccctgccctggaccagacctccagccgcgacaattctagggcctgggtgagggtcttaccgttgttgggggtatgcaaagccccatgggggggtgacccagggcaaaaggccaggccccagaggggaaggaagtcttgggtagagctccctgcctcccaggctgggctaagaagggcgataagaggagcagattaggcaagaggaagtgggctgggctgagctggactggtgctgaactccctgggcctggggcagagtgtgggtcaggcacctgagcagctggggctgagcctggccaaccagagcagccatccctccgccccagccccgctgcaggctggggtacacagcagaggcgggcacacggaggagagaggagagcgcagtggaggcaggggctagggctgctcagtgggggtccaggcctcaggcagtcccagaggcccagaggtgggagtctggtgaggtgggtgaggggagtgattgccttgcctcatgtgcccctcattttctttctttttttatttttttcgagatggagtcttgctctgtcgcccaggctggagtgcagtggcgccatctcggctcattgcaagctccgcctcctgggttcatgccattctcctgcctcagcctcccgagtagctgggactacaggcgccgctgccacgcccagctaattttttgcatttttagtagagacagggtttcaccgtgttagccaggatggtctcgatctcctgacctcgtgatccgcccgcctcggcctcccaaagtgctaggattacaggcgtgagccaccgcacccgcccgcccggcaggtgcacctcattttcatgggggaggaagcattgagaaagaggagccgtgtgttcagcaaactttgcttattcaaaacactccattccagctgggccctgtccccaccccacccctgcctctacggtgctcccaacctttggggtcagatgcccatgctctggacccttcccctgaggaggtcctttctcctagtgagctccctgtgccttccctcagtccaggcctgggcagcagtctccccagctggtctccatgtcgtccttctccagccctcctgggccaaatctgaccagagaccaccacagggactgagaggccctggctccaaggcgacccggcctcatgaccacgtctccgctgtgagcagcgcagagaaggaagcccagagcaggaagtgctgagaggcacagggtggggctgggggtgggggcgggggcctccagaagaggcgggggcttcctgcttcagcctccttgggcagaagcagtgaccacaggcccccatggcaggcagggcgggtgggaggagggtgatttacaaggcagatgggcctctggctacagctcagtcctgcactcagccagggccaccccaggggctataagagcaactagatttctggagcagctcggggatgggtgccatttgagcccagcttggctccccctcctggctggcctccttcctgcccttctgcctgcctg

SEQ ID NO: 13609 - DNA, 2300 bp, Homo sapien
aggtcaggctcacacttgcaggggcttgagggagggttcacccacagaaccccatcagaaccacagttctgttccccaacacacgcccagacaagtctccctcactcattcagacacccaggcagtccatatgcccagttctgggaacacaggaagtagcatccaaggaggagggaaccagaattctggaaagccttatagagagggaatggggaggagagaaggcagggagagcagagagcggaaggagggggagggcacaagtaaagccgcaagggagagtctgagcatgaagggttgttagcacctagggggtccaaagaccaggcacagagcccactgcctggcgcctggcctggagccaaagaagacaaacctcacatgggaaagtggggaggggacaaccgcccaagccttgaggtctggaggggatctgagagtgaaaacgctctaggagtcctgagagttaaactcctcaggttcagtgcagctccttgggtccaaatccaggccaaaaccaggaattggaagacccaaaaagcgggaccagcgacctgcggcgaactttgggactaaggtggcaagcgagtctggagaacagctcagtccgtggctctgtcccggaggctcagggttggcggggtgaggcgggctggggtacgcaattgcgacgacttcagtagagctccgaagcccagcctggactgggtggaaggaacacaaccagctgcggccccagtgagcgctccaggtgccagaaccgcctacccctggcgtcaaccaggttctttagctgtgaatgggcctgggagacccacccagggggtacgcggtgcggggagcaagctgagagctggaacgtggtatcttccctatccctcttaccgtcccctcccagaggataaacctaggcctggagtccgaagcccaggctgctattccacctgtcacttcggagcctcggggcggagcggggaggcgccagagttgacagctcgcgctccgaccgcccccttctagctccgcactccgcctcgcacaacgccgttcccccttttaaagaagtgcccggggctccactctacgccgcgccagcccaccaggggtcgcggtgacgtcgcccgtttaagagccagcctcccttaactctctcttaacggggcgtcccggcggggctcgcggctcccggcagccgccgcctcccctcgcggcacttccggaccccggcgtcgcccttttaaggggcagcccccagcagcgctctccccgccccctgttgccggcgcgcgaggcgggggagccgggctggagcggagcgcgcggtccgcgcggccactggagaccaggcggccggcggccgggcaggcggcggcggagcgcgcggcggcgtggcggcggatggggacgcggagccgggcggctgtggcggctgtggcggctgtggctgtggcggcggcggggaagcagctgacgggccggcggcggcggcggcgctggcggcggtgactggtccaggccccggcggcggctgcagcaacgcggtggcgggctgcgggcgggcggcgtgaggagcggcggcggagcgcggggccgccgggaaccgagggcgccgggccgccccctgcccagtccttgcaggccgccaggccccctccagccggggccgtggagcaccggggcaaaggccggggcccccccatgaaggagcgcgacgcggccccggccgagcggggcaagccggccacctacaccggggacaagaaggcgaagatggcggccaagaccaacaagaagtgggtccggctcgccaccgtgttcgcctacgtgctctccgtgtcgctggccgccatcgtgctcgccgtctactacagcctcatctggcagccggtgggcgccgggacctcggggggagccgctggcccgccccccggcggctccaacgccactggcccgtctgggacttcgggggcggcggcggcggggcccaacaccactgggtcgtcccgccgcgaggcgccgcgcgacgttcccccactgcaggcggcgcgaccggcgcctccggagccccctgcggacagccccccggccgggccgctcgagcggcctcgggggccggacgaggacgaagaggaaacggcggcggcgcccgggagtcgttgaagccctccgcgctgggggccgccgggaaccattctccccaagcccagaggcaggacttcgcagcaggatggggtggagagcccgcgggagtgacccccacgagagtgaacgcccctcacactcccaccatcgccggctgg

SEQ ID NO: 13610 - DNA, 2300 bp, Homo sapien
acctgagccccctgaggaggcagggacaggcagacgggcctagctggaatgggggcttggggccttatttgggccatctccctaagcaatccccttccttcctgggtgaccttagctgtgggtctgggatctcttccttgggtggtgaaaatgtgaaagctggggactggtgagagggggacccggaagtcaggagcttgggttccctgcctctgcagggaactcccagagccgagtcccccatgagcaggcaggagaaggacgcagagctggatcggaggatagttgccctgcgcaagaagaaccaggccttgctccgcaggtaccaggtgagtgggctgccacagggccaggagaaaccacttggctgccgctccctgtgccccacacgtggtggtctccctgcaggctcagcaatgcgcctctggggctggggccaggggtagggtgggcatggtccctcttagaggcttggtgagggtcctggggatgtgtgatgtggcgcctctgccccctggtgtcccactggtgtctctctgtgtaggcctatcagcatctatgtctctgtgcacctggggggccatggcgtgtgctgacccccagccctcccacaggagatccaggaggaccgtcggcaggcagagcagggggggatggctgtgaccacaccagcactcctccagcctgatggcctcaccgttaccatcagccaggttcccggtgtaagcctcaccctgggagacagggctcgtagcaaggaggtggaggcccagaccatgtcggggaaagacagctgcctctgttcccctctcctactaactattctggggtgcacctgccagctcccaacctcctgcagtcggaccactgctgtccccaccaaagagccacagctgaaagcccccctacccccagtagatgcatcttcatacccttttccagtccacagccctgcgcctatgccacaaagcacaggccactcctaaacctcaagccccaggggctaaaaccctgcaggaagtgggggacagagaagttggggctgaatgccaggagcagtgtctgagggacagagacccattgtttgagtgctctgggtttcccagctcagagatgacgggccactgtggcatcttgggccgctgggtggccctgggccctggataacctcatgccattggcatgtgaacaccctgtgggagtcagctcttctgtggggaatgcagggagggctggggttggaacccaggcctggggaaccaccgagaggacccagcacccaggtcctgcccagcactgcccatgtggcctgagggtctttgttctgcaggaaaagcgggtggttagcaggaactgggcaaggggtacctgtggacccagagtgaccaacgagatgcttgaggatgaggatgctgaggaccacgggggtactttctgcttaggggagctggtggagctggctgtgaccatggagaacaaagcagaggtgagcagggtggtggggagtgcaggcatcggcaggcagcctcttcctccctggctctgctgcactgcccatcttcatcctccccagggcaaacggattgtaagtgaaaagcctaccagagcaaggaaccaaggcatagaggggtcacctggagggcgtgtgacccgaagcccccccacgcaggtggccatcagctcagattctgcacggaaggtgtgtcttcaagaggggatggggacatggatctgaaggtcctcacttgggggaggcagagaagctgagtcagatatgtccctcatttgcggggacgtggccaagggagcacatgcaggagttcctgctcctcctccctttctctggccagtctctactttgggtgggccttgaagtgggagacagtttaagccaaagatgtgatccagccccctcccctatttagccctgctgatggtggcatgggagttggggagggggcaggagggtggagttgactggccaagtgccaggtgtgacctctaggtggcagcagcccctagtccttgcccttgctcacagcttccagggcccctcccactccggcccgtctgcatacccctgcaacacccctgtgggttggtgctacggagatcctccccattttacacgaggaaatgagacacagagaggttaaattacttatgtaaaacacacagctaacaagtggatggaaaccatttccacgggagagctggaacaggcctaatttttagctggagatgtggaaaccttgagagaggaagcgcctggagtctccaaaccccaccccaagcctctt

SEQ ID NO: 13611 - DNA, 2300 bp, Homo sapien
aactgccatggcaagggccctggaggaatgcctggctcaccataccaaagggctagagacccaaacaacagagcctcttggaagcggctgtgctttaaaacatagtcatgtgtctgctaatgacagggctatgttctgagaaatacgttgttaggtggttttgtcattgtgtgaacaccacagagagcacttacacaaacctagatggtacagcctactacacacccaggctatatggtatagctattgctcctaggctacaaacctgtacagcaggttactgtactgcatactgtaggcagctgtaacacagtgctaagtgtttacatatctaaacttagaaaagatatagtaaaaatatggtgtacaagatttaaaatggcacacctgtatagggcacttaccatgaatgaagcctgcaggactggaggttgctctggtgagtcactgagtgagtgatgagtgaatctgaaggcctaggacattaccgtctgctactatagattttataaacactgtacacttacgttagactaaatttatacgaatgattttttggtcaggcatggtggctcatgcctgtcatcctagtactttgggaggccaaggcaggaggatcacttgagcctaggtgttcaagaccagcctgtgcaacatagcaagacgttctctctacaaaaaattttaaaactacctggacatggtggcatgcgcctgttgtccaagctactcaggaggctgaggcagggggatcccttgagcccaggaggttgaggctgcagtgagccatgatcatgtcactgacctctggcttgggtgacagagtgagactgtctcaaaaaatgaaaaattaaaaaatatatatttttgtttcttcagtaataaattaaccttagcttactgtaacctttttactttataaactttttaatttaaaaaaactttttgactctcttggtaataacccttagcttaaaacacaaacaaaacacattgtacagctgtacaaaaatattttctctttatatccttattctataagtttttttgctattttgaaactttttcttttttttaactttttaaacttttttctcaaaatctaacacacacacattagcctaggcctacacagagtcagaatcatcaacatcactgtcttccattccacatattgacccactggaaggtcttcaggggcattaacaggcctgcagctgtcatctcctatgctaacaatgccttctggatttcctcctgaaggacctgcccgaggctgttttacagttcacttttttttgttgttgttgtaagtagaagaaatacactctaaaataatgataaaaagtatagtatagtaaatacataagccagtaacataattgttaattatcattatcaggtattctgtactgtgcacacttgtatgtgccatacttttgtgcggctgtcatgccgtaggtctgtttacacaagcgtcaccataagcacataagtagtgccctgtgctaccatgttataatggctacaatgtcactaagccataggaatttgtagctccattataatcttatgggaccaccatcatatatgtggtccattgttgagtgaaacgtcattatatggtgcatgactgcacagagaagacaatgtccaacctaaaagaatgaatgactattgttgtcattttagggatgtggtagtacttggtagtctaggggaggtgagcttcttgatccctttgaattacttaaaccaaggctgatgaggagaaggagcaggagagggcaggcgcatctgtgtgctgtaggcctttttctactcatgggaggcacagaggcctacgctggctgcccatcttgtctgcaggcaggcccaggctggggtcctgctggggcctaggcagccaggcctcctgtgtaggcttgacccaccagggagaagtccctaccagtctgtctggggacgctggggtggggcagggagaggtgctaggcaggaccagccagctgccagtgccctggtcctcgccctctgagagtggaagggtgggggtggcggcccgacgttcctggctgggagcccagaggagtcttttgtaatcacaacatgatctcgtgtgctgagcagcgaagccggcagggagaggccggcagaggcccggctccggtggctccagctttcctcccactctggctccccaggggctgctctggaattctctcggtgcccgccgttgccatgcactcggctgtgagtggcagtctgcctttggcagggggcttcttgggactgggagg

SEQ ID NO: 13612 - DNA, 2300 bp, Homo sapien
gcctcactactctgcctgactgctgctgtagtgggttctgtgattggcacccactggagctcagaccttgattcccgagatggagaacttaggcctcaagcctggaacccagagcactgggcccccatgcattcctctcagcccctgctttcctcctggggctttgtgaagacacaggcctctctttcagcttcctgccaaaggctggggacagaggtggagaggttgcggtgtcaagatccctgaagggtaaaaggaagcagagtagggcttagagggctggtgagggcggtgagcacagtgagcagtggatgcagttggtaacattcacacagtttgggccggagcctggcaggcaccatacctttgtaaacctcccctgggacttctgcccctccccagtaggccgccctgtcctggttccccatagacccacagcaaatgtgtgcagaagggaccaatagcctcccacctagtcataaaccaaagtcctttgaccaacaatgttagcaaagcaggctggaatttttcagaagagcattcctaaaaggagagattacctaaggtgaagaaagggcccgggctctagactcaaatagtccccagttgggactaactacacacttggtgggcgacctcaagcagatttcttaatgtctctgaacgctggcaatgttttaatctataaaagaggggaagatcataaccattacctccaagagctgatatgagataactgatactgtaagagaaactggcacacaaacactttcctgcccaccgtggagataaaggaggatcactcttttcctcctctccattttccaaattgtatcctgatggtggttacgttactgctctaattgaggggatataaaggtgactaagaaagccaccacaggccgggtgtggtggctcatgcctgtaatcccaacactttgggaggtcgaggtgggtggatcacctgaggttaggagtttgagactagcttggctaacatggtgaaaccctgtctctactaaaaatacaaaagttagccaggagtggtggcgggcgcctgtaattccagctcctcggatggctgaggcaggagaatcacttgaacccaggatgcagaggttgcagtgagctgacatcgtgcgactgcactccagcctgggtgacacagagagactccgtctcagaaagaaaagaaagagagaaagagagagaggaggaggaggaggaggagggaaggagggaaggaaggaagccacaacagcccctgcctctgaggagcacagagtccccactgggatcaagagacatcaggagcaaggatccagggagacaggagagctgagcaagggcactggctctgtctgcaggggactaaggaaggccaccatggctagagcacgccaagcaagaggttgtggcaggcatcagaggccacaggggtcagtggggaccggaccacaaggggctttcggagtgcagagcaagctggcaggctgggctccctccccgcctgcctagatccatcccaaaagttcccttttctgtgtctaatttccattctcaggctagctccctgggctgggcagcacatctgacaattcaggcctggggcttggcgcccagggcaaatattccaccaggtcctccactatggtcactatttattcctccacctgctgaaaggaggtaatcatcctatctatcttgtgggactcattgggttactaatgtgtgtgaagcaccgcatgcctggcctggcattcagtaggaactctacaaatgttcagagccagtccctggtgtaaacagccttgccagtgttggggacttctgcctggattctgtggcatctcgttaccacaccaatctggtaacggcttgttccccagcctccccatcacacacacacacacacacacacacacacacacacacacatcctgctttcaactgtcctttgcccagataaggattagcccatccctcttcattccctcgagccttctgcatctggccctcccagtgcacctgttcaatcccagcccctccctgacctgtacaaatacacctgaggacagacagtgccccagacttcctgcccctgctctgcactctcaggtagggacctggctctacttgctgttggctggggacagtagggtctctgtggggtatgttgtgtgtgcatgtggtcagggtctctctgggtgtgtatatgcattgaattggtatccgtgcttccgtgtctctgcatgagggtgtgtgtctgtccatttgcactgtccccactcctgggctgg

SEQ ID NO: 13613 - DNA, 2300 bp, Homo sapien
gcatgtggtcagggtctctctgggtgtgtatatgcattgaattggtatccgtgcttccgtgtctctgcatgagggtgtgtgtctgtccatttgcactgtccccactcctgggctgggcccctacacttccactgtcttcttcagttatgatttatagcctttgccatgccaggcagcagggcttagctgagagtggaagaaattgcatgaggtcccttccagagctgccaactcctgtccctcaaacacctgggcctgaactggggagatacattctgaggattgtcttttctctttcgtcttacccgatcctgactggccctgaggttttctttacctctcctccccgcaaagcccagccccataggtctcttccagctttatcactcactaagggaaaggacgagggagcacgaaggaccatgggtatagttcacaggctgacctcagctgaacactttgagtacaagtagaggccagtgaaaatgggtagctcaagaggtgcagggggccgggtgcagtggctcatgcctgaaatccagcactttgggaggctaaggtgagaggatcacttgagcctaggctacatagtgagaccttgtctctacaaaacaatttttttttttgagacagagtcttactctgtcacccaggctggagtgcagtgctgcaatctcggctcactgcagcctctgcctcccgggttcaagcgattcttctgtctcagcctcccaagtagctgggactacaggttcccgccaccatgcccagctaatttttgtatttttagtagagacggggtttcaccatattggacaggctggtctcgaactcctgacctcaaatgatccacccatctaggcctcccaaagtgctgggattacaggcatgagccgctgtgcccagccaaaaaaaatttttttaattagctgggtgtggtggcacatacctatagtcccagctactccagaggttaaggtgggaggattgcttgaaccctggaggtcgaggcttcagtgagctgtgatcacgccactgcactccagcctgtatgacaaagtgagactgtctcaaaaaaacttttaaagaggcactaaggctccctagaaaaaaaagaggttcagggggctgtgtcttgcaagaggctagggttgttgtattgggggcgctgtttgtttttgtatgctcagcaaacttgtaagtaccagaaagccctgatgtcaagtatttgctcctgacgtcacatactacactcccatttgagggttgaaaaaaaatgaatgtactgtatgttcactgggcccattctggggttgtccattgtgacttgccagccccaagcaagacatggccagccttggcaccacgttacctcagcagctccatctcatgacagcacggcttgttggtgaatgacaagttggctcagactccaagctcccacccccttccaatcctggtgggaggagacaggtacaagcagctaggaccccatggaaggctttccattcacttgagccccagggcaaaaatccattcacttgtgccctcaggggccaccaaccccattcctgtcctagcaaaccatccttcccgtccctgcactgggcacactgatagctccaagcttcctgctcccatgccatgccagatgtttacacaagacaagagtctgtagggacaagcataccatgacctggcacagggcagacacacaacatgaataattagcaaatgaacggatattgaaatcttcccaagaggaatcggattaacacacaattgttgagtctaggggggcaagtgtaagagtatggggtgtaggggctggtacatggtgctgttgtgtctccatctacccaccatgtaggtgaacccgctgtgtccatttaacccccatgcctggcacctacagtgccagctctatattggggccaagctaagccggagggagcagttttttccctttcttcctttgaagggtgtgtgtgtgtgtgtgtgtgtgtgtgtgtgtgtgtgcgcgcgcgcgcgcatccgtgggagggagaaaggaaagactgcaatttagattacagtaaattaaaagttaccttttgaacacaggtattccctgctcttactccaaaaagatggacccaggtaagcactgtggctgagaggctgggaattggaagaagggagagagcaggagagcggtaaaggcagggactatcagtcagccataactagtgcgtgccaaaaatgtacgtgcgtgtgtgtttgtatgaaggcagtggtaggggtccacaatgaagacaagc

SEQ ID NO: 13614 - DNA, 2300 bp, Homo sapien
catggcccagggccctgcgggccacccccccaccatggtccagggccctgcgggccaccccctggccatggcccagggccctgcgggccacccccccaccatggtccagggccctgcgggcctccccctggccatggcccaggtcacccaccccctggtccacatcactgaggaagtagaagaaaacaggacacaagatggcaagcctgagagaattgcccagctgacctggaatgaggcctaaaccacaatcttctcttcctaataaacagcctcctagaggccacattctattctttaaagagcctgtcttccttcatatccaacctggctgtcagaggacccagttgtctccaagctccctagttgtgaagatggggcaaccatcctggcattctcagaagcttaatgccatggtgctcactataaatggctgtgtaaggtcacctctcctttccttttcactcctgtgccctcccatcgaggaacttcaagtgtggcctcattacctctatgccatcctgtacatccagatctggtgggccttccaaggttgcagcttgcatgcctcactctacagaccagaagcctccctccaatccagatggtttctcaccattcccttaaaatacactgaactttccagcccccttacctttgtttgcacaggtaaggaagaatgcccccaccccaggtcaggaaggccttccctctctcctacctccacatttcaaagcccaccctttcttccaagccagctgaagccccaccatctccaagaagccttctctaaggcctattaggaagaaagaggtccttcctttttgcatactgtccccttctcaaccacctcatgggcctcaccatatcttgcctattggcagcaatttatgggctggccctttatctctccaaccaaactataagctattcagggcagacccaacacttctacacctctagattcttccaccccatttcttatgacctgtgtcttacacggactggcattggcacacattttagggatacctatagtccaagtgttcctgactctctcctcagccccatgtcttcaaccaaggcctctccctgcacaagtaaccaggccctgaacagcctgcttgctgtaaaaccctttctgcctagtcaaatcccacatccaggatcctctccactcccagccccccaggcttctcacactgccaatatctattctagttctagaccccttagccaggcctgtccacagtccatcatacccaaatgtgctctactcacagctactccctggtgggggaggtggcactggagtcagtggctattgggcacctcccagtgccctggagtcagtggctattgggcacctcccaggctgaggtggggtgggggggcagcggtgactataaaaaaggatctgggatcactcaatatacccttataacaaacctgcacatgtgcccctgaatcaaaaattaaccttagcttactgtgatttgtttgctttataaaccttttaaattttaaaaaagaaagagaaggagctggggatgatctgagcgcctctcttcttcccccacctccttcaccagactgcgcacttgagtaacggagtcagggctccgcatctaaggggtgcacacccaggtccaagtcgaagtccagaaggatgggaagaaagacccaacctgatgcctcgccccactggggaggggaggagggcgctgagcgagccgggaacctcgcaggcctgaagccgcccgcctcgacccggggcgtccagcgtggtgaagtgcgggcgtggagctcgccctctatccggctggaagggtctgcgttttgatttgtgaggatctctgcatgtgtcgcgctctctggttccttacgggaaggccgaggccgctaggaagggttgcacggccggactcctaacagcggctctctggcctggcgggagcagaggggcgctcacatccgcagccccgggatcttagagacagagcgctccgctccggcagcggcgccgcgcccattggctgggctcctcctcgccccgcccagcgaccggcccgctcagagcctacgcatgcgcacgagcaccccgccgccgctgccgccgccaccgccgccgccgccgccgccgccgcggcttcagcaccagcgcccggacagcggtgccgcccacgggcatggacggtgacagcagcagcagcagcggcggcagcggtccggctcccggcccgggtccggaaggggagcaacggcccgagggggagcccttggccccagacggcggctcc

SEQ ID NO: 13615 - DNA, 2300 bp, Homo sapien
gattacaggtgtgagccactgtgcctggccatttttttgtatttttagcagagacggggtttcatcatgttggccaggctggtctcgaactcctaaatatcaagattttaagtacattcatatgtcaacaactcccaagggtgtatctccaatccaggctctcttctgggctcagggcctgtatttccaattgcctacttgaccactccaccggaatgcctcaaagatatgtcgaggttttccacgttcaaaacccaactctcaatctcccccagcagaaaatagtgactctatccacacaattattcaagcccaattattcgaaaagaaaaaggactgggcgtggtggctcacgcctgtaatcccagtactttgggaggccgaagcgagcagatcacctgaggtcaggagtttgagaccagtctggccaacatggtgaaaccccgtctctactaaaaatataaaaaattagccaagcgtggtggtggcactgtagacccagctactcgggagactgaggcaggagaatcgctttaactcaggaggcggaggttgcagtgagccgagatcgtgccactgcactccagcctgggcaacagagtgagactccgtctccaaaaaaaaaaagaaagaaaagaatatatatataaagtatatataaattgagccaggtacagtggctcatgcctgtaattccaacactttgggaggctgaagtgggaggatcatttgaggccaggggtttaagaccagcctgggcatcatagcaggaccccatctctacaaaaattagctgggtctggtggcaggcacctttagtcttagctactcaggaggccgaggtgggaggatctcctgagcccaggagttcaaggttgcagtgaactatgattgcactccagcctgggcaacagagtgagaccctgtctcaaaaaataataataaaataaaataaaatataaattggatgacactctcctgctataatacttcagtggctttccattacttttagataaaatctaatctctataccttggcctgtaaaatctgtcttttgactgcttatttctccagctttatctgtaccactctcttcctatctttctgtgcctatagaagaacccatttctgccttgggactttgcattttcccctttccccaatgaaattaactccctctccttccttaatcaaacatcatctcagagaggtcttccctgagcccccaatataatctaagtttccctgcttttctatcttatacgattttgtactttttcttcatagtgtgtgtgttttggtttgatttttgagatcacgctctgtcacccagggtgaagtgcagtggcgcgatctccgctcactgcaacctctgccccgcccagggtcacataattcccccacctcagcctccagggtagctgggactacaggagcatgccacgacacctggctaatttctgtattttttgtagagacggggttgcaccatgtcgcccagggtggtctcaaactcctggactcaagcaattcacccgcctccacctcccaaagtgctataattacagctgtgagccactgtgcccagccttcttcacaatttcaccacaatccgtaaatatatatttatttatgtgattatttgttcactgtctgttttctaagttgtaaactccaggagggcagagccaaggtcaatcttgatatttgccctccctcactcccttccacccactgagaacactgttgggtaatcagcaggtactcaataaatgccagatgaaatgaatgagctagtgcatttagtaatggaagctaccctgtttattgggagtagctttgaatcactactgaaaatctggataagtgctattaaaattaggacctcaggtaggtgcctcaggtatctcagcccataggtccttttcttcaagcctcacctgccactctccacctgtaacgtgtagttttcatccaaataacctgtgctcctggcaatatccctaacaatcccaaactaaataaagaggattgtgacatggaccctaaatgtcgccacgtttgcgtctccatcccggaatatgacgctggtagctcattagctccattcaagcctacaaattgcatcaccctcctcctctgcccagacctgggggctccaacacctttcgctaggtctggctctggcctctgagcgaaccttccgtacagtatggcggctcccgaagccccgcccctggacagagttttccgtacaacatggctgtctacagagtgcgattcccacccacttccgc

SEQ ID NO: 13616 - DNA, 2300 bp, Homo sapien
acctgatttaaaaaaaaaaaaaagcggccgggcgcggtggctcacgcctgtaatcccagcactttgggaggccaaagtgggcggatcacgaggtcaggagatcaagatcatcctggctaacacggtgaaaccccgtctctactaaaagtacaaaaaattagccaggcgtggtggcaggcgcctgtagtcccaactactcgggagactgatgcaggagaatggtgtgaacccgggaggcggagctggcagtgagccgagatggcgccactgcactccagcctgggcgacagagtgagactccgtcttaaacaacaacaacaacaaaaaagcagtgctatgatcgggtgttaacttctcagtagtacttcaaattatggtgagggggtgagttagaagctgaggaatgggtgcagggaagttggatgtggtatgaatgatctaaaaatgagagcaatgtgccaagtactgtgctgaatcattaagtatgcaatctcttttattcctcatagtagccttaaagttggttggtatcattttcgttttaaagatgatgaaacagtgactgaaaagatctaagaaacttgccgaaagtcccacagctatgtagtgggattgcatagactcctggactcagggtaccaacctgagatgagttgttcaagagcattgacttggctgggttccgtggctcatgcctgtaatcctagcactttgggaggccaagacaggaggatcacatgagcccaggagttcaagatcagcttgggcaacatagtgagactgcccacccccaccccggccccatctctaattaattaattaaattttaaaaataacattgacacaacatggaggaggaaaatagagcaagtggagaggggatagagacttaattccatcagctcccctctttcccctcaccactcttcctttccctgtgtcccgaacccgtgtttctaagtcctgactgctattattctggtgtattaaatacatactatttactatttaatacatcttttgttgttgtttgttttctcaaattttttgtggagacagggtctccctatgttgcacaggatggtcttggactcctggcctcgagcgatcttcccacctaagctcccaaagtcctaggattacaggcatgagcaaccatgcccagcctatttaatacatcttatttaatatatagtataatacgtaaatatgtactatttaatatttaacacatattaaatacaaatggtccccaacttacaatagttcaacttaagatttttcaactttatgatggtgtgaaagtgatagacattgaatagaaactgtacaatattcaataaatgatatctaacactgtcttataaaatatgctttgtgttacatgattgtgccgttataagctattataagtgttccaagtacgtttaaggtccactagtctaagctatgatgtttggtaggttaggtgtttttttgttttctgttttgagacggagtgtcactcttgttgcccaggctggagtgcaatggcgtgatctcagctcaccgcaacctccacctcccgggttcaagcgattctcctgcctcaacctcctgagtagctgggattacaggcatgcaccaccacgcccagctaatttttgtatttgtagtagagacaggatttctccatgttggccaggctggtctaaaactctccgcctcaggtgactcacccgcctcggcctcccaaagtgctgggattacaggtgtgagccatcatgcccggcctaagtgtattttcaaagtgcatttttgacttacaatattttccatttatgatgggtttatcgagaagtaaccccactgtaaatcgaggcgcatctccaatctagaaggcagctactccttaataacccctttcccataaaacatgaatctaaatctacaaaccttgttatataataaagcaagatgtactctgttatgatcagtgtgcacgttagagcaagcactacttttccgatcttaattattccagagatgcttgaccaatttactgggtacgtgggcagttttctgattgctgtttccacactctgctttcccacagagagatttccgcagttaggggctgctatttcaacgcagggagataaaaagaaaaaaacacttgctcttctaccccgctaaaaacactcatcctagggagcacgccagcatttgcagcgttcggggcagggccactcggcctgcggccgttgcactggctggaagctggcaggcgatcacggttgattggctcgggtgcggtccaa

SEQ ID NO: 13617 - DNA, 2300 bp, Homo sapien
gcaaatagccaacatcctgcccttaggaaatcactacatcctgaatggcaacaagttctggatcactaatggccctgatgctgacgtcctgattgtctatgccaagacagatctggctgctgtgccagcttctcggggcatcacagccttcattgtggagaaggtgagtataggtgggtgcagggccaggaggcttctgcctcctgacagtggtaccagagatagcccgttcactgatctcaaatggaatcagtgttgtgtgctctgcaaggcccccagaggtgggggtgaggcagagagcagactgcaaggagggtgaccaaaagtccaggaagtccagggcagatgggtcacttctgaagacggtggagccgtcctcagcgccaggccacacaaagaggtctagaaaggggaggactaaaaggaggtcaggacatgacggtcagggtaccattggtggatctgatgaatgtggccatgggagactgaggtgtgggtgggatgcaagtggagactgcccctgcaacagccttgacaacagaagcaagaaggaagcagagcaggagttccaatgaaaagttaggagtttgggtttgtttttagaaatgagagaactgagcagattttttggtcagaaggaaaaaaaagggaagaaaaaagaaaatagagggagaaattgaaaagtgtgggaatgagtgggcagaacacaatggtgagctggggcagaagagagaaggatgggttacaggtgatggtgcaggaaccacttgcctaacgatcatgaggaggaagccaggggccctgtgaaggctggggccacgagtgggggagttggcaagagtttcatgagcgagtattgtaaaggtttgcggtaccctccatagagagggggaaagtagctgtctagggttggagcagtagggacctggctgagattggaaatctcaaggttgcgtgatgccaccctcattacaggctgaaggcagcatgtgccagcactttgctggtcacttgccaaaacatgctgcaacccagtagtccaggtcaaagtacagagggctcagttcagccctagtgggatccctttgggtacagacaggagaacaacagaggataagggaattgaccgggctggtgacagtgtcttggaagtaatgtcccctgggggagggaaataaggccaggggggtcgggagggctcagggaactgagcatatcattgagaaagaagtgtccccatgagaactggggagaacacaagctagtggcagaggaggctgggatcaatctggggcgttagcaccggaaggtcccggggggagcatgggactaggatgctgccatgctgtgcaggtacagggactcaataggaaggtgagtgccttcttcccagaggcctttcctttaccaggcccccttggggctaatctgtaaccaggaccaccttttgtttcctgtaaagggtatgcctggctttagcacctctaagaagctggacaagctggggatgaggggctctaacacctgtgagctaatctttgaagactgcaagattcctggtaagtagcaccgggaatcggggagcccctctcctgacccccttccaggctgatctggctgttctcaagttgagaaagcctctgggttagagaggcttggcattgttagcgcttcagtgacatgtggctaggctgtgagctggggctgctggacagcgctccttcctggccagggccctgcagcggcatgcctaactggcatcacacactccgcatagggtctgtactcagtagccggaggagaagggtcagacctaccctttcccattgatgtccttcagtcttcctgtactttcgcccatccactgcatgtgagtaactcattaactcacgtttttgtaaaatattttaaaaatgagttattcatttttagcattaatgatgctaagaaaaaaaaacaaaacatctgaatccactgatggaatcccgactcagtagagagaaggcagttctgcttgagtatgagtattttctcccctgaggtgtaactgaaatctgacatggtggagcactgtgggagagccagcacagccatcatgtactaaccagaccaggggcatggatttgttgtttggggtttttttttgttttttttgtttgtttgtttgtttgtttgttttgagaaggagtcttggctctgtcacccaggctagagtgcagtggcgtgatctcagctcacggcagcctccacctcctgggttccagtgattctcctgcctcagcctcccgagtagctgggat

SEQ ID NO: 13618 - DNA, 2300 bp, Homo sapien
ccgagtgcttttgctgacatgtactcttcaactgggctaaagttttctttgaaaagagaggaagtgaggtgggcaccgtggatggttactgtctcctctagcaaattgagcttgactgcttggaatgcagtcttcctcagcatgcagcctgactctggaagtcatcaggaagttcaccacattgccacctcgattcctgtgtgaggtggatgaactagacattgtaaggttggagagcaaagcgtgcaagttgtgggggcagaagggaaagaggttgctatttgtagttagaccttctggtccgaagaagctgctggaaggtaataagcattggagtaaatggtgccttgggagccatgcctttcggaggcagtgatggccacttcggggtgtcatgcgggctgtggaacagccactctgtggccctaactcccacacctgcccccatctccatcatcctgagtaaatcccatctcctctccatgcccctgcttcctcatccttggctgtcttgttgccattgctgacctgcttttggtaactgagagagtgttccagcatgttgacctgtgacatccctttgtgcccagttgatgcaggggaagatggctgacatgtacacccgcctcatggcgtgtcggcagtatgtctacaatgtcgccaaggcctgcgatgagggccattgcactgctaaggtgagggccagcctcagtcggggagaggcgggggcagtggaccagctgctgagacttgctgtctgcgtgcctcgcagggccctgctgaccccagcttcctcccgtaggactgtgcaggtgtgattctttactcagctgagtgtgccacacaggtagccctggacggcattcagtgttttggtgagtgatccccacttcccagtcccggggctccctcactcctggggcctgtggctgcttcagaaagcagtttcagggcgggcgtggtggctcacacctataatcccagcactttgggaggccgaggtaggcagatcacctgaggtcaggagttcaagaccagcctggccaacatggtgaaaccgcatgccgggcatgatggtgcatgcctgtaatcccagctacttgggaggctgaggcaggagaatcgcttgaacccgggaggcagaggttgcagtgaacaaagattgcaccattgcactccagcctaggtgacagagcgagaggctgtctcaaaaaaaagcaatttcctctccacttctccactcctcactatgtgcttatgctaggcccagctgagctgggaccttcgggctctttctgtcccagttacaaggaggaaatggaaagcaaatgagaaaactgctagatgccaggagttgctgctgccttcggcaacacccccctctcatcctccccgcctcatagatgctaggaaatgggaaagggagatgtggctgggcacagtggctcacacctgtaattccaacactttaggagactgaggccagtgaatcacctgagatcaggagtttgagaccagcctggccaacatggtgaaaccctgtttctactaaaaatacaaaaaaaaattagccaagtgtggtggcaggagcctgtaatcccagctatttggaaggctgaggctggagaatctcttgaacccaggaggcggaggttgcagtgaccggagatcgcgccattgcactccagcctgagtgacaagagtgaaactccgtctcggaaaaaaaaaaaaaaaaaaaggccgggcacggtggctcacacctgtaatcccagcactttgggaggccgaggcaggtggatcacctgaggtcaggagttcgagaccagcctgaccaacgtggtgaaaccccatctctactaaaaatacaaaaattagctgggtgcagtggtgcgcgcctgtaatcccagctactcaggaggctgaggcaggagaatcacttgaaccttggatgcggaggttgcagagagccaatatcatgccactgcactccagcctaggccacagagcatgactccaaaaaaaaaaaaaaaaaagctaaatggaaatttctagaaatagttcataagtttcaaatccacaccatcctgaatagcttgaagtgttgtgccatgctgctctgtcatgtttggtacgtgaatcgtccctttgtgcagcctatctatgctatgtgggctacctgcccgttagtagtcacctagggtatccaatcagctgtcctgatatcagagtgcctgtgttcaagtaactcttattttgctcagtggccccagattgcaagagtagtgatgctggcatgtcat

SEQ ID NO: 13619 - DNA, 2300 bp, Homo sapien
ggggttgggacaggggctgccccacttccaggaaagaaggtgggacctgggcaggggctggagggaggagaaagtggtcactgccaccactgcagggactgcactgccgttggggtgccctgcctggtgccaggtggttggatctcaggccaggcggtcttcggggactgcagcgggcagtggcggggaggtgctggggctgggctggagatgaccgagcagccagtctgtcccggctgtcagtctggttgtgtgtggtgggggaagggtgcgccgcgtggtctctctggccctggatgttttactctagggcatctccctctgaggcagttaacccttcccgatgggtctggaggtgtctggggagagagagcccctgcctggcagcagcccgggaaagactccggagacccgatggacccattcctctttctacaccaagtgccaaacccttttttcagtgggagacctctgggctgccaaacataccagggagaggaaaggtgatgggccccaggcgttggcacagctgcccagtgaagtggggtggaggcagcattcactcaggaaaggttacaggaccgaaggaaggaggaagaggtggagccctttccagctgtggaagggctttggactgggaaagaaggaggcccagttgcagaggtccctgaaagttgggtgaaggaggctaggagaggccaaaagttccctttgggggacaggcagggtgtagcccctgcctattctttgctggcttgttttaacaagcaatagggaggaaggggggacagaggtggctcagtgagctggcacaggaggaacacttagtgcctttagccagcccgtgtccccgcaccatagcccactcagtcagagcctcctggggcagcggacaccgccacccacactggaggctctgaggggagaactcctccagcggccaggcaggcacttggtgggctgtcatgactactctgcctcctctccggttggtattccttcctttccctcccactgagaccccagataagacaacactcccctgctcaccccagggccctctaatgccaacaccaggaagacacccaatcctgccacctcgtcctgctgccatttcctcggctgaacgtgggcttcctgccacttaggtctccttccctgccaccaggtacattcctcttctggccctcccggcctccatccctgcccattatcaggcctgaagtggctgccaaggtcagcgccgcctgggctgcagacaggagcccggcctctcttctgtcttggcctgtagcatggctctgcccccgtggccaccactgctgtaccctccaccaccaatctctgacgagtgggggccaccgtggggttaatttgcctatgggccagactgggacagggagagggggaattctgtgaggtggggagtagggctggcctggtgtgtgttgggggggcgctgccgggaacctctgtcctgtccaggaaggggagaaatctttcagcgtcctacttttacagctttggggttttgctttccccaagggtgggaggtgggagaagtggcagtgggagaacctggaccttcgagacatttccgtgccacagttttagcttttagcttccattcacacactttccctgctgagggggcccctcctttaagtgtgtccccccaaacagctaagacagtctgggccccctggacagctctggaggcagatggggaactgcttctgggggaggttgtttcccagccatattggctagcagccctgattgtcttaaaaggctgcctgggtgagcgctggagtcccaaggtctaggaaaggctgggcgctgtgtgtggtgcaggaggagcccctccgaagcccctgggccacactccaaggctgggttttccttgcttgcctgggcagcctcagcactctgggtgcctctctctgcccaaggcgttcctggggcccagcccctccctgggctgctccagcgctctggtgacttgacactaccctttctgccgctgctccttttacctcctaaagctcccctcccccgcctgaattgggaatgaggctttgttcaggggtgaactcagcatttctcgagaacctactgtgtgcatatcccgggcttagtgaagtcctaggcgggctctggcaccaccaggtgcccaagacacagctccttcccgcacctaacagggacttcccatctctctctgtgcccttagcctgctgtgcccacccaccccactgaccccgcgagcgtgctcgggcttgggagggcacgtctgtggg

SEQ ID NO: 13620 - DNA, 2300 bp, Homo sapien
gagaaatctttcagcgtcctacttttacagctttggggttttgctttccccaagggtgggaggtgggagaagtggcagtgggagaacctggaccttcgagacatttccgtgccacagttttagcttttagcttccattcacacactttccctgctgagggggcccctcctttaagtgtgtccccccaaacagctaagacagtctgggccccctggacagctctggaggcagatggggaactgcttctgggggaggttgtttcccagccatattggctagcagccctgattgtcttaaaaggctgcctgggtgagcgctggagtcccaaggtctaggaaaggctgggcgctgtgtgtggtgcaggaggagcccctccgaagcccctgggccacactccaaggctgggttttccttgcttgcctgggcagcctcagcactctgggtgcctctctctgcccaaggcgttcctggggcccagcccctccctgggctgctccagcgctctggtgacttgacactaccctttctgccgctgctccttttacctcctaaagctcccctcccccgcctgaattgggaatgaggctttgttcaggggtgaactcagcatttctcgagaacctactgtgtgcatatcccgggcttagtgaagtcctaggcgggctctggcaccaccaggtgcccaagacacagctccttcccgcacctaacagggacttcccatctctctctgtgcccttagcctgctgtgcccacccaccccactgaccccgcgagcgtgctcgggcttgggagggcacgtctgtgggggtgagagacggagccacagcatttggtgactagggggaagccaggtaagtgtctacacttggttctcccgtagcttggggacgcgagggagggagtccagccgctcctgtcaggctgcccgcccctttctccctcccccggagagctctgatgttccccgcggtggtggaagagggtgtgtgggtgtcaaggactcacagaccaggctctgctgtcagctggaaatggatgagggctccacactctgcttctgaagagggtgaattaggagctggggttgggggcggtaggtgaagggcagaaagaggaaaaagagatgcgggtgaggggttaccgagccaggaccgaccttgctggaaaggaaaggagacgtggcaggcagggaagtcggaaagatgaggcaagggcgggaggggcttctcagcagtcggggcccttttgcaggagtctggggccctttctgcaggaaaggggggttgttctcgcttgattttcggctggtcttcctgaagctttgccctgggggcagcagcctccggcgaggatggggtgttcctcggcccgcagttttctccagcgcgtgctggggaggatttgggggaaaggggatgcggaggggtgatggccagggcggggggagataagatttttccgggggggctagcagctgggagattggggtcgagtcaccgtgggatacgggctcaggttctgaagacgaagagaaaaatccaagaagccggcaaagaaaatcaccccttgccaccacccttggcacggcacccctcccccaaggccccaccactccccgcaccgcctcccccggccgcctcgtgctgccccctgcgttgggacgaccgacccacggttctgattggtcagagaccgggagggggagccgagggccggattggctggcggagccagcgcagggcggggcggctgattggcggagctggccgaggggcgcgctgctgattggctggggacgaggaagcaggaaggagggcggcggaggctccgctctcggggagtttgtgggggaaccgcgagcggcgtagcggatcccggagcccggcccccgccgcccgcccgtccggctgcctgccccgcccgtccggcccccgccgtccgcccgccccggccaggcgcgcccgccccccccgacggccccgcccggccgcggtccccgctccgcccgcccggccccggcccccaggaggaggcgctgacgcagcagcgtggagcccgggaattgagcgcccccggggggttccagccgccggattccagcccggccggggcctgcgggcgcccagagccgcgccgtccgcgccgcccgttctggtgagtcaggggccggggtcgaggagggggaaggggcgagctggagggagggagcgagcgaggtaggcagaagagcgaagggggagagcaccggccgcccgtcagcgcgccccaccgagcgcgccgcgccaccgcccccgcca

SEQ ID NO: 13621 - DNA, 2300 bp, Homo sapien
cttgcagctggtgcttcttgcttgctgaggaaggccacatcatggggccaagggtctgcggccagctgacccctgcttcagcccagccctggtcccagcctggaagcctcagtgttgaccatgttccaggtggggcagctctaaggccatagaggttcctgggagccacagcacccccccgccccgcctccacttctgcattttgctaaggcatggtgcatgtgggcaggaacattttttcagaatttattggtggcacagacaccaccatggatttttctagctctgccttcagtgtggtgtccacaagactcccttgaggcgagtggtagcttgtccttatcttacagacaagaaattggtatggagataagtaccaggcccaaggactccccctgcctcaccctgactgctaacacagaaaactaccctgtaacacagaagggagcacatgtggccacattatcaaaagatttttaaaggtctaaggcctttttttcctctcctggtttaaaggacatacttactggaaaatatgattttaatagaaaatcctatcaccagaaatgtatacctttaggattattggaagcaaggagcagtgtagacaaggcagaaccttcacgcaaacttctggtgcagcaaatggacaggtggtagcctgcagatgcactggggcaatcagatgtggagagcctgccctggagagctggaaggctgcaaggctttaccgttccttcccctggctcatctgtgtgcttttcctgttgctgggattgtggggtcatcagtgagccctctagtatcacctcatccctcaagtcccctcacccttctgaattcatctgatcactggtagctccattctcccactggtatcttctattttccatcacctgctctgtacagtccgccctcgagtcagctgcttcctcccttctagccattccatgatatgctcctttaatctctgaagggccgtgattagaaatttaggttttagactcagaaccacccatactgagtcacatcttccctgagcctctgttacttcagctgtacaaagggaatgtccacactagctccctgccagggtggctgtaacaactaaaggagataatgaatataaaacacttagtgggcgctgtcctcagtacacttgggctctaatcatattcctctgctgcttcagaggcttgctggctctctgcaggcagcaagcacatagctggaccaagtctggctactgagccaggttcccagtgggaaatggtggttgctgacatccaaagcacttcgggtctgctgtccgcccaagtgaccagcctggtgccatggagcacacatctagctccaggcaaggagactacgtgctgtttccctgctgttttgtgcccccagctcctcacccttccaaatgtgtgttggccacaccagcagctgatggaccaatgtgtcagaccctccccagagtgcccagttatcccactgcctcatgaggagaaggcagaggaggggagactccatttccagacatttcagcattacccagtggacaagcactgtagtcagtccccaggtattgctaaacacaagggtcaccatggagactggtcagtgtctgacagttctgcttctccttcctggagtggccacgacctgcaggacggagggagttaagggtggcaagggggagcacaccgagggctccgcttccagctggaaagaccagcctccggcacgtctggactcggagagagcgctgcccgcctccctgcctccagacccgttgctggaggaagggctaggacaggcctgagtttgtggcgaatcccccttgtccacttccctgaggacacacgctgcaggagagcagcctcgagtcttttctgccttcgaggtctcaggagcttttgtccccaagcccagaggacaggggtggccctgactcaggcgccctcttccgggtaggggtccgcgtgcgccctcccaagcccgcgccccgcaggggcgcccgcccctctccccgcccccggcgtgggcccgcccccgcgcctgtgtcactgcgaggccgggggtggagagcggccgggcgggacatccggcccgggtccctcgccgcgcccgccgcccgccgcccgcttcggcgccgcagcccgggagccggccacccctacacgcgccagggctgtcccctgccctcccctccccaactacccccggtcccagaccctcctcccgcccccagcccgagcccgccttccaggccgccctcggatcggccgggcccgcgcaggccc

SEQ ID NO: 13622 - DNA, 2300 bp, Homo sapien
ccaggttggccagactggtctccaactaaatgttctcacatacttttttttttctttttctggtgagacagggtccctatctgccacccagactagagtgcagtggcgcaatcacggctcactgcagcctcgacctcctgggcttaagcgatactcccatctaagccacccgagtagttgggattacagacgcacgccaccatctggttaatttttgtggagacaggggtctctccacgttgaccacgctggtctcgaactcctgccctcaggtgatcctcccgcctaggcctcccacatcgctgggattccaggtacgaaccccgtgggcgcctccatcttctaatttgtggctgagccagatgaagattcagggaaaaaagggacttccggttttaaaatggcggcttgacttccccgcccccccaggaagccaaaaacaaatatgcagccccgagattttccccagcaacaatctggagctcagatttgaggatgagacagatcccgggggcacggagaagtgaaaatcttccgagcaggcgataagaaaatcgggttttcacatccgccacgcccctccccatcactgagccccacaccaagcgcggggaaactttccctccgcgcgcggattccgtggtgagaaaagtgaggcccaagtgtcaaccaagtttcccaccatgttgggtttcctggcaggaggcgcgtccttgcctcagccatggaaaacgtggtgcctgctgaggggagccacatccccaggactagcagagacaaaggggacggtgggcggaccaccatccccagccctggaaactgctctgtagccaatcagagcaggtactcagcagcaccgaactggaggaggtgcttgggcgccaagcgctaggaggccttccccccaggtagacggagggggtgggtaccggagcatttattgtattactgttcgaactgtgcgtttattttatgtgtactccttgaattttttttttttttccccaaaagttaggttttcggccgggcacggtgactcacgcctataatcccagcactttgggaggctgaggcgggcagatcacttgaggacaggagttggagaccagtctggccaacctggtgcaaccccgtctctactaaaaatacaaaaattcgctgggcaccatggctcacgcctgtaatccttgcacttttactttgggaggccaaggctagcggattgtttgagtccaggactacaaagaccagcttgggcaacatggcgaaaccccgtctctaccaaaaaaaaaaaaaaaaaaattaaattaaaaaaaaaaatcccaacaacaacccaaaactaaaaattagccaggtgtggctgcccacacctgtggtcccagctactcgggaggagggaggattatttgggcccgcaaggcggagagtgcagtgagctgagatcatgtcactgcattccagcctgggtgacagtgtgacctcgtctacaaaaaaaaattgttggccgggcgcggtggctcacacgtgcaatcccagcactttgggaggccgaggcgggcagatcacaaggtcaggagatcgagaccatcctggctaacacggtgaaaactcgtctctactaaaaatataaaaaattagctgggcgcggtggcgggcacctgtactcccagctactcgggagactgaggcaggagaatggcgtgaacccggcaggcagagcttgaagtgagccgagatcgcgccactgcgctccagcctgggcgacagagcgagactccgtctaaaaaaaaaaaaaaattgtttttgtagaggtgagttctcgctatgttgttcgggctggtctcgaactcctgggctcaagctatactcccatctcaacctcccgagtagctgggattacagacgcgcgccaccgtctgactaatttttgtattttttgtagagatggggtgtgaggtgggggggtggaggctggtctcgaacttctgcccttaggcgatcctcccgcctgggcatcccacatcgctgggattccaggcatgaactcagtgggcgcctccgtcttctaacttctggctgagccagaagatgattgagggagaaggaggacttccggttttaaaatggcggcttgacttccccgccccccagaaagccaaaaacaaatatgcagcccggagattttcctcagcgagaatccgaagctcagatttgaggatgagacagatcctgggaccacggagaagtgaaaatcttccgagcaggcggtaggaaaactgggctttcacatctgccaagcc

SEQ ID NO: 13623 - DNA, 2300 bp, Homo sapien
atcatggtggaaggcaaagcggacctagtgtgtcacatggcaagagagggaccaagcaagagagagagagaggaggtgccaggctcttttaaacaaccagagagagagagagagggagagagagagaaaaagagagaggaggtgccaggctcttttaaacaaccagatctcacgtgaactcagagtgagagctcactcactaccataaggacagtaccaagccattcatgaggcatctgctcccatgacccaaacatctcccattaggcccacctccaacattggaggtcactttttttttttttttttttgagatgtagtttcgctcgttgcccaggctggagtgcaatggcacaatcttggctcactgcgacctctacctcccaggttcaagtagttctcctgcctcagcctcccaagtagctgggattacaggcatgtgccaccacgcctggctcactttttgtatttttagtagagatggggtttcaccatgttggccaggctggtctcgaactcctgacctcaggtgatccacccaccttggtctcccaaaacgctgggattgcaggtgtgagccatcacgcccggcctgaggtcacattttaacacgagatttggaagggacaaagcatcccaaccggctgggcgcagtggctcacacctgtaatcccagcactttgggaggccgaggcaggcagatcacaaggtcaggagatcgagaccatcctggctaacacactgaaaccccgtctctactaaaaacacaaaaaattagccaggcgcagtggcgggtgcctgtagtcccagctactcaggaggctgaggcagaagaatggtgtgaacccgggaggcggagtttgcagtgagccgagatcgcgccactgcactccagcctgggcgatagagcgagactccgtctcaaaaaaaaaaaaaaaaaaaaccatccaaaccatctgatcatccttgcgcaggggccatgctaatctctgtatgttccaattttagtatatgcactgcgggaagagagtactcactttttattttgatacaatttcaaacttacagaaaagttgaatgtacaaggaatttccaaataccttttccccagattcactgacgttaccacattatgtgcatgtgcttgctctctctccctctgctttttctctctgcatataaacgcatttcctaagaataaacacataaccaaccaaagaatagagtttctattatttgtactattttcacaaataaaaagactgaggaaaggtgtgctcttttcctgtgatcctgggccacaatttcaccaggttcaggatgcaaggcccttttctgtattcttcggacctctgtcatctgaaaacaccggcaaaccaccactccagtgatgctgccatgtgttaagcttccccttaagacccctggcagagagtagcatattgtgcaccaaggttgtgtgggaaaaggggctgagatgaagccacccctgcagagcggcagcttctagtgtacgtgtgggtccacagaggtttctgtgaccctggaagcctgtccagctgagctgaccttcaccagggaagagaatctccagacaaaggcacttagctgcctactgggtccccaccgaaagactgctgaaaatatttcttcagaatgctgagcgctgaataccactcagcacgtgctggagccagaggtggttagacacgagtctgtccttggaaatcccaggctcagagccaccattatgcaaagaggactgttgaggggttttcttttacttttcttttcttctcttttttttaatagttttttgagaaatgggatctgtgctaagggctttgggcaggccagctaggaggacggaagaagtttcccattcgcttgtggacaaggcctgcacccatataatcaactccaacccacctccgtcatcaccagggtaacatccctgcccaatctctcctcaggccttctgcattaccagacctggtgtcttcccctccctggatttgagggccctggactctttgcagcctctacctcatgcccaaccaggacaagccttgagcacaggcaaaacagattccacagtctgcatcccatggcaaagaatttcatgtcattccctcctccactcctcccttggtctggccttgccttgagacccagtcctggctccacgcaagctccagggttaatgatggccttgcctctgctactcttcccttcactctcagactcccccaccccctgggctgttacttcttaactttttgatttagagaagttagtct

SEQ ID NO: 13624 - DNA, 2300 bp, Homo sapien
ctcctctcgaccaatcgacgcacagaacatcgtcgggtgggaaggtagttggaggactcctgggctccgtcactaggggactccgcccctcccgatttcctccgggctacaggcgacagagctgagccaagcgtttactgggcagctgttacggtaagtgaggaggggctggggtgcccagcgttttggatctcccactctggcccggccccggaataccacatagaggccttgggacctgattcatcccgtccagacagccctagagacctgagcgactgaggcctgggatctggacgccggaatttcctgcgtggttctggacgccctgccctggggtaaggggccatgcggggctctggtgtgagcaaagttttggttttgggtggctttagacgaattcgggttgggggttcactgtagcgctagacatcagttcacccaggaccgccgtgtcatagctgtcccttttacttccggcctttacgctggctgggctctgtctcctggcattattcagaccttgcctcaggcagccttcctgatttctaagtctcctcttgaaagaaggtgtcagcctgtctcatatgcctagatagttataaaagcctccaggctctttgcgtagcttttcctacctgcccgtgcttgggctgctttcgttatattttccaaacaagcaggatggtatttgataaaaacatggattctggagcagcacagatctggttttcctgtcaaggattccccacatatcagtaatgtgccctagagcaagttacccttctgaacttgttttttcatctgtaaaatggtgaaaatacctacctttcagtgattgtattaaaataagagcatgagacatacggctgaactgcatgcgctgagcacacagcccttgcattgtaacagtactctctgacagacactttttaccaagcaggatcttcatgtatatggaactgtggaaagacctttagtctgtgttctgttgaaaacagaatttaggggccgggcgcggtggctcacgcctgtaatcccagcactttgggaggccgaggcgggcggatcacaagatcaggagatcgagaccaccctggctaaacggtgaaaccccgtctttactaaaaaatgcaaaaaattagccgggcgtggtggcgagtgcctgtagtcccagctatttgggaggctgaggcaggagaatggcgtgaacccgggaggcggaggttgcagtgagccaagttagcgccactgcactccagcctgggcgacagagcgagactctgtctcaaaaaaaaaaaagaaagaaagaaagaaaaaaaaacagaatttaattgactggagatagaactgttgcattttggagatctttggagaaaagtgcaggctggttgtccaacctggaaatgccctacagatttgtgtgtgtgtgtgtgtgtgtgtgtgtgtgttaaaatatatgtagcataaaattgaccattttaactatttttgtgtgtatgattcagtggtgttcacattgttgtgcaaccataactaccatccacctccagaactttttcattttcccaaactgaaactgtgtacccattaaacagtaattccccattctttctacctcccagcccccagctcccaccatcctattttctgtatctatgaatttgactactcaggtaccttatataagtggaatcacagtatctgccttttgtgtatggcttgtaggaattccatttttatttttattttatttatttatttgtgagacagggcctcgcaatgtcacccaggctggagtgcaatggcgtgatcaccactcactgcagcctctatctcctgggctaaggtgatcctcctacctcagcctccggagtagctgggactacaggcatgtgccaccacacctgtctaatttttgtatttttagtagagatgggattttgccatgtttcccaggctggtctcgaactgctggcctcaaatgatctgactgcctcggcttcccaaagtgttgggattacagtcgtgagccactgtgctcaaccttatgctgtattcttaaagccagttcttactcacttgagcttctgttttatagctcagattccaaatgaaaatgtttgagagcgctgactctacagccacaagatctggccaggatctctgggctgaaatttgttcctgtctgccaaatcctgaacaagaagatggtgccaacaatgcattctcagactcctttgtggattcttgccctgaaggtgaaggccagagggaggtggctgactttgctgtccagc

SEQ ID NO: 13625 - DNA, 2300 bp, Homo sapien
aagtacccaatcgacgaataatgccagctatagatgttcagtggctgtggggtgttccctgagcagtctctcagtgagattcagatactgtccctggctgtatagacctaaagcctgactctccactcaccttgaggttctgtgaactatgtaatattctccaatcctgtgctatacaataggatcaccattagccatgtgctgtacaatagccacatgtggctaattaaatttaaattaattaaaattttaacaagttttgaaacaagatctcactcccatcacccaggctggagtgcagtggcacgattttggctcactgcagccttgacttcccaaactgaagtgatcctcccacctcaggctccctagtagctgagacgacagacatgtgccaccatgactggctaattttttgtatttttagtagagacgaggttttgccacattgcctagggtggtctcaaactgggctcaaacaatccatccaccttggcctcccaaagtgttaggattacaggccggatgtggtggcgcaacctccgcctcctgggttcaagtagttctcctacctcagcctcctgagtagctgggattacaggcatgcgcctccacgcccagttaatttttgtatttttagtagaaacagggtttcaccatgttggccaggctggtctcgaactgctgatctcaggtgatccacaccccctcagcctcccaaaattctgggattacaggcatgagccaccaagcccggccaggaactgaattttaaattgtattttagctgggcgcagtggctcacatctgtaatcctaaaactatgttgtttttgttgttgttgttttctttttctttctttctttttttttttgagacggagtcttgctctgtcacccaggctggagtgagaactatttcctcagccaagttacttggctactgatggttggctgatgtctttcatcacgtgtttcttgggagagagtaactggtgttgatcctggaagctggggatggggaggggtcgatctcaatgaacaagctggtatctatcccctgaaggatatcaaaggtcatctcctttaacaactacaacaacaaagcattctgacacacacttcttatgaccactctctcctttatgtactctggccacacttccatcatatactctataatcctcaacgcccccctccttttttttttttgagacagtcttgctctgttgcccaggttggaatgcagtggtgcgatcttgtctcactgcaacctctgccttcccggttcaagcgattctcctgcctgagcctcccgaatagctaggattccaggcatgtgccaccatgctcagctaatttttgtacttttagtagagacagagtttcaccatgtttcacccaggctggtctcgaactcctgacctcaggtgatccacctgcctcggcctcctagagtactgggattacaggcgtgagtcaccgcgcccggctgtctatcactgtttactgttatttgtaaacttttatgcctccatggcggacccccttcctacactactaagctgtaaggatctccaggacttatatcaagtcatatgtgtcttaacttcacgcttaacacaatgcttagaacacagcaggtgcttggtatctattgactaaatgaatgaaggaaagcttcataatttgatgaatgagacacgagtctcctgggagagtaaggaaagaagccgccgaagtgctctaatttgggtaacgaaggggtgaaatttttagaagacaaacaccgacagagaaagttgtggaggaggtgaactggctccggcgactaggaaaagtcaaaagtcttggaaacgacttccctatccaagcagggactggaaccctggatctgcaaggaatcaacctggccctcgggaggggaggggcaatgctcagggcacgtgactccaccgtttcccggcaaccagagccccgtccaccgctcgcctcttgctgctcctcacttcttcaccacgctgagctcctctcgaccaatcgacgcacagaacatcgtcgggtgggaaggtagttggaggactcctgggctccgtcactaggggactccgcccctcccgatttcctccgggctacaggcgacagagctgagccaagcgtttactgggcagctgttacggtaagtgaggaggggctggggtgcccagcgttttggatctcccactctggcccggccccggaataccacatagaggccttgggacctgattcatcccgtccagacagccctagagacctgag

SEQ ID NO: 13626 - DNA, 2300 bp, Homo sapien
caatgctaccttgttagacacggatttcacactgagcctgcttccgcggctgtgtgcctctgaaccaaagcctctgtctaagagatagagcccaggtcaaatgcctatgtccaagctgcaagagagtgtgggaaggctctggcttctaccttttgggggcagtaatgaaatgtgagaaattccccacccaaaagaagggtgttcggaagatgctggatgtttacagaatatgacaaatgtctactctacatggtctatgccagtgcttctcaagctttaatatgcagaaaaatcacctgaggatcatgttaaagtgcagattctcatttagtaggtcagaaggggaggaggaacaagattctgctatgttttctgtctccacagttttgccaggcactagtccaagtattttacttgaattaactaatttaattctcccaccccaatcctatggagcaaagaggctagctaagaatacatacttttcttttggataaggttctgctttcactgtaaatatcttaatgaaatgatgcacttgagagatgatgtccctcctgtgaagtagtttggttctaacataccccacaatcaatggagaattctacctcttatttctggaggtagtcaggaatcagacttttcagcatatggagttctgcagctgtggatacctcagctgcagtccctcagttagtttggtgagactaatgacttgaagaaggaatttagctaaaaaagatttccctttctcctctccagaatacaaatgcctaggataagaattagactgtcttttttttttttttttttttggcaaactaacattgaaatgcctccttatttggaagaatcccactctggataccaaagagggttagattcttggccgggcgcggtggcttacgcctgtaatcccagcactcataatataaaaattagccaggcgtggtggtgcgtgcctgtagtcccagccactcaggaggctgaggcagaagaatggcttgaactcaggaggcggaggttgcagtgaggtgaaatcgctccactgcactccagcctgggcgacagagcaagactccgtctcaaaaaaaaaaaaaaaaaaaaaaaaaaagagggttaaattcttccatctccaggcaccctggaagtgagggctcagagcaatgaggtttggctgatggaagtcctcccctgcaggactcttaaccttggaagagggacacagagacacagggagatttaggggtctccaaggggtggcagggctgcaggaaaaagagtcctttggcacaacatagtttcttgtgtctactgcatcccaactgggtttcttccctgacatgtctgaagccaggctctcaaaaggcttggtttcccttgatttggccctttttctgagcctagtctccagttgtcttgtgaattctatgaggcactaatatactttccataattctatctctgatgaaattagccagagttggtttattttgcacttaagaaccctcgccatatatcctctgatctatttgcagttttaatctcaggatggaagcatgtgggaggcgaatggggatcactaatccttctcatgctgttagggggaaacacaggtgtgaacacattgcttctggggtgcttgtgtgtgttttaaatacatatataacaatcttactgagatacaagtcacatactataatattgacccttttaaaatatagaatacagtgggttttagtatattcgcagagtttagcaatctttattctggttgttagtttttgttttgtcttaaataaagctcctttcaagcgtttcttcagacccaagggactactcggaatttacacgacctactcctgtcatggcctttacacggagcaattccaagggtttcctttataaataacgtcgtatctccctaataggaagacgtctgagtaaggtcacttttggtgagacatttacagtctctcatctctaagctcactcaattcacctaatttaattcgagcagctcactcattcgctcacttatcgcagaccccgcctcgggactgggcctccctgattcgctggggccgagtgacgtcctcagatcgcgaccctgggagtggagtgggggcagcgtggttatgtggctggaccgccgcggatggctcagggttcttggacattggcgctacgaccttaggcgccctagctttaccaggacttggagtggcgataagggcccaatggcagaaacagtgtctacccaggttgggacagagggcgggctgagggcttcgcatcag

SEQ ID NO: 13627 - DNA, 2300 bp, Homo sapien
ttttttttaaattttgattaaatttttaaatttttttgtagagacaggggcctcactatgttgcccagactgtctttgaactcccggactcaagggctgctcctgagatttcaggcatgagccaccatgcctggccagaatgttgtttttaaatgtataaaattaaatatgttagaatacaaaggcaaccaattttgttggaatagttgccaaaatattctcaaagtttgtgatgtaataatataataatgcatgcacttttttttttttttttgaaatggagtcttgctctgtcgcccaggctggaatgcagtggcatgattttggctcactgcaaccttcacctcccgggttcaagcagttctcctgcctcggcctccccggtagctgggactacaggcacgtgccaccacgcccgggtaatttttgtatttttagtacagatggggtttcaccatgttggccaggctggtcttgaactcctgacctcaaatgatccacccacctcagccttccaaagagctgggattacaggtgtgagccaccgcgcccagcttaatgcatgcacttctttatgaatgcataacattacaagacataatagcaggtctaaaaattaccacaattttgaagtagcaatgagcgtaaagcaataacagtaatctgatataaaaatatctgtgatttctattggtgacaaaataatggataaggttaatattactgtagttagttgcttaccgttattgaaggatgtgctttcaattagggagtgtggaaataaggatgaaatctttttctgaaccaaataacccactgaattctatccatggaccccttggaaatgcgtggaacccagcagaaacccttcctagcagcagggtagagaatgcattggagagcaaggctaaggaagggtgactcaatgtcctgagcccaaggaggtatcaacattcccaacggatttggatctgtaacagaaagaagccactggagccagcagagaatggggccactgctttccatactcagtgcccaaaccttgctgaagcacctgccagaggccgtgttgtggagcatggtgcaatgcagacagccttgtggaggagacaatctgtaaaccatgactgcaaaagattgataaatactgattattaatctacagcacagtgtaggattgataaatactaattattaatctacagcacagattagaagggtgattaagccagcgtctagtagatttgggttacactctcctttcttcaatttagaagctgtataacctcgggcaagctaatctttcagtctcctcatctgtaaaatggagtaataaaaatatttgtcatgatcaagggttatagtgatgtaattcatgtaaaacatgtggtgcctgtagataataaataccggataaagtgtctcatggtagcttttgaagtgaaacctggtatctcataatcaggacaggtgttaaaaaccccagagtaacagtctacaataattgaaactcctcagttaggagctgtgttaaagttggaacagagcagcattggaacatatgggatggtaataattgtggaattctattcactgttgttaactccatataaaaagaaattaaatccagcatgatttctgattcctggaaagtctctttccctcccttttctttatctgtgatgtcagaacgttccaaatactgtatttcaacatttcaggcctgaaactgatggtgccagattaattgagtaataaataataagtattcaagtttttccgctctgcaaatttactttggttattaaaaaatttattctgctctgcaaatttactttggttattaaaaaatttattctgctctgcaaatttactttggttacaagcaaaagtaagccaccacatcgacgaggatgggattcgaacccacgcgtgcagagcacaatggattagcagtccatcgccttaaccactcggccacctcgtcccggtaagttactgtttcctgattgctatagggagtaatatcaaggggctgtgacgcaatgttatggaagccgccattttgtacggaagccaaagtccaatcacttccatagcaagcaatcgaaagaagatggccgctcccacgattgtgggggaggtctccactggggaggggcagaggaaattcggtcgaaaaagagataaagctgaaggaaataaaattggcacggagtctgggaaagtagtttccctaaaggagtcttagaaatagggttggtctggaacctaaggggcggagccgacgcgtagagccg

SEQ ID NO: 13628 - DNA, 2300 bp, Homo sapien
attcctcacaggtgcagttcaaaataggttttgagttcctgtgagaatctaatgctctccttgatctgacaggaggcagagctcaggcagtaatgcttgcttgctagctgctcacctgctgtgcagcccagttcctaataggcgacaggtctgtgttggggcgttggggtcctctgaattagaggaatgacagagagaacagactcaggcagctttctggatgtagaaacaacctaacttagtgattatagatactacctgtgataatagtgaactttcttccatatcaaagttacacacctttgcctccggttcttcccacacccttagagcatctgcaaacctacagccctcctcctagctgactgtagtcacatgacttttacctttctggccaccagttgtaccagcagtgttcatctggccccaaattggccaatcattttcctgctcctggaaaattagacttggctttatattcaagtctgacctcaggaatttatggggcaaagtacacagatagatgtgtgtgaatgtccaatcagagaaagcacatctgcagaaagattaagaaattgatgtcgggtgtggtggctcaagcctgtaatcccagcactttcggaggctgaggcaggcgcatcacctgaggtcaggagttcgagaccagcctgaccaacatggtgaaaccccatctctactaaaaatacaaacattagcctccagctacgcaggaggccaaggcaggagaatcgcatgaaactgggaggcagaggttgcagtgagctgagatcgtgccactgcactccagcctggatgacagagcaagactctgtctcaaaaaaaaaaaaaaaaagaaaaagaaaaagaaattgagatactaaggagagagtcaaagataaataaaccatttgaattctgactcctttccagatcgcctttccagtttctcagaagcctagcagtacttactcctcctgctcttgggttcttttttactttttttttttttttaaaaaaaaaaccttgaactcttaaggattaatgctcttgagttatgagatatccctacattccaataactctaccttctatttttattgattaaactagtttgagtagtttctgttcctttcttccaaaacaacccactgagaacttggaaataaggcaaactagatttccctctaatagttaaattggcattctctgagaatatttataaatgtgttaattgaaaaattttggagtgtggtggctcacacttgtaatcctagtgcattgagaggctgaggtgagaggaccatttgaggccaggagttagagactagtctgggcaatgtagtgagaccccccaactctacaaaaaaaaatgttgttttgttttttttgtgtttttgttttgagatagagtctcggtctgtcgccaggctggagtgcagtggtgagatctgggctcactgcaacctcggcctcccaggttcaagcgatactcctgcctcagcctcccgagtagctgggactacaggcacatgccaccacgcccggctcattttttgtatttttagtagagatggagtttcaccatgttggccaggatggtctcgaactccagacctcatgatccgcctcggcctcccaaagtgctgggattacagacgtgagccaccgcgcctggccaaaaaaaacctttttttaaaaattagccaggtgcggtgatgcacacttgtagtcctagctgtctgggaagctgaggaggggagattgcttgagcccaggagttcaaggttacagtgagctatgattgcaccttgcaccactgcactccagtctgggcgaaagagtgaaactttgtctcaaaaaaaaaaaaaaaaagtataaatacatatatataaatgtatatatatagagatacatacacacacacatacatatatatgtattctttatatataaggtaatgtgtatcaagtgatctaatctgctcctaattcacctcctctagtatgcttacaaaatgagagtcctggaatagcagacatgcattgtaaataaatgaacatctttctacaagtatatttccccaaggttcaactgaatatagtttgctataatttcttaaaattcaatcaatttcacatccattaaacttacaagtaccgtaatccagttttcctaggaaaactaagcccagccgaaccttgggaaaaatacctctgtgttaaacatatatacatgatcgattttaaatgttttcaccacaaaaaatggtaagtacgtgaggtgatggatttgttaactca

SEQ ID NO: 13629 - DNA, 2300 bp, Homo sapien
agctgataccacgtccctgcactccagcctgggcaacagagcaagactccatctaaaataaataaataaataaataaataaaaataaaaataaattggtaagtggagggaaaatagatctaaccaaatgacttgtcttcttaaaaacttcaatgatttcttcagtacctagagaccaaagctccttacctttttttttttttttgagacggagtcttgctctgttgcccaggctggagtgcagtggcgtgatctcgctcactgcaacctccacctcccgggttcaagcacttctctgcctcagcctcccaaagagctgggattacaggcatgcaccaccacgcccggctaatttttgtagttttagtagagatggggttttgccatcttggccaggctggtcttgaactcctgacctcgtgatccgcccaccttggcctcccaaagttctgggattacaggcttgagccaccgcgcctggcctctccttacatgttttgttgttgtcgcttgtcttttgagacaaggtctcactctgtagcccaggctggagtgcagtggcccatcatagctcactgcagccttgacgtcctgagctcaagcagtcctcccacctcagcctccgggatagctgagaccacaggcacaagccaccacgcccagcttattttttttttttttttttttgagatatggggtcccactatgttgcccaggctggtctccaactcctgagctcaagcgatcctcccccaccttggcttcccaaagtgctgggattacaggtgtgagccaccgtgcaggccttatatgatcttcatatcctgaactaaatgtaaccttccagtttcggcacttgctctggcacttttcctccctcgccagataatactaatctttaatcatgtagttcgtttccatgcccatactaccctatttgcttataatgtcttccacttcgcccaagaatccctactcagctagcttgtggtgttgttttgacacagtctcgctctgtcgcccaggctggagtacagcggcgagatctcggttggctgcaacctcctcctgagttcaagcgattctcatgcctcagcctttcgagtagctaggattacaggcatgtgccacaaaacctggctaatttttgtattttttactaaagacgaggtttcaccacgttggccaggtttatctccaacccctgacctcaggtgatccgcctgccttggcctcctaaactgctgggattactggcgtgaaccaccgcgcccggccctactcagcctttaaaaccggaatcacgggtcaaaactttctggtaaaccacgatacggtttaggttatgaaattcaatgcccccttcctctgaactcctgcaaatctccagtaaagcaccacagattgacgaatattccagccatttccctctcccgtacgctagctccatttcccacttctatccatcttctcgagcttcctcagctcctccacctccatgaggcctggaaagcaccttgctccaggaatgcgagtaggaggctcagagcgaccagaagtgccaaaagctgacattcagatactgccgaaacaaaccacaagagcgctagggcccccgctaatagtccagctgcgatggtgagaactcgcggacccgccggcgatgcatgccgggagatgtagtcccgggccgacgcattacctcttgggagtcgtggtcttcgatctggtaaacagaagacggcaactcggttaagtcttcccccaccgccccctgaaatccctcgccccacccgcgagggactggggtaggagtaggggcgttgccgtggttagcctcgaactcctaggctcagacgatactctcgcctcggcctcccgagcagctgggactacacgcgtgagccaccgcccccggcataaagtttgaattagtccttacgcaaaaagggaagagggcagtctgtaaactcgcgcaggatcaagctctcgagctcccgtcttgggttagcgcgcagggcggaagcggggagaaggcggatccgggaggcggggatacgttacgtcgacgcgggcgtgaccctgggcgagagggtttggcgggaattctgaaagccgctggcggaccgcgcgcagcggccagagaccgagccctaaggagagtgcggcgcttcccgaggcgtgcagctgggaactgcaactcatctgggttgtgcgcagaaggctggggcaagcgagtagagaagtggagcgtaagccaggggcgttgggggccgtgcgggtcgggcgcgtgccacgccc

SEQ ID NO: 13630 - DNA, 2300 bp, Homo sapien
tcgcttgaacccgggaggcggaggttgcggtgagccaagattgtgccattgcactccagcctgggcaacaagagccaaactctgtctcaaaaggaaaaataaataaataaataaataataaaaaaataaattcagcacttctattcatcaaaggacaccactaagagagtgacaagtcaaaccacagtagagaaaacatttagcacaaacataactgagggctgataaccagtatataaagaacttcacatcagtaagaaaaagataatagaaaaataggcaagagatttgaacaagcacatcacagaagatatcaaaatgggcaaaaacatatgaacagatgtccaacatcattattaatcaggaaaattaaaatcacattaagacattactgtgtaaccagcagaatagttaaaatcaaaaaggctgaaaaatatcgtgttggcaagcatgtgaaacaacgaaacactcaacactcctgatgtatttttatataaaattcaaaaacaagcaacattagttcatctcattagaaaccagtatagcagttaccactgtaaaaaggggaaaatattaaatactacacaggaaggcttctgaggaccattctattaagtggtgattacataggtgtatattcattttgtcttgctctatcgcccaggttggagtgcagtggcctgatcacagctcactgcagcttatacctcccaggctagatcctcccttctcagcctcctgaatagctgggcctacaggtgcacgccaccatgcctagctaatttttcctatttgtagagatgcgggtctcactatcttgaccaggctgttctcgaactcttgggctcaatcgtcctcccgcctccacttcccaaagtgctgggactacagacgtgagacacgacgcccggccagtatattttgtaataattcacggagttgtatacagttgtgaatgtgaatttttctacatgtatattacattgcgctttagaagttaaaaacaaacaaacaaacaaaaaaacaggggccaggcgctgtggctcacggctgtaatcccagcactttgggaggcagaggcgggtggataacctgaggtcagaagttcgagaccagcctgaccaacatggtgaaaccccgtctctactaaaaatacaaaaatcagcctggcggcgtggtggtgggggcctgtaatcccagctcctcgggaggctgaggtaggagaatcgcttgaatccgggaggcggaggttgcagtgagccgagatcgcgccactacactccagcctgggcggaagagcgagactccatctcaaaaaaaaagttttaagaaaaccaaacctcacttcagatcattctctaggcatcatgtgaatggttttccgcattagatgatgaaaacactgttttggcaatcggagattggtactttctaagcacggtgtaatggaaagacagatcaggaatccggaagccctggctgtgatattaaacagctgtggctacaccgctctgatctcggacttctcgctcgaacccataaaataggtgttgcctataaaggctctaatgtttctcccctagttctaaagactgaggtccacttgtgttttcgccccagcagctgagggtcggtcgggcgcggacacgccctgccacgtccgggtttcacactgcgcgcggaggccccaactgccgctgagcactggaccggccaggacgcaggtgggcgaggacgagccgcggctctggagggcccagcctgcgcctcacacactcacctcggtccgcagcgctcctctctccagcaggccccgcgctccgacttcaccccgcgggcgtggcacgcgcccgacccgcacggcccccaacgcccctggcttacgctccacttctctactcgcttgccccagccttctgcgcacaacccagatgagttgcagttcccagctgcacgcctcgggaagcgccgcactctccttagggctcggtctctggccgctgcgcgcggtccgccagcggctttcagaattcccgccaaaccctctcgcccagggtcacgcccgcgtcgacgtaacgtatccccgcctcccggatccgccttctccccgcttccgccctgcgcgctaacccaagacgggagctcgagagcttgatcctgcgcgagtttacagactgccctcttccctttttgcgtaaggactaattcaaactttatgccgggggcggtggctcacgcgtgtagtcccagctgctcgggaggccgaggcgagagtatcgtctgagcctaggagttcgagg

SEQ ID NO: 13631 - DNA, 2300 bp, Homo sapien
tctgatattagtatagccacgcagtgtctcttatggttactatttgcatgcaatatctttctccattcttttactttctaaagggtttctctggaagaaaacatatagttggattttttttttttaaatccagtctgacagcaactctaaagaatgcctttttctggccgggtgcggtggctcacacctgtaatcccagcactttgggaagtcaaggcaggtggatcacctgaggtcaggagtctgagaccagcctggccaatatggtgaaaccccatctctactaaaaatacaaaaaattagctgggtgtggtggtgtgcgcctgtaatcccagctactaggaaggctgaggtgggagagttgcttgaacccgggaggcagaggttgcagtgacctgagatcacgccaccgcactctagcctgggtgacaagagcgagactccatctgaagaaaaaaaaaaaaaagaatgcctttttctactaaggaagtcattcttttgaaccacacatacaactttgggacgtggggttatagaagagacattcttcggccaaactaaccctggcaatcactacattgataagtgtagccatagtctctcttatctaaaccagtaacctacctctcagccactgccagcagccgttctggcctaaaggtaccctcagtgtcaatgtacatggcctttccttcacctccaccccggtcaatgggaagctatagagaacaaaaacaacagtagaaatgaacattgtatttctgatacagctgaccaagctcctcatgacatctttataattcctccaaggcaaagggaaaaaaacatttaaaaatgacagtggtaggaaggaggcattcccttctgatattaatagaaatacagctagaaaaatatgtaaagctgattgtgtctcagtacatacagctagtcctgtcagaactggactgcttagaaatatagcccaaagtaggtaataaaattcttttcttcttttttttttttttcttgcgatagtctcactgttgcccaggctggagtgcagtggcgttatctcggttcactgcaacctccacctcctgggttcaagcaactctcctgcctcagcctcctgagttgttgagattaaaggtccatgccaccacgcccagctaatttttgtatttttagtagaaacagggtttcaccaagttggctaggctggtcttgaactcctgacctcaggtgatctgcctgccttggcctcccaaagtgttgggattataggcacgagccactgcacctggcctttttttgttttggagacagggtctcactccgccgcccaggctggagtgcagtggtgcaatcttggctcactgcaacctctgccttccgggctctggagatcctcccatctcacctcccaaatagctgagaccataggtgtgcaccaccacacccgattaaatttttttatagatagggttttgccacattgcccaggctggtcttgaactcctggactcaagtgatctgcccgcctcggcctcttaaagtgctgggattacaggcgtgagccaccacacctggccagtaataaaattctagaactgcataccaacacaagactgatcaattcaaaagtacagaaacttggaagaccatttaccttagctttaatcaataatgggccatgatccaaagcccagttaattttagcatgtctatatcaaacttatacttcactttattgagcagttcattctttaggggtactaaagggactagtcaatgccctcggagtgtctatagcaaatttcgagtgtgagcaagaaagaagaaaaaaacatatttactccaatagtataaacaagatgtttaaaatgaacaattggagaaaacagaaaaataagtagaaagaattttaaagagaaaacaaaaaggaaagaaaagagaagtaaatgaaatgccatgaaaactgtcttatgagccactcaaggaaatctctgctttagactacccattccataccagatacctttgaatttttctacaaagtttaagtgaatgatgctaaagggtaatttctactctagaaatctactttggagtcataattcccatttaaattatgaggaaaatcctttagaacattttatgttaaaggcctaggagaaccaaattttttctttcttttttttctgagacggagtttcgctcttgttgcccaggctggagtgcaatggcatgatcttgcctcaccacaacctctgcctcccgggttcaagggattctcctccctcagcctcccaagtagc

SEQ ID NO: 13632 - DNA, 2300 bp, Homo sapien
ggcacacacctgtaatcccagctactcgggaggctgacgcaggagaatcacttgaacctggaggcggaggttgcggtgagcctagatcgtgctattgcactccagcctggacgacagagtgagactcttgtctcaaaaaaaaaaaaaaaaaaaaaaaaaatcctatgttgcagtgtcttctccagtgcataggcatgatggtccttatctggtggtccgtaagctccagcctcgatactcttaagtgacgcttgtcagaactttcatgtttatgggctttcatttctttgttagaacactaacctagaaaactcgggtaagactaagtgaacgtcatctctggtcagacctcagtccatgtggctcttgtgaaagagttttggcctagagctaattaatattgttggatcgtggatccttttgagaatttttttttttaaagagatggggtctgcctatgttgcccagattggtcttgaactcttggtcccaagctatcctctccttggcctctcaaagttctaggattacaggtgtgagccaatgtacccatcccctttagggaattttttcaaagctgtgatctctctccccacttacttaaattttatacaacttgagattcatggacactgcccctccagagtaaggtctgttggggacaatttctgattgtgttggatccgttgttgttgttttttttgaggtggagttcgtcgcccaggctggagtgcagtggtgcaatcttggctcgttgcaacttctgcctcccaggttcaagtgattctcctgcctcagcctcctggggagctgggactacaggatgtgccaacatgcctggctaattttatatttttagtagaggcagggtttcaccatgttgctcaggcttgtctcaaacacttggcctcaagtgatccacccacctcggccttccaaagtgctaggattacaggcataagccatcgtgcctggctggatccttttatattttaaatgctaaaatctgcttcaagcacatcaggtgggcattataaaaagaaggtaactggggtttctaatgacagatggggaagccaaggtgaagcagaagtcatccctgaagtcttcccttagaagccgtttgcagccttttctgagacagtcttgctctgtcacctagtctggagtgcagtggtgcaatctcggctcactgcaacctctgcctcctgggttcaagcgattctcctgcctcagccttttgagtagctgggactacaggcgcctgccaccacgcccagctaatttttgtatttttggtagagatggggtttcactgtgttggccaggctggtctccgactcctgacctcaggcgctctacccgcctcagcctcccaaagtgctgggattacacagcacagaggcgtgagccactgtgactggcttctttgcggcctttcattctgctcaagttcacaactatttccaaacaagtccaagctgggtagggattggtgagagctaaagcagtcattcttcccacaagccttcctatgaaagtgtgcataagagctatgtcaactctggatctaccttcgtcctacaggaaaagaagaagcagaggctgctctggagaagggggatgagagtgctgactgtcacctgtggtaataacaccctgcagtgttctgggaagagccagcaagggccaaagcagaggacagccctttcttttctctgcctgggccacagaggcattttccaaaggatccaggagagggagttctggcttgtatctccacatgcctcagtctacccctagccagagacaagggaagtttctggtaggggaggtggcttagggatgaggcaagcggggaatacaagctttttttctgatggggcttggagaaatgagtagctttgttaagagtcatcctagctacaaaactggagttcttggctctcaggaggctgggacaatctgcagctcccctatcctgcataagctcttctttcccctgcgtgtgatccctggctgctggtactttggcttctttgcttggttcatgtgaggaaaagtagatgtgagctcaccccccagaagtttagtggtcaatttattaggctgcaaaaacatcagccctttttgtggtctcatgtgaggcaaagttctgtcagcttacctgggccacggctaactcatatcctggggtctggttccagcacctgagttttagtgaaaatgttcctttcctttcccaccgccacccttgctttccatgtctccaccctcagactgtgagctaagtgagaggc

SEQ ID NO: 13633 - DNA, 2300 bp, Homo sapien
ccctgacctctcttcttggctttgtgagctgggcctttaggatccagagggatggcagcatcgcagctcaggtcccaggggattctgtgctgatgcctgggctccagcagggctaggtccctccctgggagtgctggaggcagagagactcctctttggactcctgattggctgaggcagccctcaactcagcaagaaatagggtctccccctccttctagcaaagggagatgatgcaattccagcttcccgttccagataaaccatctacccattttgcatttgggcctggctgggcagaggagactctggtttgatttttctcaatctggcaggtgcagttgggagtttcattctctaggttgcctgtgggtggtctccctcatcagtacccaggttggttacgaaatctaatgacacttatccttgtccctttgatttctaaaggtgtttttttttttttctaataactaaaggggaaatctacttggataacctcttaaaaaacaaaggtgcagttaggaaaggttttaaataccttacaagttcttgtagtagatgtgtctggggcctcttttttagatgaggctgaagctcctctgtaaggatgcagtcagcacggactgggtaccaggtctggctgctcacttccagagccttcagagcctgccaccttgtggtttctggttttctgggcaggacagcacttctgccctgacattaggctgtcagttgttgactttatttgtaggtggtgtgtcatctctccttcagtcctgttttgctccagccacagggagcctattcttttttttttttttttttgagacggagtcttgctctgtcgcccagggtggagtgcagtggtgtgatctccgctcactgcaagctctgcctcccgggttcacgcccattcttctgcctcagcctcccgagtagctgggactacaggcacctgccaccatgcctggctaattttttgtattttttagtagagacagggtttcaccgtgttagccaggatggtcttgatctcctgacctcctgatccgcccgcctcggcctcccaaagtgctgggattacaggcgtgagccaccgcccccagccttgtgtttgcttctgacccccagaagtcctaccttttcccctgctcagtccttatctattttaggcatttagggaaaacaccctaatcagctgctggtggctgagatccaagagaaactcagcttcctctttagtgggtgcatcagggttggggctccttaggagccacctggcatatggcagccccccaaacaccttttcagggggtagtttgcattgtcttccccttcttgcttctggctgcaaagtggttcctatcacctctcctcacacccttaagttctcaaggttactatgggctactcctgttgcggtttaggtttggttgttgacttgggccagaggttgcgagtttgtggatgtgtgtgtggctgcccatggcctgaggctgcacccacccatgttggttgtggcaagtgtctctgactgataaggcaaaaacgagcagggacttctcacatttgccttaactgtcacagggcctcagctggttgtctgctctttccttcctggatcattttcccagcccttagttcccataggaaactttctctcaaataatgatttctgctgggcatggtggctcatgcctgtaatcccagcactttgggaggccgaggtgggcggatcacttgaggccaggggtttgagaccagtctgggcaacatggcaaaaccccgtctctactaaaaatacaaaaaaattaggtgggagaattgcttgaccccaggaggtggaggtttgagtgagccaagatcgaaccactgcactccagtctgggtgacagagcgggaccctgtctcaaaaaaaaaaaaaaaaaagaaaaaaagtctgcccttaagaggtatgaatgattgtgatttggtgctttggacaatgccatgtagagtgcttctttgggggtgagggatagacagaccctaggggctctgagctgaataatcctcttgttgtcccttacatttctctgccagttacacaacagccaatgcggagtctgacaatgagcgggactctgacaaagaaagtgaggacggggaagatgaagtgagctgtgagactgtgaagatggggagaaaggattctcttgacttggaggaagaggcagcttcaggtgcctccagtgccctggaggctggaggttcctcaggcttggaggatgtgctgcccctcctgcagcaggccgacgagc

SEQ ID NO: 13634 - DNA, 2300 bp, Homo sapien
gtcaattcatttgagcaaaggatctagggctggttcaaactactaccatctttgtgcaagaggagtgttttttttcttttcttttcttttttcttttcttttcttttttttgagatggagtctcgctctgttgcccaggctggagtgcagtggcatgatcttggctcactgcaacctccgcctccctgggttcaagtgattctcgtgcctcagcctcccgagtagctgggatcacaggtgcgtgccaccatgcccagctaatttttgtatttttagtaaagatggggtttccccatgttggccaggctggtctccaactcctggcctcggcctcctaaagtgctgggattacaggcgtgagccaccacacctggccaagaggagcgtttacattatctcactcccatgctaattggaaatgagtgttttctctgattgccaatgttagatggtttggaaaagttagttttggagtcttcaaagagctatcagcttagattgcaaatgattgtcagcattttataatcttgtggtaatctagtattggagtgtgcttccttcccttgtattttgtttgtaattgcttcgcagtagtgtttcttctgagattagaagaaagtggccacattgccagggatctttcttgcactacattcttgagcattattggatgtatgttgtggcctggcctagttttttaccagatttcctttaagaagggatttatgcttgccgtattgtagggtcctgcctctctggtttcttttttgtttttgcattttccagttcagttaccataggtggctgtcactttgctagcatttcactgctggaatttactctgagatctagggttgggtcagcagggcttagtgacggtgtctttctgaggcagtttggatgggctttttctggtgtaccttttctcttaataactgccccctttctcctagtccttctctgatatactaaatgaagttctgggagaaactccaagttttccctactattatttgtgaagtgagagatcagaatttgagggagctcagttttagttttagttttgctatgtggttggtattgactccttggtattgggcactatatggtgaggtgaaggtttttgtttttttttaactctagcaggacagctgtcctccttcaggttccacacttgggcaagcatgttacattatctatcgtggtgtgcagcattcctgaagggccctggtatggaaggttcttggagcagagggctctcgtttagagatccctgggtagtttcttgagacttgttaccatgacctggctgtgaacgtgtgctatctgagcgtcactgggccttctcttccaatggaaagcaggtattcttgaattctgggtgtgagatctcttccccaccatattcctgtgtgtcactggctcccattcgtttcccccttcagtgatgctcctgcgggctgtcccaggtggggctggagatgcctcagtgctgcccagccttccacgggaaggacaggagaaggtgctggaccgcctggactttgtgctgaccagccttgtggcgctgcggcgggaggtggaggagctgagaagcagcctgcgagggcttgcgggggagattgttggggaggtccggtgagtaatgcggcttcttctcctgctttatccctcccctgcagcttttcagctggggtgtgttctggccttcgctgtctgtctctaaagaataaaccagttctatagcttctagcctaatctgggttgaagctgtacatttggtacctcgccttgcacatgctccttgctgcttctggactctcatggttgatctgttgtagcagctgaagcgctctgtttgcctaacctagtctgtctgtgcgggctgggcccaggaagctgccctgcttgccctcctgagggttagagacttaggattttctctgcttttagccctttaatgaggagcagtagtaagaggcaccccatggtgagcagaaagacaagctggatgggacctaatggtacccttcgggatggggcctgctttccagatgccacatggaagagaaccagagagtggctcggcggcgaaggtttccgtttgtccgggagaggagtgactccactggctccagctctgtctacttcacggcctcctcgggagccacgttcacagatgctgagagtgaaggggggtgagttgtctctcttggaggcagttatggctacagccaggttgtgttttgtaaaagtattatcaatggaaaattcaaaccaagctgctgcaaatgattttt

SEQ ID NO: 13635 - DNA, 2300 bp, Homo sapien
caggacaacagtttggggtctggtctgctctcttctcaggctgggctgtggagggggtgggaaggtgggcagtgcatatctcaggcagccaggcctttattacatttgcaaagctagtctgcagatgcagcacaagataaagagctctgtccagagccacccaccacactgctgattgccctggcagacacgtgcctgccagataacatctttaatatccagggggaaatgaattcccctgcttggtctgcccatttggcctagcctctcatcacaatccgtttatctcacagagctgcctcccccccgtagagaggagaaattattgttctgccactgagttttctgccacagctgagaacacactgtcaaagtggcagggcgtgctgtcggtcacgccttcttttcttccttcctccattcagcttttatggatgcttttgcattagagctgtgccaggcacaggggacctgggatgaatcaggagtgaaccccatcctggaagagtgggcagtccagtggtgtagacagagtagaaagcaaataatcacagaacagagtgtaatgggtctggtgcggtggctcacgcctgtaatcccagcactttgggagactgaggcaagcagattacttgaggtgaggagttcgagaccagcctgaccaacatgtagaaatccggtatctactgaaaatacaaaaagtagccaggcgtgggggtgcaagcctgtaattccagctactccggaggctgaggcaggagaattgcttgaacccaggggcgggggaggaggttgcagtgagccgagatcgcaccactgcattccagcatgggcgaaaagagcgaaactccgtctaaaaaaaaaaaaaaagtataatggaggcaatagagccacaggagcaaagcagggtgaaaagcttaatttcaccaaggtggtgatctgggaaggtttccagaggaaatttttatttcctccaaaataaagtgtatatatatatatatactttatatatatataaatatattttttgttgttgttgtttttgtttatttgttttgagaggaggcctcactctgttgcccaagctggagtacagtggcgagatctcggctcactgcaacctctgcctcctgggttcaagcaattctcctgcctcagcctcccgagtagctgggattacaggcgtgcaccaccatgcccagctaatttttgtacttttagtagagacggagtttcgccaggttggcctgggtggcctcgatatcctgacttctgttgcccagagtgatcatggctcactgcagcctcgacgacctgggctcaagtgatcctcccatctcagcccccagagtatctgtgactacagtcacgtgccaccacggccggcctcctgtattcttatatgtatacaatatctcacaattaaagggtaaataaatataagatctagtcaagggtattgggaggactggcctagatatttctttcactaaactaaattttaactcttaagaaatgttcacaataaaattgttatcatagtccataaaatcggtctttttagttgccacaattataagaagttgcatacaattacaagagtaaaacagaattataagacagcacgttaggtttaagatttatggccgggtgcggcggctcacgcactttgggagcccgaggcgggcggatcgcactttgagagaccaggagagcgggacccagtctctacaaaataaaaataaaaataaaatgtggggagagcgtgacgttttccaggtacagaggggaggtccaggcagaagcgcaggtagaaagtgtgaatatgctgagcgtattccgggagcagcaagttaagccggtgtgaccggagggaaatggaggcctggctgccggacggtgagggtgactgcgcgagcgtccgcccaagaagtctccctgccttcccgcctttcccctgtcttgggccccttcttgctttcctttcgcgctctgtgctgactccgcccctccggcggcgcccgtggccccgcccctgagggaaacagacaaggggcggggccggcgcggtcatctctctgcgccttcccgcagggcgccgagcacctggcgccgcctgcctgacgtcacggtcactgacagcgtgagcccgcggcggctgctgccatggtggctggcggccgggtaagggtctgagtggatctcctgccaggccagagcgccttcgggggccgcggcggaaggccaggagtttgcagccagggcgccgggtttgtggtctgcagtgtcgtgaggctgag

SEQ ID NO: 13636 - DNA, 2300 bp, Homo sapien
gcctggggaatacagggagaccctgtctctacaaaaaaagtaaaaaattagctgggcatggcggcatgtgcctgtagttccacccccggctgaggtgggaggatattttgagcctggaaggcagaggttgcagtgagctgagatcatggcacgcctggctaatttttttttgtatttttagaagagacagggtttccccatgttggccaggctggtctcgaactcctgacctcatgatccacccacctcggcctcccaaagtgctgggattgcaggcatgagccaccgtacccagccaatttttgtattttttagtagagatggggtttcaccatattggccaggctggtcttgaactcctgacctcgtgatccacctaactaggcctcctaaagtgctgggattacaggcgggagccaccgtgcctggcctagagaaagaattattttttaaggcatcaagaaccttaaacattatacacaagggtaaggccaccatcccaaggcatttgacttgtcacctctcttggaagagccggggtagatgaggcagatgttctgggcagagggcaggacaacagtttggggtctggtctgctctcttctcaggctgggctgtggagggggtgggaaggtgggcagtgcatatctcaggcagccaggcctttattacatttgcaaagctagtctgcagatgcagcacaagataaagagctctgtccagagccacccaccacactgctgattgccctggcagacacgtgcctgccagataacatctttaatatccagggggaaatgaattcccctgcttggtctgcccatttggcctagcctctcatcacaatccgtttatctcacagagctgcctcccccccgtagagaggagaaattattgttctgccactgagttttctgccacagctgagaacacactgtcaaagtggcagggcgtgctgtcggtcacgccttcttttcttccttcctccattcagcttttatggatgcttttgcattagagctgtgccaggcacaggggacctgggatgaatcaggagtgaaccccatcctggaagagtgggcagtccagtggtgtagacagagtagaaagcaaataatcacagaacagagtgtaatgggtctggtgcggtggctcacgcctgtaatcccagcactttgggagactgaggcaagcagattacttgaggtgaggagttcgagaccagcctgaccaacatgtagaaatccggtatctactgaaaatacaaaaagtagccaggcgtgggggtgcaagcctgtaattccagctactccggaggctgaggcaggagaattgcttgaacccaggggcgggggaggaggttgcagtgagccgagatcgcaccactgcattccagcatgggcgaaaagagcgaaactccgtctaaaaaaaaaaaaaaagtataatggaggcaatagagccacaggagcaaagcagggtgaaaagcttaatttcaccaaggtggtgatctgggaaggtttccagaggaaatttttatttcctccaaaataaagtgtatatatatatatatactttatatatatataaatatattttttgttgttgttgtttttgtttatttgttttgagaggaggcctcactctgttgcccaagctggagtacagtggcgagatctcggctcactgcaacctctgcctcctgggttcaagcaattctcctgcctcagcctcccgagtagctgggattacaggcgtgcaccaccatgcccagctaatttttgtacttttagtagagacggagtttcgccaggttggcctgggtggcctcgatatcctgacttctgttgcccagagtgatcatggctcactgcagcctcgacgacctgggctcaagtgatcctcccatctcagcccccagagtatctgtgactacagtcacgtgccaccacggccggcctcctgtattcttatatgtatacaatatctcacaattaaagggtaaataaatataagatctagtcaagggtattgggaggactggcctagatatttctttcactaaactaaattttaactcttaagaaatgttcacaataaaattgttatcatagtccataaaatcggtctttttagttgccacaattataagaagttgcatacaattacaagagtaaaacagaattataagacagcacgttaggtttaagatttatggccgggtgcggcggctcacgcactttgggagcccgaggcgggcggatcgcactttgagagaccaggagagcgggacccagtctcta

SEQ ID NO: 13637 - DNA, 2300 bp, Homo sapien
cactgtgtctacaaagtcttggggtttaaataaatttggttaaaatgaaaaaaagtaaaattgactttaatttgtatttcctgtatttctaatgatatactaggcatcatgttatatgtttattggtcatttctatttcctcttttgtgaagggcctattcaagtcagttacccctgttttttccattgttcatctttttctcactgagttgtaggagctcctgggcatcaatcttttgttagtttttttttttttttttttttttgagacgaagtattgctctgccccaggctggagtgcagtggcccaaccaatctcggctcactgcaagctccgcctcccaggttcacgccattctcctgcctcagcctcccgagtagctggaactacaggcggcccccaccacgcccggctaattttttgtacttttagtagagacggggtttcactgtgttaagccaggatggtctcgatttcctgacctcgtgatccgcccgcctcggcctcccaaagttctgggattagcagcgtgagccaccgcgcccggccctttcgtcagttttaacacatcctttgttaagcatgaatgtgttttatctctctggctaacttgttaggtcagtgggtaagagggcaggggtaggaactacagaataataaattagaccagttaaggaacgtttaggattacaacttcctgcttcccttatagctctctccacgtctgtcaaagtgttggaacggcagcatcccctataaaggcccctcttaaaaagtgaagattattaccctcccatgggagggaaggctacctacaggctgtttttgttttgctttattttctagaaaaccaatcacaggccggatgcggtggctcacgcctgtaatcccagctctttgggaggccaaggcgggtggatcacctgaggtcgggagttcgccaccagcctgaccaaaatggagaaacgccgtctctactaaaaatacaaaattagccgggcgtcgtggcgcaggcctgtaatcccagctactcaggaggctgaggcaggataatcgcttgaacctgggaggcggagattgcggtgagcggagatcgcgccattgcgctccggcctggacaataagagcgaaactccatgtccaaaaaaaaaaaaaaaaaagaaaagaaaaaagaaaaccaatcacaacaaggcagataaagaaggatgagttgtcagattttgataactgcggatgaggggcgtggacacacggttgggaactcgcagccgctcattggtggctggtgcgggggaagttgtttcatttgccccaggtgttgcccagtgacctcctgcgcgtgcgccgcgtctgtccagctgcgcgggaagctcaggggagggaaggccaggttccatccattcagtcactccagacctggcacccagccaagcgcgcggttcctttacagactttcctgcgggtccacagaaatgcaaggatccgcctctgtgctggaattagagtctgggagggggaatgcacagtgcgccctgggtggtattttagttgtcgccttcagggctagctccgagcctcgtgccccggcctcctcagcgcttaaggaatctctggagcgcatgtcttggcgaggggaagtggggccccgttgaagctgtcgaggcgtctctgagaggggtgggctggggcctggagaggcctccgtgaggacgccgtttgctctgggctctgcctggcaggggactttggaacctggcctgaagtgttcaagaagcgggcgcgggggcaacacgcgcgcggggacgcagtaagatcacaggctgcaaagaaaacagcactaagcgtcctggaggacgctggagcttcaggatagtgtccttccaggtcgtgggaccgccccctcctccccgcactccaccttcccgcaactggatcactcggcggaagcctcaggtgggccccggggtccaagtccgccgccgggagggcgggggcgggccccgaaccgccgactgcagggcgcgtcacggcagccgctcctgattggcggccacggcggtcacgggcaaggtgccccgggattgacgccgcctgtggccagagccggagtaacgggactcccagctgcgcgtcgcagtcccgacgcgagaagggctggagtcggcgtccagcctagagcccccggtgggagccaggccgggacgcgtgcaccatgccctacctgctcatcagcacccagatccgcatggtgagtaccggccgcctggcgacttggagccgggaccaggccctagggggc

SEQ ID NO: 13638 - DNA, 2300 bp, Homo sapien
gagactccgtctcaaaaaaaaaccctccagatttcccacttggatcttttgtgaaatgtctcaaatagtttctcactattaataaagtactaattaaataatttgcaggcagggcatagtggctcacacctgtaatcccagcactttgggaggccgaggtgggaagatcacgaggtcaggaatccaagactggcctggccaacacggtgagaccccgtctctactaaaaatacaaaaattagctgggcgtggtggcgggtgcctgtaatcccagctacttgggaggctgaggcaggagaatcacttgaaacaggaaggcggaggttgcagtgagccgagatcatgccactgcactccagcctgggccaaagagtgatactctgtctcaaaaaaaaaaaaaaaaaaaaaattagccgggcgtggtggtacatgcctgtagtcccagctactccggaggctgaggcaggagaatcgcttgaacctgggaggcagaagttgcagtaagctgagattgcgccactgcactccagcctgggcgacagagcgagactccgtctcaaaaaataataataggccgggcacggtggctcacgcttgtaatcccagcactttgggaggctgaggtgggcagatcacgaggtcaggagatcgagaccacggtgaaaccccgtctctactaaaaataaaaattattagccgggcatggtggcaggcgcctgtagtcccagctacttggagaggctcaggcaggagaatggcgtgaacccgagaggcggaggttgcagtaagccgagatcgcgccactgcactccagcctgggccacagagcgagactccgtctcaaaaacaataataaaaaataataataataaagaatttaaaaaataataatttgtaaacatagagcacttagaatactatccagaaaaaaaaaatactgtctaggacatagtaagcattatacagatgttaggaattattaatcctaaaatattgaaacacgagagaggtggagcagatgcttttgatgcttcatagacatcccatggccatttctgatttcagctgcggctgcaggggacagatttgtgcaggttgacagcatttctcaagggccctctgggtctctctgattttctgccccagagcttcctcttctcaaaagctcactcaccccatgagcagggcagcccagaagtactgggacattagtgggcactatttttttttccttttttttttttttttttgagacagtctcgctctgtcgcccagactggagtgcagtggtgcaatctcagctcactgcaacctccgcctcccgggttccagtgattctcctgcctcagcctcccaagtagctgggactacaggtgtgtgccaccacgcccggctaatttttgtatttttagtagagaaggggtttcagcatattggtcaggctggtctcgaacttctgaccacatgatccgcccgcctcggcctcccaaagtgctgagattacaggcgtgagccaccgcgcccggcctagtagacactaattttctttctttctttctttttttgagaaagagtcttgctctgtcgcccaggatggagtgcagtggcgcgatctcggctcagttgggcactaattttcatttgatgaacgcctctccttcgtatattgttaaaactaccaccatgatccagggggagataaaagaaatcctaaatccagcttgatcagtgtttcactccctggcatctttatcaccacctaaggtagcatggacctctataccatctgccttaaccttctgatcctcctgcttttagcccactaactagcacatgctgagaagggcatcagctacttgaaaagagtcaatgggcttgagtggaaaagaaaatagagacagcagggtcatcggtcacattggcaagggggcatgaaaagggagtggagaggctttgagatcttacttttctttcgttctaggctcttagtggaagaattaaatcagcctgcagaagagactgaaatgaggcacctcttgtcacagtcaaggcagaagcggaaacggaggccgagactgcgcaggcgcagaggaggctagcgttccttgctgcctcgccccgcggcctctaggagacaggggccacggggagagcacagccacccggcgcgaagagccctctgtaccccgcttcctcttgaggccctcggaccgtccaggaaatgtctgggagcccgcctgcggagggcatagcgccgaccctcgctccccgcccaggacccgaatgaacctggagagcgg

SEQ ID NO: 13639 - DNA, 2300 bp, Homo sapien
ctcaaaaaataataataggccgggcacggtggctcacgcttgtaatcccagcactttgggaggctgaggtgggcagatcacgaggtcaggagatcgagaccacggtgaaaccccgtctctactaaaaataaaaattattagccgggcatggtggcaggcgcctgtagtcccagctacttggagaggctcaggcaggagaatggcgtgaacccgagaggcggaggttgcagtaagccgagatcgcgccactgcactccagcctgggccacagagcgagactccgtctcaaaaacaataataaaaaataataataataaagaatttaaaaaataataatttgtaaacatagagcacttagaatactatccagaaaaaaaaaatactgtctaggacatagtaagcattatacagatgttaggaattattaatcctaaaatattgaaacacgagagaggtggagcagatgcttttgatgcttcatagacatcccatggccatttctgatttcagctgcggctgcaggggacagatttgtgcaggttgacagcatttctcaagggccctctgggtctctctgattttctgccccagagcttcctcttctcaaaagctcactcaccccatgagcagggcagcccagaagtactgggacattagtgggcactatttttttttccttttttttttttttttttgagacagtctcgctctgtcgcccagactggagtgcagtggtgcaatctcagctcactgcaacctccgcctcccgggttccagtgattctcctgcctcagcctcccaagtagctgggactacaggtgtgtgccaccacgcccggctaatttttgtatttttagtagagaaggggtttcagcatattggtcaggctggtctcgaacttctgaccacatgatccgcccgcctcggcctcccaaagtgctgagattacaggcgtgagccaccgcgcccggcctagtagacactaattttctttctttctttctttttttgagaaagagtcttgctctgtcgcccaggatggagtgcagtggcgcgatctcggctcagttgggcactaattttcatttgatgaacgcctctccttcgtatattgttaaaactaccaccatgatccagggggagataaaagaaatcctaaatccagcttgatcagtgtttcactccctggcatctttatcaccacctaaggtagcatggacctctataccatctgccttaaccttctgatcctcctgcttttagcccactaactagcacatgctgagaagggcatcagctacttgaaaagagtcaatgggcttgagtggaaaagaaaatagagacagcagggtcatcggtcacattggcaagggggcatgaaaagggagtggagaggctttgagatcttacttttctttcgttctaggctcttagtggaagaattaaatcagcctgcagaagagactgaaatgaggcacctcttgtcacagtcaaggcagaagcggaaacggaggccgagactgcgcaggcgcagaggaggctagcgttccttgctgcctcgccccgcggcctctaggagacaggggccacggggagagcacagccacccggcgcgaagagccctctgtaccccgcttcctcttgaggccctcggaccgtccaggaaatgtctgggagcccgcctgcggagggcatagcgccgaccctcgctccccgcccaggacccgaatgaacctggagagcggatgccagcagtggccgaggcgctaggacaggaaggaccgccagacctctcaagatcagccttcctcgccaccgttctcacctctttgtccgctgccttctcctcaatgcctagcagcgcgtacaggtccatctgtaagagctccttggtcactgccatggttccggcctgacggattcgtactacaactcccaagagtctaagcgcgcgtgaggactgcaggctccgagcggcgcctagccctctgggaattgtgttctgggtcaggcttgactgactctgagggaggccggcagtcgtgaatgaactacgactcccagcagcccccgttgccgccgctgccgtacgctggctgcaggagagcgtccggattccctgctctaggtcgcggcgggacagtgccagtgggcgtgtggggcggggcagggcagggaagggaagggcggagctggggtgagggtccaaggggcccaggacttggccggcgtgatctcagctctgcagaccctgcggtgctgggagccaccatggagagtaggtgctacggctgcgctgt

SEQ ID NO: 13640 - DNA, 2300 bp, Homo sapien
tcctgattctgtgctcattttatctagaagatgggggcagggtctttccctatggctcccttatcctttccccaatgctctttgtctttttctcttcagcacttacttcttatagttctgaggtggtgaccacttggaggcattggcagaagaccctctacagagaagaaatctagtgttataaatcctgccatcccaccaggcagtgccccccactccaaacacttcctcggctgactctcgcgacagagtacaaagctgtgagggctggccagatgcccactgccatacttggctgaactttcacccatgcctgcctcttacctggtcaggacctcatggcattgcttgcagactttctgttgggtgttcccagtccgaggcactgctgcactgaagcttaggcagcctgaacagaaggccctgccacaattcttacagccgtactacaagaaacatgaagcgggagatccccctctcacccgcccctgcaggctgctcccagggactctccaagcacacacagagagaagtcactgaagttatgaccagctgctgggaggaagaagaggagtggggcccctaaggcctagggatggtgagtaaagcaattcctcggtttccagtaccttattcaagccaaatgaaggtttatacaaaattcccatgctttctaccctgtcttcaattccctgacccagggatgtagaagacagatagataaagcccagtatttcaggccactgactcttccacaaaggagaatcagagagacagggcagagccgatgcctcctctgctcttgcagagatggagggaggcttggctcaggatgggctaacaatagcctccatttattaagcacttactatgtgccaggcactaaacccagtacttaacattcatcatgtgatttattccttacaatttacacacattattttacttaatcttgatgccaaccgtgattatccttattttgagagggccagagaggttacataacttatccaaaccaaggtcaccgcctcaataagacagcagagctcagatttgaacgctgactccaaaatccaggttggtgaatgctgcacggtcctgccttcctgcgtgacactaatttactccatctagttcccatcatctcctggtcagaatccctggccacaactgaggcagagggaacctgcagtttaccagaggaatctggcaggtctgtgatagggacaggacagtcagccttcaccatggtgccccggaagcaggaggaagtgtggtaatctaactccagcgacctggagaagggcaggctgcgggatggggaagatttcagagcagagggagtaacgggcttggtgtgatggacaccgcgcttcggaggagcagggtggagagaagaaaaccgccagatgctacactgggccgacagaaaagagtagctttgcaaaaacgacggcagcgcgctttacagtttatagggaactctcacctaaagcacttcagtggaccctcacataaaccctgaaagcgagagaatgttagccccattttacagaaatggaaactgaggatcaatgacttcatcaaaaccacacagctggaaaggagccgtaagaccaagtctttggacgttaagtcccgcgcttttccctcctctcctccctggccctgcagccctcggggagggaagactcgcctccttcttgaagagggtgaacttgacagcgcagccgtagcacctactctccatggtggctcccagcaccgcagggtctgcagagctgagatcacgccggccaagtcctgggccccttggaccctcaccccagctccgcccttcccttccctgccctgccccgccccacacgcccactggcactgtcccgccgcgacctagagcagggaatccggacgctctcctgcagccagcgtacggcagcggcggcaacgggggctgctgggagtcgtagttcattcacgactgccggcctccctcagagtcagtcaagcctgacccagaacacaattcccagagggctaggcgccgctcggagcctgcagtcctcacgcgcgcttagactcttgggagttgtagtacgaatccgtcaggccggaaccatggcagtgaccaaggagctcttacagatggacctgtacgcgctgctaggcattgaggagaaggcagcggacaaagaggtgagaacggtggcgaggaaggctgatcttgagaggtctggcggtccttcctgtcctagcgcctcggccactgctggcatccgctctccaggttcattcgggtc

SEQ ID NO: 13641 - DNA, 2300 bp, Homo sapien
aaggattataaaaccaatgcagggcaaagctgagttgaactcagattgtcagccttcctccaaagcctgggcttttcctggctgccatcttagtttccagccactcaaacacctcccttatcttcttaagtgagggcctaaaatttcatcattaaactgtcatccattcgcctttttccttttttgagacagggtcttgctctgtcacccatgcttaagtgcagtgttgccattgtagctcactgtagccttgaactcctgggctgaagtgattttcccaccttccaagcagctaggatgacaggtgtgcaccaccatatctgagtaatcttgcttttcattttttactttttttttttttttttttttgagacggggtcttgctctgtcacccaggctggagtgcagtggcatgatctcggctcactgcaacctccgcctcctgggcccaggcgattctcctccctcagcctcctgaatagttggggctacagacgtgtgccaccacgcccggctaatttttgtatttttagtagagacagggttttgccatgttggccaggctgatctcaaactcctgacctcaagtcatctgtccacctcagcctcccaaagtgctgggattacaggcatgagccaccgtgcctggcccattgtttacattttttaatggagacaagatctcactgtgttgcccggactggtcttgaactactggcctcaagcaatcttcccgcctgggtctcccaaagcagctaattttttgtattattattatttttttttttggtagagagagaatttcaccattttgcccaggctggtcttgaactcctgagctcaagcaatccacgcgcctcggcctcccagagtgctgggattacaggcgtgagccaccatgcctggccccattttaaaaaaattacaggctgggcacggtggctcactccagtaatcccaccactttgggaggccgaggcgggtggatcatgaggtcaggcatttgagaccagcctgggcaacatagtgaaacctcgtctctactaaaaatacaaaaaattatccgggcatggtggtgggcgcctgtaatcccagcttcttgggaggctgaggcaggagaattgcttgaacttgggaggcggatgttgcagtgagccaagatcgcagcattgccccccagcctgggtgacagtgcgagactccatctcaaaaaaaaaaaaaaaaaaattacagtgttcttctgtcactttttttttttaaagtttagaaattttcattataaaagactaaacaaaaataccctgccttagaatgcaagtatgtatgcctggaagtattagtccctgacacctgtgtataagttaggtttgcaggtttcctctgtgtcagcaaatacatgaatcgggggagggtcacgtggtaataaacatggcttcctaagcagttgcctcaggggagcgggcatagtagacaagtcttgataaatttgcctttacaagcaggtaaactgcctttataggccaggctgatagcagtttacattcggacacacccagacactgggggcactggtcctacgggagccatcaataactgacctccaactctatctaccagctggggctctgcccccagtagtgctacgctctgagtaagaatccctgccagccagggaccctgcttctgcggaatctgaccacagcttctcagagcccagagtggatccagccccaggaaggtgggatacagagggatctcaggtgagaacgactcaggtcccattccagagctggccatagagcagcgattggagccctgtacccttcaggaccccagggccccttcctcctccctgggcatggcagcctcttgacctttgctcatctgcagtttatgccactttgggccctagaagctgcagaaagggaggctggggcatggctctggagtgccactcactggctggcagtgaggagccaggagactggcattcccagcaccaaagtcctattgatctttgcccttgcccctccctgggagccttggccctcctcctgccttcatttcttctctgctggcctctcctgttctctgtctcctcacttccctctgtggctctgctcagaactggcggtttttcccagctccttgcccagaccaatacttccatgctgtcttcaagccctgcttcctgcacatctcccagcccagatggggagaacccatgtaagaaggtccactgggcttctgggaggagaaggacatcatccacagactcagagtccaagtcccacccggac

SEQ ID NO: 13642 - DNA, 2300 bp, Homo sapien
tgaccttgatggagtcagtgaacctttctgcaaagtggaagcaatttttagagttgtcctgagcattagcaatcctatgtcaagtgcctggagggaacacagtgggcatctcaacaaatggtgggtgctcaccacttgaaagtgagttatgggtttaagcaagttgaatctgaggtgagggcagaacttccagatgaagtcagaattgcaaaggccataaagcccagggtttaagcactgaagccatggaattggcctgcctgggctccaatccctactctgccgcttcaatgctgaatgacctgacaagtcagtttacctgtctgagcctgtttgctcatttgtaaaatggggctaaaaatactacctccctaggtttgttttgagtatagggtaatatgtgggcagtgcttaggaacagagtttgggcattgtcagtgctgaattcatgttggtttttataatggtgtgtataatggatgtaatgataaatttatggtgatgtaatattaccataaggtaatattttcctgtattaagattcttgaggtcaggcacagtggctcacgcctataatcctagcactttgggaggccgaggtgggtggatcacctgaggtcaggagttcaagaccagcctggccaaaaaggtgaaacctcgtttctactaaaaatacaaaaattagctcggcgtggtggtgcccacctgtaagcccagctacttgggaggctgaggcagaatttcctgaatctggaaggcagaggttgcagtgagccgagatcgtgccattgcactccagcctgggtgacagagcaagactccgtctcaaaaaaaaaaaaaaaaaaataaataaataaataaataaagattcttgaatgtgttagccataaggggaaatcaaatcacaacaaaaccctttcttcccagtgactgcacaatcattttcttcattcccagcataccaccattgttgtatatccaccagtgtgccagggtctgtggataaaccctaaacatccagagaaggggagacaggccccagattcccaccccaacacgcatcatgtgagcagctggaggatgttgcagttcagcaaaatccaagggttggccacaggatctgctaggcaaagctgctctggatgagaaactgggaagaatgttcccattggtttgggggttgttaagccatcaggaaaaggtttggaatctgtattttaagagagcatgctatgtgattccttcctccagccctgccttcatctgtctttcacctgttcagacccttgccgtagagaatggtctcttaagagttttttactcaggaggagcaatgagcttggcttcaaggagtccactgtttcgtgaagggcattaactcagctacttggtgaactggaacctccaggcttccaaggatgacatttccctggaagaaagtagccagcagcgtcccctttgtgaaagagaggaagcctgggctccagggaagggggcaacagtccaatgagccatagcagggaatggaccgaactgtacatacaagatgaggaggggcctcgaacaacagggaagccccgtggagcacgcaggggagcctggacgcggggaatcgcctccgtttctcaccctgacagcagggagggcttcccggagctgacagtgaggcagacatcccggatccctgttatcacaggtgcagccacgcaacttttgggttaccttcccgccacgaaatggaaatgatttcctgagggccggaaagatcatttgcatcgggcctcaggtctggggctgggaaagcaggccccggccggaaaggaagactggaggccgccgccccagaggccggaccctcgcgtcccggccgcatcccctcccggctgggtatgcgcttcgggcgcggggctccctcgcgaggctggactgggtggagcccgagagcccctccggggagctggctgccggggaggcaccggggctgcggggccgcggggcgggccgggcctggagctccgcgctagaggcggccgcagcgcaccgggcgtgggcggggccggcagcgcaagggtgaatgtcggccccgccccgacggcgctgactcagtttcaccagaaaccagggggagaaggcggccgagccccagctctccgagcaccgggtcggaagccgcgacccgagccgcgcaggaagctgggaccggaacctcggcggacccggccccacccaactcacctgcgcaggtaacccgggcccccgcgcgcaaggccgaggcgcaggcggagcgggctggagcatgt

SEQ ID NO: 13643 - DNA, 2300 bp, Homo sapien
tttgggaggctgaggcctgaggatcacttgaagccaggagttgaagaccagcctgggcaaaaaagcaagactgtctctacaaaaaaaaaaaattaaaaaaatgtagcctggcctgggggtgcatgcctgtaatcccagctacttggaaggctggggcgggattgcttgaggccaggagtttggacgctgcagtgagctatgctcgcgtcattgcactccagactgtgcaacagatcaagaccacatctctaaaaatagataaaagttataccaagtgtgcctgcctttcctgcctccccttccaccttctccacctctgccacccctgacgcagcaagaccaactccttttcctccttctcctcagcctacccaactggagaccacaagggtgcagacctttacgatgattctaactttctgatacaggtcagaagaaaaaagtttgaaaatatgataagcctcctgggcgtggtggctcatacctgtaatcctagcactttgggaggccgaggcagatggatcacctgaggtcaagagttcaagaccagcctggccaacatggtgaaacctcgtctccactaaaaatacaaaaattagctgggattacaggtgtgagccacctcgcccggccttttttatttttttatttttattttttttttgagatggcgtcttgctgcgtctcccagattggagtacagtggcgcaatctcggcccactcaagctccgcctcctgggttcacgccattctcctgcctcagcctcccgagtagctgggactacaggcgcccaccaccatgcccggctaattttctgtatttttagtagagacggggtttcaccgtgttagccaggatggtctggatctcccgacctcgtgatgtgatctgcccgcctcagcctcccaaaatgctgggattacaggtgtgagccactgcgcccagcctattttttatttatttatttatttatttttgagacaaagtctggctctgttgcccaggctggagtgcaatggcatgatctcagctcactgcaacctccacctcccaggttcaagccatcctcccacctcagcctccgagtagctgggattacagatgcacaccaccatgcttggctactttttttggggggttttttgtttttgttttttaagagagagtcttgctctgtcacccaggctggagtggagtggcccaatcttggctcactgcaacctccacctgccaggtccaagtgattctcctgcctcagcctcctgagtagctaggattactggcacccgccaccacacctggctaattttttgtatttttaatagagacggggtttcaccatgttggccaggctggtctcgaactcctgacctcaggtgatccacccacctcggcctcccaaagtgctgggattacaggcgtgagccacggagcccagcaacagcaggctattaatagttaaattttggggtagtcaaaagttatatagggattttcggctgactgcacagggtttctcgcccataattcccgctttgttcaggggtcaacaggttttttgtttgtttgtttgtttttaggatctgtcacacatgctgaagtgcaatggcactattatagctcactgtaaccttgaactcctggggtcaagtgatcctcctggcttagcctcccagaacgctggaattacaggcatgagccactgctctcagcctcaatatttaaaaaagtaattctttcattaataaaattatcccaactttttaatactcatgcaaacatatgcatagagttgtttcttgtaagttgaacaaggtttaatttgcacacttgtttaacctgaacatactgtattatatgttctgcaacttgcttcttcctcctaacaataaatcatggatgtctatctcttcttggtattctcatttgacgattctttgtccttgtacctgcgtgactcttggagctccagctttctgcctgcctttcctcctcccggggttttcctcctcctcgcctggcctcgcagggtgcctggccgcgggagatcttcgccgatgggtggggtccggggccgcctgaaacatgtagatgagatgggcggggccctacacaaacccgctggtagcgctgggccgactcgcccagcctggacccattcagtcagaggcagccagcgggacctgcttcaccgagcgcagcgaagccgagacccgggctggcccctctgctgcccccggagcgggccatgccgccgcgggagctgagcgaggccgagccgcccccgctccgggcccc

SEQ ID NO: 13644 - DNA, 2300 bp, Homo sapien
tcacgtggatccctcatttacttctcagcacagacctactaggtaggtatttgtctctgtagatgaggaaactgaagctaagagcatcaactgtgcagtgtcacagctagcaagtggctgggcagggataagagatacagcttgcccttggagatcatacatgcacttcaagtcttgggtcaaattcagctgctttcatacaggaatcctctcttttgatgccctagcagtcatcccttacctgtctcattgcaactgccacacttgattctgtggctctcaaagaatccaaagtccagcctaagaactgaagaatgagtaggtggaaatgcactgtggtaatcaacgcataagggagactgtactgagtctgccacaaacagggtccacccaggcctatcccatacatcccggagagccatggagcccaacaatggggtgctggggtccctgaggctgtagctggaagtactctgtgtccctaaggcagcactcctatgctgacctccaactgctaatgggctctgtgcagcagggacaaccctctgcacagtccagacctgagggcagatggcaggtgacctgggggtgaagtgttatgtatggagcagggcagctccctgtctgggatcacttttcttagaggaagcctcctgcctattgtcctgctcctgcacttccctcctgggacctggcaacctcaggtgggaaggctgcattgaggctgcaggcttggtcaagagaagcaggaccctggtgcgaagggaaatgagcctggacagcatacttgtcacctgccccaggactagtgcccctccaagccagagagcccagatagccctcagtggggctggtgagagtcacagttctccgcacgtggccaggaagttgagcaagagtaacccaaccacataaggtatggtgcaaacctggaaacttctgagagcaaagggatgctcttagttgttaggcgggggccgcccagcagagccaggacggtggcgaccctagtccagagccttccactttagcaaggtagaatccaagggccccagaagggaacagactccatctgggtcgcctaagcaggtgagagaggaaaacccaaccacagtcgcgccccagccctcgcaggtccctggctgaggactcccctctccacctcaggctgggcggcccccgccttcacgcttgctcccacttgtccctcgttcttgctaggcttggcaggtatttgttccctgctccttcacgctctcagtgccgtggccacgtcgctgggtacgccccaccaggcaagagacattttccgtcttgttctctgccacgtccccagagcctggaacagtgcttggcacagagtggacgctcattcgtggagtaagtgcctgatggataatccatcacttgcttttctagtatgaatggtctatttacgggtccagcgcccctgctggcttacgaccttttccagggcggggaggggctgtcctcatctctgtgaccccagcgcccagcccaaggcctggcacagagtaagtgctcaaccacattttggtgaatgagtgaatggaagcggcccagcaaccctgagccaaggagccactgtggggcaggtcagggcggttcctggcacagggcttcccactagcctggccaccagctctgcggtctcctggaagctggggggcctttgggtaagggagaagagtggccaggagttgtctgcgtgtgccctgtgacggtgggatagagacagcgattggattgaggaacgggaggttccccgaggctgtttagagaggcgggagcgggagctggtcagggaggctggacagaccacccgagggagcggagcttgggcacgaaagccaaaactgggcggcgcggggcgggtggggaaggccggctgagaaagccgggattgcctcctggtgtcaaagctcggaactgcagcaggatcctgggggcggggcttgtgttcagcagcactcgccacgcgcccagccctcagccctcgtctcgccttctgctggctggcccggcgacgttgtgcgccagcgtacgcggggctctgagaacccggaagttacgttttaggcccgcgtcacgggggcgggagtcagctgagctgccggggcgaggttgggatcacctggcaccggctgaagggagcctgtgatttttttgtagcgggggcggggagtaaggtgcaagactgcgccagattcaaggacgagggctgcccgattatctcgctgcataaggcaagagcaagaggatcctcaggattttaaaga

SEQ ID NO: 13645 - DNA, 2300 bp, Homo sapien
tccccgccttcccagctcctgcctggctttaagatggccctgccactatctgccatttaaccacaacgttgaggcccagcatgaaggtgagactgctgtggcctgtatccatggcatttggcagacatgttttctcatcttgctcctgtgacctgctcctccccacaaattacacatctttagttgtggctaaatcctagggagtcctggaatggggtctccccgtgacatcagcagagcaccctttgccccatggaccggtgttcacagtgcactgcccagctctctgggtgtgatctgtcagctggcaagacagttcctgcagtcaggccaacctcgctggccactgcaggctgctttcccctccagtctaatcctcttcctagccaggcatggggtctcacacttgtagtcttagctacttgggagtctgaggaaggaggatggcttgagcccaagagatggaagctgcagtgaattatgattgtgccactgcacttcacctgggtgacagagcaagaaccctcttttttttttttgagatggcgtcttgctctgtcaccaggctggagtgcagtggtacaatcttggctcactgcaacctccgccttccgggttcaaggattctcctgccgcagcctccctagcagctgggattacaggtgcacatcaccacgcctggctactttttttatttttagtagagacggggtttcaccatgttggccaggctggtctcgaactcctgacctcaagtgatccgcctgcctcagcctcccaaagtgctaggattacaggcatgagccactgtgcccagctagaacccctccgccttttttttttaaagaattttatctctggcaatacaggttgaactttgctgcagaattccctaaccactaaaacaagaggatctcttcatggactctgttagctgagagggctggaagctgcccatttttgatgacccctcagactcccgtcttcctccagaagcagaagtgggagcagatgtgggggaggggtcccattgagtagagggcatcctaattctgttcttcgcactgtcccaggaggtttggagggctcctgcttccttctccccatgtggcctaggctccccttacacctaccatagtcatctgagggctcagggtctttgtcccctgacagtgagtataaagctttagcctacctctgaaggggtcactttcttagagaaaacagactggggcctctgtctttgcacataatgggtgcctaatacttgttagttaaacaaacactgccctattgctccctgctcccagagggcttggctaaagcagcttgggacacccctgccccttctgtcttctcctaagccagcccatctggtcctaggctgcttcctctttcctgggaaaaggccccaggcttccctggcagggacagaatagggttccggtgagtcagggcaacgggaagccacagctcttagatccctggaagccaagcaagacatggaatggagagcagagcggaggccctcagggctttggccctaagcctggagggccagaggggggtggggtgggggagcagctgcgtgggcaggggccaagatgaatgagctactcctggagcggtcactggaaatagaaggagtggccacaggcagtgacgctgggaccagggcaggaggcctgtaaacaaggaagccacctgggggagacgcagggcggccactggtcctggggagcaggtgcttcctgaggcccgccctggagagggccctgggggccgccccgccgagtctgcagtgggcactagggggcgccgtctaccggcttcccgagcccaccgctccctaccctggctcctgggggtgtggccgccggagggtgtgccggcccagagtcccaggccctgcctgcccggcctctccctcccttctcctgtcaccgcggccgactggccaagggcaccagccctggagagggcacagggctcagcgtggccagctcggatgtgagctcattcccccgagaccaccagttctagttcctgcccctcccccaaaggctcgggtcgcaggctggtgcctggcacccaccccaaaggttgggagggggctcgaggccatcaggctccaggccgcacttggcgctgccccctggcgccagggaaacaaaggttaggggcccagagggagttatctggccccaccgccaccgggtgggggaaggggaccaagagggggcgcagttcccctccactcccccagccctactgattcttcgagacactttcacaggcgg

SEQ ID NO: 13646 - DNA, 2300 bp, Homo sapien
tgataatttgcaaagtacatttgggcacattagtctgggcgtgtatgagggtagagagtgttccagattttccagtattgggagagatgccttgtgtgggactagatgtctcccttgagggtcaggtaagcaggaccagcgccagaaaaggaggatgtttttattaactcctgggccaggatttggagttgagagaggacagggctaggtagggctggatgccagcttggaggggagcaaggggcacccgctggcatcttagagaggcaagtccagggatccatagggtataggcggagagaagatctgggagcccacttgccaggatcgccgggaggcacgccccggactccccctccctcgggcctgggactccgcctgcccataacctacattaactcccgagcgcagcctgggcccatctgccgccccgccccacctcggttccccacgccaacccgctcgcgccagatggtggctgggaggggtggccgtgcgtgggggaccccggagcccgtctcctcacctcgcccctcccccaacccacgctcccaacctcttgtttctcatccttcccccccccaccacacccgtcccccagtcctccaccaccaccacccaactcaaaaaaaaaaatcagaccatgctcggcattggcagctgttgggcttctcgccgctcccccacccttaccgcctcccccgggttcgcgccgcgtcccggctccccccccgcgctgatcttaccgcccgactacagccatcacctcgcgggcgggctgacagctgaagccacagggcccccgctgccctcggcgtcgcaaagagagagctccccggcacccctgagactgggagaagccggccctccccggtctgcggtctccggggatcacgccgggttccgagaaagcagctgcgctgctgccgcttggaggagtggggccacccaggggaccctctcgggcgagacttgggaagccgcctgaaactcaaacagctccgcaagcctccagttccaccccacatcccgccttatgaggcgaggacccgggccgacccggcctcagtccctcaccttgattctccagtggcctgagccaactctggcgtcaggagagttcctccttgccccagctgagcgacagggcgcggccgggggcttggggctgctggggtggggggaggcagtgggcgcaggaactgaagctggactcaggtgaggggacgcgctggaggcggggccagaacctcattaccatacagctgaggacgcgcccccctcctacctccgggaccacgccccgccctcccccacctcagggaccgcgcgtctgggtctctggcacgcgccaagccctggcagggggcagaagggagaaggcacgcgctgggcacgcccccccttagctagagagggagacgcccaacaggtgcacagagagggccccgagccttagacccttagcccctagccttgctcagagtggccacagagaggttaacgcttctgctggcttccctgctgcgctggggacgcgtggtgggtgggcactcataggttgggggccgttgagacaagggctccagaagctccaggaaggaaaaggagatcggatttccctagcgctggtttttgcattccgggcttaagttctttttacctgctttggaacactaggtaactagcgcctgctgcggatgcacagcctacagggactgcctagtgtctccgcccccaagaccatccccgaaccacccactcacctcctgccccattaccgggcaacccctctatcctccggcggccagggtctcagcccttaaccccgccatcacggaggactggtcacctcggcacgcgcagagctgggggacctagaggttgggagcggcacggaggggcggggacctgcgcccgactggctgacggggaggggggagcggcgggggcggaggccccctccgggcggcgctgggactgtagcagctagaggccgggaggggaggggagaatgaccatgagtctgagtgacaggcggcgaggagaggagccaatatatataaggaaggcccccagcgcgcaggtttcagtagcggcgctgcgcgcaggccgggaacacgaggccaagagccgcagccccagccgccttggtgcagcgtacaccggcactagcccgcttgcagccccaggattagacagaagacgcgtcctcggcgcggtcgccgcccagccgtagtcacctggattacctacagcggcagctgcagcggagccagcgagaaggccaaaggggagca

SEQ ID NO: 13647 - DNA, 2300 bp, Homo sapien
gcggatcacaaaatcaggagtttgagatcagcctggccaatatggcgaaacctcgtgtctactaaaaatacaaaaattatccaggcgtggtggcaggtgcctgtagtcccagctactcgggaggctcaggcaggagaatcgcttgaacctgggaggcggaggttgcagtgagccgagattgtgccactgcactccagcctgggcaacagagagagactccacctcaaaaaaaaaaaaaaaaaaaaaaaaaaaaaaaaaaagtaacaatgcattgaaaatcttcaggcatatggcttttcccgtattttgaataatttcctgaaggagtattgggtcaaagggcagggatattttgtgattcttgacttgtatcaccaagctgctttctcaaagggttgtttgtgccaattcagatacttcagcaatatgtggataccagtttcccacttcccggactacaacccacagctggtgagtggaaaagaggacattcttctaagaagctaccaacaaaggaggtgctcatatgaacgaaaggggacaggatagaagagaagagggagactgaatgtgggaaatggagagaaagcgaaaaagaaaggaataaccagaaaggaccatttgctggtaattttttttttttcctgattggaaaagtaattcatgctccctgtaaaaatccagactttttcattactgtttaagtttgatactgaaagtcctcctctggtgccagcctctgctaactgtttaggtatattcttccagattatttattacacgaatactttttgtttttaaagaaatagctttgtactatacacactgttgtgcaagtttcccacttatatctgcgacaccttcggaatgaatatgtgaagtgtgaagatcacgtttagtttaaatattgaattagaatcgaatgagaagccatgttgcacattgcccctgccagccatctcctggccagtttagagagaaggccttcagctgcctctgtttcccttttacagtcagtgacatcccctgagggcagtcccttgctgcgtattgggtcaacccccggcggcctgtggactcggctgggaggccagaagccgagggagaagaccagtagctggccatagtcttgtgggggcctcactgggccctccttgcccgctgctcccggaaccttgtgcctatggattaatcattgctgcaaaatctcacgtccaggaagaattaaacccatcgccttgggggcaagactagcctggcttttgcatctttatagcctttctccgcaggtgcagccaccacctccaaagtgactgccggtcggtccaagcgctctaacaggctcttccccgagcctacctgggctcgaggggtcccacacctggtccggggcgtagcccatgtgaggcctgcaagctccgggcgcctggcctacctaactcagccccgcagtctctgcagaaccccctgcagccccgtggcccagtttctccatttgctcacaatggccaacggcgtgaggcacttgagcggaatgcggacggtgcctccgacagctttcccgcagtgcatgatctcaggaggggccccagagacggaagtttacgacgcccagagcgctccttctggacgtgccctggactcgacttgggactgagtctgtgccgcctaggctggcagggactcggccagatgcactagcggcaaggctgggctgacaccgcctgggactcgctcgccgtacctccaaggggcccaggtcatgagggggcggctggggagacgcccgcccggtgcccgccctgggcccggcgggtgccccctgcccgccgcctgacgcaatccgaggcgcccttgctgcatgccggcgctggagaaacctcccctgccgttgcatcactcctgccaggtttgccacagaggtggagctgaaccaatcagcgggcgcgctgggcccgcggcgcggttaagtgagaagcagaatccgaagttgattggccaaaaggggatttgccccaccccaatcaccgcggcagctggccgcggtgggcgtggtctcccggcaagaaggtttaaagggcgcctccatggggggcgctcagctggagctaccgagcggtgccaggccaggtgtgtgcgtccgtcggtctttccgtgcccacgccggagaccagccccggaggccgcctgggcctatccctgtgccaggcaccatgaagcaggagtctgcagccccgaacaccccgcccacctcgcagtcccctacgccgtccgctcagttcccccgaaacgacggcgac

SEQ ID NO: 13648 - DNA, 2300 bp, Homo sapien
tacactacacaatttaatcataaagatggcgttttatgaattaaataaatacaattacgaaatattaacctttgtgataaaatttaaggataagctagtagaacttgcatgggagcacaaagcatttggaatcactaactgagagaccgccacccgtggtctgttatccatgcctctgtaggaaagttgtgtttaattcaatgtaaataatgggcagatttgtacaggacatacctaccttagtgattaaccaggatgtttatttcaaaatagttctttcaccgatacttatgtttgacattgatacgtcatcagttagtcacttcagcagtattcatagcatcttcattttatagtccaggaaacagactgtcagcagtcaagtgactttaccaaggaagaatagcctgaagggatgagagcatcctgatgtcagtatgtttgtttctggtgttttttgttttttgttttccttactggaatccacaaaataaaattaattttacactgtgattttagtacctttattctatatttgaaacttcacaaaacattacttacctttatgacctgtaatgcattagaatattttctaatcttttttctttctttaattaatttcttaatgccatctaaagcaccaaactgagcccttatttgtgtgtgtgtgtgtgtgtgtgtgtgtgtgtgtgtgtagataaatcttagagtcaaaagcctgttctgccgggcacagtggctcacgcctggaatcccagcactttgggaggctgaggcacgtgcatcacctgaggtaggagaccagcctggtcaacatggtgaaatcccatctctactaaaaatacaaaaattagccaggcatggtggtgggcacctgtaatcccgtaatcccagctactcgggaggctgaggcaggagaactgcttgaaccaaggaggtggaggttgcagtgagccgagatcgtgccactgcactccagcctgagtgacagagctagactccatcttcaaaaaaaaaaaaacaaaacttgtcctttgtgatctggtatgggcttgttcccagaagacattccgtaaatatttgttgctcgagtgagtgacagtggtacctattggtttatttgtaattcagtgtttctttgaaagaacataggaagtagaaggaaactgagaaaaccatatttaatcatttgtatgtaaggggtatgttgacattcatccagaagtatttaattccagcctgtcttcatggactgatcctaaattcaagttagcacataaaagtcacagcctgggtcttagttatttgagtcatttttctgggactcaactttcttcatcttaaaatgaatgctttggggccccgcacggtggctcgcgtctataatcccagcactttgggaggccgaggcgggcggatcacgaggtcaggagttcaagaccagcctggccaatatgatgaaaccccgtctctactaaaaatattaaaaattaggcaggtgtggtggcgagcgcctatagtcccagctacttgggaggctgaggcaggagaattgcttgaacccaggaggcagaggttgcagtgagctgagatcgcgcctctacactccagcctgggcgacagaacaagactacgtctaaaaaaaaaaaaaaaaaaaaaaaagagtgttttggaataataacattagtccccagactattataagtcatgattcttagagaaaaccaggaagctaggaatggtttgatttaaaaatatgacagtgagagaggtctgtacatctatggtaacatttttctgttatatttgctacatgtttatacttgtgttgcctatcagtcatctattagtgggcagcaaaagtttatctgcaaattggaagatgacctccatgtttggttgtaacaacagagcaacattgtataatgctttacagaaatacagtcaggcctaggtaaccaccaaaactctttttagtcctagactttatgttctgtattcagagatctctctctattgatacatgccattttttcttttcagtttttcctttaacatatctctcccttttctgcaggaatgacatctttgtgttcctgttaagcacacgagctggaggactgggtatcaatctcactgctgcagacacagtaagtaatgagagcacaatcaactagatatgcaggttttctactatgaaacctactatgtaggtttttctaatatggcattgtttgttttaccctttgcttttgtgtcacaaacttgcaaactttttatttctttgcctcttgtgttaa

SEQ ID NO: 13649 - DNA, 2300 bp, Homo sapien
catttaaagtgaaactttttcctctgtatctaaatttgacatgctctttaagaaaagatgtagaaagctaattttgagtactggagacctaaatttttaacataagcatttttaattttaaataaaacatgtagtacaaagcatgacctcttattaaatgagtaagtctaggtctgagggaaaaacatcggtgtgttttctgtgctgtgctgtgctgtgctgtgctgtgctgtgctgtgctgtcctgtgctgtcctgtgctgtgctgtgctgtgctgtgctgtgctgtgctgtgctgtgctgtgctgtgctgtgctgtcctgtgctgtgctgtgctgtgctgtgctgtgctgtcctgtgctgtgctgtgctgtgctgtgctgtgctgtgctgtgctgtgctgtggcaaggagtatgcagctatggagcctgtcatcctggcctatttattttcacttgagacttttgtatggtgcgaaaagagtctttagaaaaggctgacttcactactgtgtgcatattatagtcctggcggcaagacgcacacatctgccagtgcttccggggtaatgagacattcaagagcatgagaaagggacagaagaatagcaaaagctgtgaccacgtgaaaaccaggtcaaattccccatagtatggcattctccctcccttcctcccttcctcccttcctcccttcctccctcctcccttcctccctccctccctcccttcctcccttcctcccttcctcccttcctcccttcctccctcctcccttcctcccttctccttcctcccttccccttccttccttctccttcctcccctccctctctccttctctccctccttccctctcttttccttcccctcctttccttctttctttctccctcttcccttctctttcacttttcttctttctttctttcatgaccaagttagactaaagaagtaatgaacaaactttcttttctatctacaatattgcttaaggtattctttgtattcttccatgtcaggcatacatttttctatatctagcaatgtctagcagttcatgttgctacatgaagggaaattggatagtgtggtggtaccaaggttcacatatactaaaccagatttgatggaactaatgttaagagaaaagaatctagaaaagtatatattgggtaaaacattctaggggtagtcagggtttctctaaagttgaggctatatgttgagcattttgaacatagttattattttttaaaacctggaatcagaaagctatacatcaccttgacttagcaacttcaatgagaatactattttaacccagctcataaaaaataagtgaatgagccaggcacagtggctcacgcctgtaatcccagcactttgggaggccaaggtggacggatcatgaggtcaggagtttgagaccagccgggccaatatggtgaaaccccatctctactgaaaatacaaaaattagccaggtgtggcgcacacctgtaatcccagctactcgggaggctgaggcaggagaattgcttgaaccctggaggcagaggctgcagtgagataagatcacaccactgtactccagcctgggctacagagtgagactctgtctccaaaagaaataaaataaaataagtgaatgttggccaggtgtggtggctcatgcctataatcccagcactttgggaggctgaggagaggggatcacttgtggccaggagttcaagaccagcctggccaacatggtgaaaccccatcactactaaaaatacaaaaattaaaggcgtggtggtgcgcacctgtaggcccacctactcaggaggctgaggtgggagaatcgcttgaacctgggaaggcagaggttacagtgagccgagatcgcaccactgcactccagcctgggtgacagagaaagactctgtcccaaaaataaaaataaatgaatgtgttctaatttgggaatgaccacccctgggaatagaattattgctagtcagactttttccagaaaggtaataacaaataatgtgctttgttaaaagaactccctatggtgagttgtattcttttcttagtaataactacagtgctgaagagaagataattggaggaaatgttcattcttttattttctacctttatattattggaacaaagtaagaaacaggtttctgttgaattttgaattttagaatactcaaaatgaagatgaattaatgcgatacctgatagagacattatttagtgactggtctgtagaagttagtaagaattcagaagtcttcaggt

SEQ ID NO: 13650 - DNA, 2300 bp, Homo sapien
agactggattttttactctgtcacccaggctggaatgcagtagcatgatcatggctaactgcagcctcatactctagggttcatgggatccccccacctcagcctccctagtagatggtactataggtgcacaccaccatgcctggctaattttttattttttatttattttttatttttttgagactgagtcttgctctgtcgaccaggctggagtgcagtggcgcgatctcagctcactgcaacctccgcctgccggattcaagcgactcgcctgcctcagcctccctagtagctgggactacaggtgtgtaccactaacgcccagctaatttttgtatttttagtagagatgaggtttcaccatgttggttggccaggatggtctcgatctcttgacttcgtgatccacccacctcggcctcccaaagtgctgggattataggcatgagccactatgcccagccctaattttttattttttaatttttatagagtcagggtctcactgtgttgcccaagctggtctcagaactcctgggctcaagcgattctcctgccttggcctcccaaagtgctgggattgcaggtgtgagtcagtgcacccagctagttcatgattgttgtttagtgctacatagagaggtgatctgaagatctagtatggttcctaaccactgtgtatagtatgtgtttcttaaacatcatttagcgtttcctatcttactatagttttgctagggaaagttagagaaggcattaaagcaaagatgacatgtgagctaggtttcaaatgatgagttggcatttactaggaaaatatggtgggaatggggggctaggcaacaagggcagtgtgagcaaagatagagtaacatcgaaatatgcagcctgttttggctaattttcagatcattgtggctaagtggtatgtgaggaggttatgatgatgagaaactcagacagtaaggtaggtttgattatgggagaactttctttttttttttttttgagatggagtctcattctgtcacccaggctggagtgcaatggtgcaatctcggctcactgcaacttctgcctcccgggttcaagtgattctcctgcctcagcctcctgagtagctgggattagaggcacgtggtaccacaccctgctaatttttgtatttagtagagatggggtttcactatgttggccaggctggtcttgaactcctgacctgtgatctgcctgcctcggcctcccaaagtcctgggattacaggcgtgagccactgcgtccggcctgattattggaggctttctttgctgagatgagaagtttcaacattttactttaggcaaaaatgcacattgaagatttttcagcagttgaattcctttataagctatatgtggaaagtatatcacaaccggaagaaactggaggcaggaagaccacaaaatattatcagtctatactatatcagatgagggccagcagtagggcaatgggtatggttagaaaaggtggtagatttccaagctgaattgaaggatttaggaaatactagaacatgaggtgtgagagagcattcagaggtgagttaagtttgtctttcccaactgaaggaatggtaatgctgttaaccaatttagtaaattgtggaaaagagaactgtttttctgacacatcacatatgccattgctgcagactgagtggtactcttagagttagtagttgcaggtactggcctgggttatgtttgggaatgtacttttgtatgttactgtgatgggtgttagttggcacagttagaaatggaagaaattgcccagggaaagcaaatggaatgagtgatgaagagaagagggccaaggaatatacatttttttctgaatgattgtccacattcacaggtttatagagatactgagttcacatatgtttattctcaatcataatatggtttgtgtgtgttttcaactttaagctgatgctgaattttcttaaaaactacttttccaaatataaatgttcttattgatttttagattgagattctaatgtattgccaactgaccagccgacagaagctgctatatcaggcactaaagaacaaaatttccattgaggatttattgcagtcttctatgggctctacccaacaagcacagaacaccaccagcagcctcatgaatctggtcatgcagtttaggaaggtaagagcttacgtcagttcccttgaagttttgttttttgttttttgagatagaattgtcttgctctgttgcccaggctggagtgcaatggcgtg

SEQ ID NO: 13651 - DNA, 2300 bp, Homo sapien
ttttgttgtgatttgttagtagaaataacaggtattgtaatcacagttcagtagaactgaactgtgtttcagcagaggaaaacatctctcacataatacgattcttgtttatttaagcacaagaaagcagctgttcagttgtctttatgtgatcacaaggagagggaggaattgggatgaagtttgagaggaatttcatggagaatgctgattaagattgtgttgagctagaaatagtagagattgtaactgctttatagtatcttggggtttaaatatgtctgtatttctcctgttaaaatagtttcacctatcataaatatattaaaattttgaatcctgattgtcttgattgttgtagcttggtattatttggtagaagaaaccccagtactgagaggcagtgccgtgatgttttttgtgagcttgctttggctactggagaccatggcagtcctccacctccattgcatttccagcttcttacctctgagaatttagcctttctcttcccccaccctccgtgaacccagggataagtagaatgagggaatcagggatccacatacattggtgttaattgtatcttagaacaaaatcagttgataaagtgtgataatccataaattttgcttttcagatagtaaccattttaaagcccaggccctgaagaatgctgaaaatgcttaccatattcaccaagctcgggtgagtcttcagatagaaaggtttactgtaattggccctggaaataccccacaagcctttacttaggtggtcttcctttagtcttaatcacatttgcaattaaaagcatagactagcttgtgtatatgtgtgtgagtagctgtgtgtagggggtggagctgggtctctttcactttagattagtagggatactagaagaaaggcagaaaaacgaatattcagttttctagctttagcaatgtgttaatttcaagttagaacagtttgtatttttttttctttctcttgagtaatcatgggcaatacagtatgaaatgtatcatagatgtttaatgaaaaagaccatactcaccgggcgtggtggctcactcctgtaatcctagcactttgggaggctgaggtgggtggatcacgaggtcaggagatcgagaccatccaggctaacacggtgaaaccccatctctactaaaatacaaaaaattagccgggggtggcggagggcgcttgtagtcccagctactcgggaggctgaggcaggagaatgacgtgaacccggtaggcggagcttgctgtgagccgagattgtgccactgcactccagcctgggcgacagattgagactgcatctcaaaaaaaaaaagaaaaagaccacactcttggcttgttaagagagccatatcatggtttcaaaaaactgctacgttatttaatgccttctttcacttaagtaataacttgctctttgttatttatttatttatttattctttttttttttttttttttgaggcgggagtcttgctttgtcaccctcctgagtagctgggactacaggtgcgcaccaccacacccagctaattttttttattttagtagagacggggtttcaccatgttggccaggatggtctcgatctcctgacctcgtgatccgcccgccttggcctcccaaagtgctgggattacaggcgtgagccactgcgcctggcccaagctctttgttatgtatgatatagtgatgtttaacaaaatcagaaagaaactacaatcaggttgaattaagtaaaaaatttgctgtttttaatatactgcataggagcccctatttaacattgacagagtgtaagtcaaagatagacgaatgtgaccttccccaatttctaatataattgttacattaaataatattagtaatatgttttatagaaatgatgtcatatgatactacgttatattatcagattatgagaaattttgttccaattatttttcttagcacagggtagatatattgttatcttgagtcttattttcatgtaatatttttcctcttttttttttttctaattttttttttttttactttccagacaaggtcatttgatgaagatgcaaaagaaagtcgagcagctgccctacgggcagcaaacaagtctggcactgggtttggggagagttatagcctggctaacccatctatccgggctggtgaggatattccacagcccacaatttttaatggcaaattgaaaggttatcaactgaaaggcatgaattggttggccaatctatatgaacaggtgaattttagaa

SEQ ID NO: 13652 - DNA, 2300 bp, Homo sapien
cctgcctcagcctcctgagtagctggggggattacaggcgcgcgccatcatgcccagctaatttttgtatttttagtagagacagggtttcaaggttggtcaggctggtctcaaactcctgacctcgtgatctgcctgcctaggcctcccaaagtactgggattacaggcgtgagccaccgtgcctggccatgcattcaagcaaatttaactcttggttttttttcttgaggcagagtctcgctctgtcccaggttggagtacagtggctcagtctcggctcactgcaacccctgcctcccaggttcaagagattctcctgcctcagactcccgagtagctgggattacaggtgcccgccaccacgcccggctaatctttttttttttttttttttttttttttcagtagagacgaggtttcaccatgttggccaggctggtctcaaaatcccgacctcaagtgatccacccgcctcagcctcccaaagtgccgggattacacgcgtgagctaccgcgcttggcttgcaaatgtaactttttttttttctttttgagatggatttttttttttttctttttgatacggaatttcgctcttgctgcccaggctggagtgcaatggtgcgatctcggttcactgtaacctccgcctcccaggttcaagcgattctcctgcctcaggctcccaagtagctggactacaggcacccgccaccacgcccggctaatttttgtatttttagtagagatggggtttcaccatattggtcaggctggtctcgagctcctgacctcaggtgattcgaccacctgacctcccaaagtgctgggattacaggcgtgtggcactgcaccctgacacaaatttaactttttaaaggtcagttaactcagcacaagaaggctacttgatgaccttaataaagtactttttagttaaatgctaagggccaggttaaaatggattaaagaatgagacccaaaggaactgaattaacagcatatttaactttcagtaagttctaattcttatctacacctaggccttaccctaggcaattctcaccacacatcctggtagttgggtcgattacatttattatgttgtcttttttgtagagacggggtctcgctatgttgaccagtctaatggactgctctgagacgtttggcctgaggtgatccttccaggcaggaggatcacttcaggccaggagactgggaaccagcccagtagactgggcaacatagcgagaccccaagtttagtaaatgtgggtggcagtggactcaaattgtagaattggcacaggtaaaagcaattattcgcttttcagaggcacactgtgtggatgtgagaacaggctggcatttccgataacaggtctgcgtgttcccaagtccttgtatcccacaaccttcacgtagacatcttatctaactatgctgtcctacccaacctatagcgttcttgctcccagagtctaaatgggagccccaaactaattactgtatagtagtcgaactacacaccaggcacttccccgacaatctacaaccccatccaaaggggtcagaaactagtaacaaaataccagctgcgagcctctccttcccctaaagagatcttatcaacttggctgcaccttcccacctctagcctgcgggaacaaatatcccaggatcccgggcggtttcgattgacgttacttccgggaaaagtaaccttgcatcggcggttgcgggcctggaaagctctcgcgacattttctcctgcgagatctgcttgctcactgtagcgatgacatcctcctcctcctccccgccgcctttcggcaatcttcgccagtcccagtcccgactaatctgtactcagatggcatggatcagggtctcccctcgaaccccggttcgcacggggcgtcaggtggcagcggcggggtgcgagctgcgcgaggccgacggcagcggcactacgggtggccacgggcaggcgacgagcagtgagtgtgggcggggtgggggtaagccacccgtgtagcggctcgattgttctggcctggctatggcgcctctcctcccccccgccatggctccccgtgtccctgctccgctcctctcagtgagtgaaagtggccgccgccgccgccggcccagcgcccgcagccgcctcagcgccgccgccatcttggggtcccaggagccgcggagggagcgagctaggagcgtccacgcccaacgcagtcaccgtcccacggcctcagagagcgaaccgcggctccaccgtcggcggggcgac

SEQ ID NO: 13653 - DNA, 2300 bp, Homo sapien
atgaaaattagccaggcatggtggcacacacctgtaatcacagctactcgggaggctgaggcaggataattgcttgaatccgggaggtggaggttgcaatgagccaagatcacaccattgcactccagctctgggcgacagaggaagactgcctcaggaaaagaaaagaaaaaagaaagtagttaaggaaacgcaaagttgggttgctgggtgtgatgggttgtgtctgtagtcatggttactatggaggctgtagtgggaggattgcttgagctaaggagttttggactgtagggcgctgtgctgattgggtgcctgtactgagattggcatcaatgtggtggcctcccagg[450 bp omitted]catttctctaaatatatttctggcatgagatagctctctgtatatattcaactggtctgtttgtctttttaaaataccacaggtagcagatgtacttcagttttccatggaaacgggtggctatcttccaaactgcatcactactttgcaggagagtttaatcaaacaccttcaagtagcccctaaatatctctcctttctagaaaagagacaaaaactaattcaggtgggtgtaaaggatgtcctgtatgacattattttttttcaagtgttttctgagcagtattatcagcctgttatgtagaaaaatgacagctgccatgttatcatatgaacattgccaaaatcttaactgtaccaaatgggaatggtttatatctggtctcaagtggataaaagccaggatccagatttgttagctattaattaaaaagcagtcttaggccgggctcggtggctcacgcctataatcccaacactttgggaggctgaggcgggcggatcacctgaggtcaggagttcaagaccagcctgactaacatggtgaaatctcctctactaaaaatacaaaaattaactgggcatggtggcaggtgtctgtagtctcagctactcgggaggctgaggcaggagaatcgcttgaacttggagttgggggcaggggcggtggacattgcggtgagctgagatcgtgccactgcactccagcctgggcaacagagtgagactctgtctcaaaaaataataaataaataaataaataaataaacaaataagcactcttaaataaattttctagctgggacaagggggaaatttttgtgagaattttgatcaaggcaatggaaccaaaatcaccctagttatttctcccaaagtaaagtaaattttctttaccttctgacatccttgcatgcaaacttaggtcataattgtattggctgcaattctgttcacataatcaagtttgctgcctctagctttgagaagtcttgattgaccaacctctacccctctctttctctgttacacacacactgttaatgtaggagtatgtgtgcaagcatgtgtatgctcaaaggctatcaatagtgtgaaaatagaaggtaataatagaagaaaatgatagtgtcttaaattaagcaatactttaaacagttcttttcttttctttttttttctttttttgagacggagtctcgctctgtcaccaggctggagtgcagtggcgcaatctcagcttactgcaaccctgcaagctccgcctcccaggtttaagcgattctcctgcctcagcttcttgagtagctgggactacaggcgcgtgccaccatgcccagctaatttttgtatttttagtagagatggggtttcaccttgttggccaggatggtcttgatgtcttgaccttgtgatccgcctgcctcagcctcccagagtgctgggattacaggcatgagccactgtgcccagcctaaaacagttattttctttaaa

SEQ ID NO: 13654 - DNA, 2300 bp, Homo sapien
caaaggacaacatcactaggttagacaagtgcacgacaatcataaaaataactctaaggccgggcacggggactcacgcctgtaatcccaacactttgggaggccgaggcgggtggatcacctgagttctggagtttgagacccgcctagacaatatggtgaaaccctgtctctactaaaaatacaaaaattagctgggcgtggtggcacgcgcctgtaatcccagctactcaggaggctgaggcatgataatcccttgaacccgcctggaggttgcagtgagccgaaaatgcacagtgatcaggccattgcactccagcccggactctgtcgcaaaaaaacaaaacaagccaggtgcggtggctcacgcctgtaatcacagcactttgggaggctgaagcgggcagatcacctgagatacggagttcgagaccagcctgaccaacatggagaagccctgtctctactaaaaatacaaaattagctggacacggtggcgcatgcctgtaaccccagctactagggagtctgaggcaggagaatcgcttgaacccgggaggcggaagtttcggtgagctgagatggcgcctttgcacttcagcctgggcagaagagcaaaaactccgtctcaaacaacaacaacaacaacaaacaaacaaaactctagttcttcaaactagaacctcagcttgcagggaacgtgtggggcctcaggctaagctgtaaagccttaggtaacacttaaaactagtaacttaagttgacctgggaaagcctgctacgacaaaaatatcctggtacttgggtactaacagcagtcagaattcggttcttccttatcttatacgtgttctaaccaaacaggtgtgaaggggtaaggcaggtgaagcagtaagaactggttcacctgagagtaggcactaatttaacgggtggcttttacctttttttttttttttttttgagacggagtcttgctctgtcacccaggctggagagcaatgccgcgatctcggctcactgcaacctccgcctcccgggttcaagcgattctcctgcctcagcctcccgagtagctgggattacaggcacgcggcaccacacccggataattttgtatttttattagagatggggtttctccatattggtcaggctggtctcgaactcacgacctcaggtgttctgcccacctcggcctcccaaagtgctgggattacaggcgtgagccaccgtgccaggcctacctttttaatcaaaacaaacaatacaccatgagaataaaatgcaaaatttctcatttttaagacaaaataaggaacttcaaataaatggcggaccataagctaggaattcactgtcctccatcgttagggctttttcctccgaaggaagtttgggaaatctggatcctaatttcagccaagtggtgcgttcctcgaacttcagtctagaactaaaagaagaggggctgcaatgaaggaagaagtctcgggacgctccacgccacccggcggcggttatcaaatcacaggctgaaaacctggagaaaggtccgcgacgccggggacacacgccgcagaggcgacgcccgcccggcccaacgtccagtctcgtctgtttcccgaggagccaatcagcacgcggccccgaggccggctccccagcgccccctgcggccgggaggaggacggcagccaggaaagatgaagagcgcgtgcagtccccgaagggtacaccctagggttcccccccacgcgaagtttctctccgcaatccgtgccacctatcgagtaggattcctagtgttcgattcctgtgagaaaaggtagactacgctgcctgtcgcaggttagtttgttgtaaaactgttggtcaatgacgttgcccttttaattgcgtcgttagcgaccgagtggcatcgcccctttaaggccggtggcagctgcggttccgggggcggggtccgtcttcagcaggacttgggctggagctgggctgattcattcggggctggaactcgaacgctgacgttggctcctgagccgggcgctgcctcgcgcctgattggcgggtcctcggggccgccctccccagcgcaccacccctgggttccctcccgggtccgcagtggaaacactgccctctcccttcttgacccctagcccttccttccctccctccttccctcctgtcgccgtctcttctggcgccgctgctcccggaggagctcccggcacggcgatgggttctcgggcctccacgttactgcgggacgaagagctcgaggagatcaagaa

SEQ ID NO: 13655 - DNA, 2300 bp, Homo sapien
ctgcatatgggccggagtgagttactggtcatgtcattatcaaagacaagtatgatgaagagacagagctcaggtgctacatccttcattaactcaataagaatcataaaggtttactgaaaagataaaatattgtatgcatcaatacaattgtatcatacattgcattatcaaggactattcaaagttatgatggtattttacagcgcttcagaatcccgagtccttttgctcctttgttcagactaatgaggaagagactggactataaaaaaaaaaatcagttctgcagggcacggtggctcacacctgtaatcccagcactttgggaggccgaggtgggtggatcacttgaggtcaggagttcgaggccagccgggccaacatagtgaaaccccatctctaccaaaaatacaaaaattagccaagcgtggtggcaggcacctgtactcccagctacctgggaggctgaggcaggagaactgcttgaacctgggaggcggaagttgcagtgtgccgagatcacgccactgcactccagcctggttgacagagggagactccgtttcaaaaaaaaaaaaaaaaaaaatcagttcctagtacaaattcacacggagatttttggagcacatccaatttcaatagcgaataaaaaagtacaccagcatagtagaaatcaatacatatatgagattaggacagcaagtatcgtcgtgtaagtaaaaaactggtggtcacagtatccgtgttttttctctagaagttcagattgaaagaagtctcacaatcccagacccctgattgtttaaaggtctccaggcatcgggtcatgtctcccaaagccttactacacggtcttgctttctgggtggttttcccaatttgtgacaagaacttgtttgtaatttcccatagttgtcagaggttttaggtccttacccagaaacggattttctacagaatccatctcgagttcctgaatttgcttctcgggctttacctactgttcaggatgcctcttcatagggaagggtggtgcgaggcaacagaaaggaaaggagttcggggactttgatgggcagggtgcagaaaaggggggcgtcgacgctctacgagtgatcaagagtcccgattttgaagggaaggacagccccacagtagctagagccccgctccaggaagctgcagctggaagaacaggtcttccagctctcggtccccaaacctggaggctgcccaggaccccccaacctcacaggcacccgagctccagaccttagcgacagccgcccttggttgtgaggccagcctgaggcgcccggcgttcccacccccaacccgaactcacagccggtctccttcttgatctcctcgagctcttcgtcccgcagtaacgtggaggcccgagaacccatcgccgtgccgggagctcctccgggagcagcggcgccagaagagacggcgacaggagggaaggagggagggaaggaagggctaggggtcaagaagggagagggcagtgtttccactgcggacccgggagggaacccaggggtggtgcgctggggagggcggccccgaggacccgccaatcaggcgcgaggcagcgcccggctcaggagccaacgtcagcgttcgagttccagccccgaatgaatcagcccagctccagcccaagtcctgctgaagacggaccccgcccccggaaccgcagctgccaccggccttaaaggggcgatgccactcggtcgctaacgacgcaattaaaagggcaacgtcattgaccaacagttttacaacaaactaacctgcgacaggcagcgtagtctaccttttctcacaggaatcgaacactaggaatcctactcgataggtggcacggattgcggagagaaacttcgcgtgggggggaaccctagggtgtacccttcggggactgcacgcgctcttcatctttcctggctgccgtcctcctcccggccgcagggggcgctggggagccggcctcggggccgcgtgctgattggctcctcgggaaacagacgagactggacgttgggccgggcgggcgtcgcctctgcggcgtgtgtccccggcgtcgcggacctttctccaggttttcagcctgtgatttgataaccgccgccgggtggcgtggagcgtcccgagacttcttccttcattgcagcccctcttcttttagttctagactgaagttcgaggaacgcaccacttggctgaaattaggatccagatttcccaaacttccttcggaggaaaaagccctaacgatggaggac

SEQ ID NO: 13656 - DNA, 2300 bp, Homo sapien
ggttgaaacaaaataacttttgtccattttacaagaattttatgtaacttagtcccttcaagtttgaaatcacagtgtctcccttactcaagtttatgtctgtacggtcagctgcagtctactctgctgctgcctggatatatgaagtggaaacattcatcgaggggccagcacttttggcttcgacatggttttgtcagccgtggccacttcccattcattccagctaagacgcaatttctattcttgactccctgactccttaaatgtagaaaaagcctaaaaatccagtatatgtccattccttaaattgcccacctcctcattcatgtgcagcctcagcggtgacatactctggttttacatggctttttctttgcatttcttttttgagatggagtctcactcttgcccaggctggagtgtaatggcacagtcttggctcactgcaacctccgcctcccaggttcaagcaattctcctgcctcagcctcctgagtagctgggattacaggcacgtgccaccacacctggctaatttttgtatttttggtagagattggggtttcaccatgttggccaggctggtcttgaactcctgacctcagctgatccacccgcctcagcctcccaaagtgctgggattacagccaccgtgccaggccaggaatctgcatttctaagaatccacccagatgacagccctcttggtgtttggcaagcacagtggacctacactgcctacgctgggcctcgcttgtcataaccccgaagaggagccaccccacgtataccctccctgctgtcacgtgtccgtgtgaagagaccaccaaacaggctttgtgtgaacaacaagcctgtttatttcacctgggtgcaggtgggatgagtcggaaaagagagttcagcaaagggtggtggattatcattagttcttacaggttttgggataggcggtggagttaggagcaatgttttgtgggcagggggtggatctcacaaagtacattctcaagggtggggagaattacaaagaaccttcttaagggtggggagattacaaagtacattgatcagttagggtggggcagaaacaaatcacaatggtgaatgtcatcagttaaggctattttcacttctttgtggatcttcagttgcttcaggccatctggatgtatacgtgcaggtcacaggggatatgatggcttagcttgggctcagaggcctgacacctgcccctctgggaaatgatgcagaagaaaggatgccctacagttgggtgtagcaaacaacaaaactgccagttacagcaggtttcctctatgcaggagggccttcagaaaagtgacgaatccttctctcctgtattgaccaaagctgtaaacagccggacaacgtttgggccctttaagagtcaaagacagagacaaactggaagcattaaattttttccctaggtgttgtgctacccctggattaaaagcctgggcgcggtggctcatgcctgtaatcccagcacttcgggagaccgaggcgggtggatcacctgaggtcaggagttcgacaccagtctggccaacgtagtgaaatctcgtctctactaaaaatacaaaaattagctgggtgtggtggcatgcgcctgtagtcccagctacttgaggggctgaggcaggagaatcgtttaaacccgggaggcggaggttgcagtgagtcaagatcgcgccactgcactccagcttgggcgacagtgagagactctgtctcaaaaaacaaaacaaaacaaaaaccctcgggcctgagaatgaaattattagtactacagtttaacctaacagtggcttaaaatagtcacgcggcctagccacactatcttaccacgtggtacagcttctacggcggaaattttacattcttaataattgaattacaaaagcatttctccctgttacctcaattctgggacccaatccggatcgaaagagtggggcgagtgctattgattgacgtgcattccaaccaacctacgacgcaaggagagcgcgcgcgagcaagacgatgcccaataaacactcagccccagcggcgggggcggggcttgtgggaacggcccaccgcagggttggccaccttgagaagctgcgaagatggcggagtaaggcgtgccgctgcaaactggcctctgggccgggggcgagcagcccccgggaggccgagtgcatctgttggaccgtgcgaggtgagccgagaaggccagtgacggtgggacgagcaggcgccgaggaggtggcgtggcccagacg

SEQ ID NO: 13657 - DNA, 2300 bp, Homo sapien
acggtttcaccgtgttagtcaggatggtctcgatttcctgaccttgtgatccgcccgcctcggcctcccaaagtgctgtgattacaggtgtgagccaccacgcccggcccgtaatcagtatttgtaaatgattaatttttctgtactaagtctttgaaatccagtgtgtattctgtgttcacagcatatctcaatgcagatttaataatatataatagctacatatgactagtgattacagtataggacagcacgggtctagattcattagcctcctctccaagagcacattcaggaaccttctgcctctggccccagaatacacccaattccaagcaggcaattgctccttcttgctttgtcccctttgggtgggaaggggactcctatagcgatagggagtgtcttttattcaggaaaaagaaagggagctgtgggtctaactccgtttttgaagtttgtccaagctgcagaaatcttcctggttactggacaaagcaactaagaattcctatattttaaccgtaacgttgaatcaaactggtcagaatgaaatgaattgtctcaatgttaaagccaaaactcaaaattgaggagccttgcaataccaaattcactgactactttattgtcacttgtaaatcatagtacaggcaggtcgcaaagtttaccaggcagtattcaagtacataacattctagttgtgtttttctccagtttctggggttactgaagaattagccctggcatagcttattacaaactaaccataatcgcaaacttaaaagttctaatatcaagcgtgggcaacatactaaggcctctacaaaaaatttaaaaattagccgggagtggtgctgtgtgcctgtagtcccagctactccggagggtgaggttgggaggatagcttgagccaggaaggtaggggctgtagtgagctatgagcgcaccagtgcactccagcctgggcgagagcaagaccctgtatcaaaaagttctaatatctaaaaggattgtagtttatagtatgttattctcactgtaaaccaaaaggttatttttttcttttgtccactactagatacatctttcttagcctcacttcacttgtacaagccacctgggagaagtggccctcaggaagatcctaaaaccaatacacaaatacaactttttcatttcattaatacatcaagttcatataagagtcaaacaggtaaaagcagcatcccaaactgttttctcctcgtacatgtcagttccacgatcctcagtctcataaagtcagggactagagaccaatgtaattatcaatacgtacctgcctttgagtgaaccttcaatgccaactaggaagggcgcttccaaaacgacgttatttgtaactcctaggaagacaaacacgggtcagaacccatactctgcgggccttgaaatggaaaatctctcctctagacagactcatcctggccgtaaatatcaggagactccccgattccctgccccatccccaggccaaggagttatttgcttccaacttttcatcccgttttcttccccaggtggttctccgccacccggtggagaaagcgggaacaccctctcgggctagcctctgcctttcccgaacgcttcactgcactcactggagaagaccacggccccgagggaccgcgacaggtcccaggcgaggtgcaccgagtcggcgagcactgcgtgacactgtgcgcactggaacacagcgcacctctcaggctgcagccaagacggcagctgcgggccggcggctggctcctcagcccccagccctgcggggccgagcggcgaggaccccttcaccacctgcgtatcccactccatggaggtcgtaaaagaagcttggtcaatcgccctctcagtgccaccacaaaagtccccccggggcggcgttgcacaacgtgagcgatgccgcagcggctgagccgccatcttcccgcagccggcgccttcctttcgaatacacgccaggccccgccccaagcacagctcctgcgtcctcattggacatcatgggcaatccaagcactggagtccgagtccgcgcactcgttacctgaacaggcgttacaggccctttggcgcctgcgtattcgtgaagtgtgaaaaaagcgcgcctctgttgggacgggaaatcagcctttctattggtcagggttagaaaccccgcctttgaggcattttcaaccaatggaagcgcggcattcttcatttaaactgtctataaatttctgcctagtcaaagttaagagtggcgccaggga

SEQ ID NO: 13658 - DNA, 2300 bp, Homo sapien
acacacacacacacacagccaggcagataaaggagaaagaaggtgatctgaggctagagggtcaaaatgagcaatgggacaaagatagataaaagtgccaagtgttcagggatgcagccttggataaaagattctagctaggcagcaaaaaagcctaaggaatttaggctgagatattaaggctttgtttacgaagtatagaggagccactaaccactacagcccagaaatatccccaaggaaaaccctttggtcattcagccccaacaggcacttaggccctgattattttgtttaaacaatttaggtcgggtggggtggctcacgcctgtaatcccagtactttgggggctgaggcgggcggatcaggaagtcaggagttcgagaccagcctgaccaacatggtgaaaccccatctctactaaaaatacaaaaattagccaggcgtggtgacacgcgcctgtaatcccagctactcaggaggctgaggcaggagaatcgcttgaacccaggaggcggaggttgcggtgagccgagatggcgccactgcactccagcctgggcgacagagcaagactccgtctcaaagaaaaaacaaacaaacaaacaaataaaaaaaaaattgtgacgattgatttaagcatttactcactgtcagtatcacagcctgcaggagaaacctccagagtatatagcagtattatgtgggaagtctcaactattaacaaaatatataaaaccgctatcctacattaaatccccaaatcttcttctaacatcttgggttttttgtttgtttttgttttgtttgagactgagtctctctctgtcaccgaagttggagtgcagtggtgcgatcttggctcactgccacctcggcttcccaggttcaagcgattcttctgcctcagcctcccaagtagctgggatcacaggcaaaaagcttggatcacaggcgtgtgccaccacgcccggctaattttttaagggccaggctggtctcgaactcctgacctcaggtgatccgcctgcctcgacctcccaaagtgctgggattacaggcgtgagccacagcgccgggccaactctccaaacatcttgtagcctcggagtcaaagaccttactggttttgatagagaccatcaacccaacagtcatcaataaaaatttacccaaggaggtgctcccctaaaagtcgattttttttttctgacaggtccatcaataaagtatcaagagattatcggcaatattacaaatcactggagtctgtttggggttttccagaagctgagccaattatttacttaattgtctaacgattaacgacaccccttgtgctttctgggcctgagtttcgtaatcgacgccctgagaggtatacagtaatttcaaaacaaaacaaaacaaaaaacaataaaccatccctcggaatagagcttatcatgtgagcacccagacaagccagcttcaaaatgaggtgaaaactacagttcctcttccgtttatcagagttctaactgggactaccgtgaaccacatctactgcccgaggggcagggagagctgcctcagtcccgggcttccctctcggtcccttcgcaccgcatctccccgaggccgctattcccgccgcgcccgcccagggacccgcaccgccagcgccgtaccctcaggttggcccggagacccagactcttggctaagttctgcaggtcactgtacttgagggagtccagctcctctagagaggggatgatcatcgcgattcgaaatcccggcgatactcggaagatggatcaccaaacttcgtcagcgcggttcaaatccctggcgccactcttaactttgactaggcagaaatttatagacagtttaaatgaagaatgccgcgcttccattggttgaaaatgcctcaaaggcggggtttctaaccctgaccaatagaaaggctgatttcccgtcccaacagaggcgcgcttttttcacacttcacgaatacgcaggcgccaaagggcctgtaacgcctgttcaggtaacgagtgcgcggactcggactccagtgcttggattgcccatgatgtccaatgaggacgcaggagctgtgcttggggcggggcctggcgtgtattcgaaaggaaggcgccggctgcgggaagatggcggctcagccgctgcggcatcgctcacgttgtgcaacgccgccccggggggacttttgtggtggcactgagagggcgattgaccaagcttcttttacgacctccatggagtgggatacgcaggtggtgaaggggtc

SEQ ID NO: 13659 - DNA, 2300 bp, Homo sapien
ccaccccagttgcccagttttatttttgcatcataatacctgacgtcatatcattcatttctagctttcttgggtaactgtttcacctctgctagaagatcctggagggcaatcaccttgtctgtttaattaatcactctctagtgtctggaacagtgcccagcacaataaatgcttgttgaaggaatgcatgaatatatgctgataactaacatctgcaccttcagcacaactcttgaacaccacctcatatcattcaacctcctcactgggttctgccacaggtgcctcacttcatgcatttttgtatgtttggtgagattttgaaggtatattaagagagtattagaaaaatcaagaatgcctgaattctgccctgccaatcatccccttcccagagaaaacctcaagggtggttcaaggaacaagtagaaaataaggtaccactttattactagctgaaatagtgcctgatatcttgatgcagagcattctggtaaagtggattggagactgtggcttaggcttgcaccacaagcaaaagcttgagcacaaaccaaatttcaggatctctgctattctctactggacacatggcccatgataaaaggcatgagaagaatagagccaagcctggtggctgggcccaccttgagaaggatggctgtggccctcaactgcatggctgggtggaagaggaagaaaaaaagaacccaaccaaaaaacttgacttttgttttttaaacggagtcttgctctatcgcccagactagagtgcagtggcatcatctcctcggctcactgcaaccttcgcctcctgggttcaagcaattcttctgcctcagcctcccaagtagctgggactacaggcacacaccaccatgcccggctaatttttgtttttttattagagacggggtttcaccatgttggccaggctggtctaaaacccctgacctcgtgatccacctgcctcggcctcccaaagtgctggaattacaggcatgagccaccccgctcaaccaaacttgacttttaaagcacaggaaaatgtaaccaatcaaattaacattgttctttcaggaaagaacaagaagggaggttttcctaggctgggaagagaagctcagtgttcccttcccccggcagagacctacaaccatccccctaagaccccgtcaccttttgcattcctcatcttagggaccgtaccacacttcaccagctgtccaagccagaaacgttggcataacaaagtttccctcttcctcaactctcatgttcacactgatttcacttcctaagaaggttttgacttcatccatactgccttagccccgctccagttcaggccacagcatttctggctcatccccatcaaatgcatcttgcacattgtgcaggtagactactcattctgagtaatgcaaaattggtcacccactgccttgctgcaaactcttcagagactgcccttttctctgagagtaaagttcatactctttaaaggcttacaaggcctggtaacatcacggccctgctcactttcccaacattgtctcttactatctcctacaaacaggtccatgttccagccacactgaacttaagttcttcaaactccaccctcattgttgccttgctgtgccattcctctacctctttctctaccttctcttcatccttcagatctcagcaattagagacatcacatctttatctgagaactgccctgtgcagatacttgctgaagtctaacctagcagtcccaactttgatggccatgcctacctatgttctcatgacagcctgagcctcctagcgtgggcatttaccccactgtattgcaattgcctctttccttgtctaactttcccactcagatgtgaaattccttagagcagagacccattctttctaagtaatggttctagtcctatggtctgaccagagtacatttaatgaatacaagaacagcaaaaaatattcaacgtatcttccttgtttatttgacttttggctctaataataaggtctctcttgcaggcaaccaagttgttaaaagccttgaaaggctacattaaacatgaggcaagaaaaggaaatgagaatcaggtgagtaatgtttttcatgtttacctgttagctagcaaaataatcatatttggttaatgggcaattaacacacaactagtgatgatttaagacatgctgttggccaggtgttgtggctcacgcctatactcctagcactttggtaggcagtggcaggcggatcacttgagtccaggagttcgaga

SEQ ID NO: 13660 - DNA, 2300 bp, Homo sapien
taagtaatcccactgaattccagaatcatgaaaagcaggaaagccaggatctcagagctactgcaaaagttccttctccaccagacgagcaccaagaagctgagaatgctgtttcctcaggtaaacgtggaataaatggtatgtcaagtaactttaaaaaccaaaattgctagaagtagccaggtacattaatttcctaggactgttgtgacaaagcaccacaactgggcagcttagaacaacagaaatttactctttcatagttctagaggctggaagtccaaaatcaatgtgtcagcaggaccatgcttctctgagactctgggtggactccttccttgcctctgactactttgcgatggctgtcgacgcttggtgttccttggcttgcagctgcatcattaccagtctctggctctgacagcgcatgacattctctctctatgtcttcttaataggacagcagtcatattggattaggatccacccaaataggccaagcatagtggctggtgcctataatcccattactttgggaagccaagtcaggaggattgcttgagcctaggagttcaggaccagcctgggcaacatggtgagaccctgtctctacaaaaagtcaaaagaatcagccagccatgatggtgcacacctgtggtcccagctactcaggaggctgaggtgaaagggttgcttgaacccaggaggttaaggctgcagtgggccatcttcataccacttcaccccagcatggacagagtgagaccctatctcaaaaaattaaaagaacatccaaatgatgtcattttaaccttaatacatctgaaaaaaaattcccatatctaaataaggtcatatgacaggtaccagtggttaggacttcaacatatcttttagggggccacaattcaacccatagcaccatgttatagaatttcttttttttttttttagacagagtcttgctgtgttgcccaggctggagttgcaatggtacgatcttggctcactacaacctccacctcctgggttcaagcgattctccagcctcagcctcccaagtagctgggattacaggctcgtgccaccaggcccagctaatttttgtatttttaatagagacggggtttcaccatgttggccaggcttgtctcgaactcctgacctcgtgatccacccacctcagcctcccaaagtgctgagattacaggcgtgagccaccgcacccggccttcctttcgctttcttttgcctactaaacctctgctcttaaaaaataaaaaataataataaataaatgaaaataaaatatctcagtattagtttcacctgggcaaatctgctagggccctgagccttgccagaggaggagttagagagactgagagaggataattcattccagtatccaccaagcagttaaatctggaatttctaatcctgagccttctcattttccctaaaactttgagtgtcatactgaatctagaaaattacaggattccttgggtctgagatgggcttgggaatcttcagtttttaacaagtctcccaggtaatttttaatttttatttatttatttatttatttatttttgagacagggtcttgctctgttgcccaggctagagcacagtggcacgatctcagctcactgcagcctcagcctcctgagtacctgggactataggcatgcaccaccacgcccggctaatttttgtatttttagtagagacagggtttcaccatgttgcccaggctggtctcaaactgctgagctcaagtaatctgcccacttcagcctcctaaagtgctgggattacaggtgtgagtcaccatgcccagccagcattttttaatacaggccagttttttgtcctctgagttggtttgtctaatatgtcctcatgcttagaatcagactatgggctgttggcaggaatcccaaagagcaatgctgttgcttcctcagtaagcaccctaggaggcacaagtgctggtttttcctatggctagtcacgttaacttccatcagttagttatggtggtgtctgctaggttgtttctttgtgaagttactcttttaccacttggaattagtaagtatcctgtggagagttactctacataaatatcctttctttgttttgttttgttttgagacagagtctctctctgttgcccaggcgggagtacagtgacaggatctcggctcattgcaacctttgcctcccagtctcaagcaattccactgcctcaacctcccaagtagctgggattacatgtgtgcaccaccatgt

SEQ ID NO: 13661 - DNA, 2300 bp, Homo sapien
ggatttaaaatcagtaagagaagattttaaggagaggagccaaggacagtcaagcatttccatcctagaaggatgtggccatttacagaaatagggagacaggaggaattagtaggaggaaaaatgacacatttagttttagacatttagttttctttattgctcaaggatatttcctaaaaaacaacaacaaaaagacatttcgattttttctttttctgagacggagtctggctctgtggcccaggctggagtgcagtggtgcgatctcggctcactgcaagctccgtctcccgggttcacgccattctcctgcctcagtctcctgagtagctgggactacaggcgcccgccagcacgcccggccaatttttttgtatttttagtagagacggggtttcaccgtgttagccaggatggtctcgatctcctgaccttgtgatccgcccgcctcggcctcccaaagtgctgggattacaggcgtgaaccaccgcgcccggccgataacttatatttgaaactagaaaagaggtagaggcaggatgggccatggagagacagcccgcattaaaggttgtgggaagagaatagaagagtcagtgatgggggcagaaaggtaaggtttgagggggcaagtgtagagtctagagaagccaagccgaatttgaggaagaggaggcggcgcggaaactagtgaaggagaaaacatggaaagggctagtgtatttagtgagctccttcggaaccttagagaacaaaggtgttacggaactatatgctctcaaattcacactaagcactaaattcccgccgctatggtacattctggggaaaggaaaaacagcgcagtctggacccaagaaagctcacagcgtggcaaaggaagtgagaagtgagtgaaagatacaatgttgattctgtcttccctggcagtaagaaaaaaaaacaaaaacaaacaatgtttaagtgctttggccgggcatggtggctcacgcctgtaataccagcactttgggaggccgaggtgggtggatcatgaggtcaggatttcgagaccagcctggccaacatggcgaaaccccatctctactaaaaatacaaaaattatccgggtgtggtggcacacacctgtaatcccagctacttgggaggctgaggcaggagaattgctccaacccaggagtcggaggttgcagatcgcgccactgcactacagcctgggcaacagagtgagactccgtctcaaaaaaaaaaagtgctttaagagaggtgtgcacaaggtacaaacagatgccctgagcaactggcgaccgtgtggggcgagactcgggaagggctggtaggaggggctgctgtccaggtgcgtggtggtcctcaagaattcatgggggcaattccagcagaatcggccttttgaggcctcaggcagttcttgtggggaccgaggcgacagataaggaaggaagggatacaggcgcgttagcaataactgggttctatttgaaagacgcagggggccgggcttggtggctcgcgcctgtaatctcagcactttgggaggccgaggcgggtggatcacgaggtcaggagatcgagatcatcccggctaacatggtgaaaccccgtctctactaaaaatacaaaaattagtcgggcatgatggcgcgcacctgtaatcccagctactcgggaggctgaggcaggagaatcgcttgaatctgggaggcagaggttgtagtgagccgagatcgcgccactgcactccagcctgggcgacagagcgagaatccgtctcaaaaaaaaaaaaaaaaaaaaagacgcagggatggagtttgccgcctgaaaggatacaggaaggagaggcgaaaaacttatctgaattctcactgcttccttacaactggcgaccaagtggaccaaaaacctccaaaaacctcagttggctgggctacggggtccttgctgtccttcctgggcttctgtactcggccggaactttggtgttctgacgccttgtttggcatcggaagggaaaagcagatggacctatacgggtaaagtggcttctgggcggaaggtacactataggctcggggaggtaagcggcggcaggccggcggttggtgtgtcccgggtgtggggaggcgacagagccctggcacttgagggttgagggggcctccccagcgcggcgaaccgtctagcctccggaggccaggccgtgagtgcgggaggtatacgccaaggcggaagaattttgccactcactacctgtgtgacctcgggtaaattagccttgg

SEQ ID NO: 13662 - DNA, 2300 bp, Homo sapien
ctgcctcagcctcccaagtagctgggattacaggaacacgccactatgcccggctaatttttgtatttttagtagagacagggttttaccatgttggtcaggctggtctcgatttcctgaccttgtgatccccctgcctcagcctcccaaagttgggattacaggcgtgagccactgtgcccggcctaatttttgtatttttagtagagatggggttttgccatgttggccaggcaggtcttgaactcctgccctcaggtgatcggccctcttcagcttcccaaagtgctgggattacatgtgtgagccaccacgcccggcccctactttatattcctaatcactaaaggaaataacttctggagctgacctttttatcagctgacctcaaacttaagtataaaaacttatttcctatacacaccagttcccaaaaccttcttctctcctcttgtatttcatttttttgatgaagggctcacctgccactagcttcctaagctagaatctgaacatcaataggtatctgggagcactccttcccttacccctatcccaaatcctggggattctacgttccaaattatccagagtccatccacttctttccattcccacagcttcgtccttaggtcaggacaccatcatctcttgccaagaagacaacaacaatccaagcgatctccctgcccttagtccattcgccatactgcggtcagagtaatctttgaaaaacacaaatcaggcctgggtgcagtggctcatgcctataatcccagcactttgggaggctgaggcgggcggatcaccggaggccaggagtttgagaccagcctggccaacatgctgaaaccccatctctactgaaaatacaaaaattagcagggcgtggtgaagggcgtctgtaatgccatctattccggaggttgaggctggagaatcgcttgaacccaggcggcagaagttgcagtgagccaagatcgcgccattgcactccagcctgggcgacaagaacgaaactccgtctcaaaaaaaaaaaaaaaaaaaaaattagccgggcgtggtggcaggagcctgtaatcccagctactcaggaggctgaggcaggagaatcgcttgaacctgggaagcggagttgcagtgagctgccactgcactccaggccgggcaacaagagcgactccgtctccaaaacaaacgaacaaacaaacaaacaaacaaaaaaacaccaccacaaatcaggctgggcacggtagctcacgcctgtaatcccagcactttgggaggccaaggcaggaggatcccttgggcccaggggttcgagaccagcctgggcaatatagggaggccccgtctctactaaaacacaaaaccacacacaaatcaaatcatgtggttcttcagtttaaaatctttcaatactcaagttcaaactccctaattcagcttacttattaggatctgagtgaggcagtcgccgtgtccttctccagcctggtctgtcgcctatccccacccacaatctctgctctggccataactaacttcagttctccgaacctaactttattatcgccgggccattttgcctacgctgttctctgcatgcaacactctactctccttttgggtaattcagatgcattctccaggtcccagctcagctgtcattcgcacagcccgggtcggcagtctccagcccccaaccggtgtccaccgcgtggtccaggcgacttatgtcttccaggccgtcggccccttaagtacacgccatcagtgttggacagcttgaaagtaggtagacacgtgagccccctcagagagaacctggatccttgcggctccagcccccgataggaagagagcccaccaaacttcggctccgcagcagagatacagccaaggactccagggcagtcgcgggtaaagccaccaccactctctgccgggaaccagcgacgggggaaggccccgcctctcacgctgcgtcgggggcggggcagggcggggcacccggcgacctgcgaacggcgtgcggcgagcagggggcggggccaggggggcggagcggagcgcgcatgcgcggtcgcctttgtgtgggtcgagcagcggcggcggcggcggcagtggcggtcccactggcaggcgggcaagaggggagtccgggcggcggccggcgtgggagccgggggaccaccatggtaaagaagcggaaaggccgcgtcgtgatcgactcggacacagaggacagcggcagcgacgagaacctggatcaggtgagggcaggccgcggaggcgcg

SEQ ID NO: 13663 - DNA, 2300 bp, Homo sapien
caccttcccacatcctgacgcaggtcagtgtagctgtgaaggaggcagaggagtgagtgtctgagacacgagtgatccaggtccttcaagctgcagagtacatccctcacacacatactcaagattcctccagatggttgtcctagagaaggtggcgatgtgatttcccaggttctccgtgaagtagtcaagtattcaaactcctctatgcccttcttcctcttaccccttcattccctctatttctcctgcctctctcattgccattctttcttacattattttgcttccttcctcagttctccaggatcttcacctatttgtttattttgagatagcgtatgacttgtcacccagactgcagtgcagtggaatgtcatggctctctgcagcctcgacctcctgggctcaaataatcctctcacctcagcctcctaagtagctgggaccacaggtgcatgccaccacactcagcttttttttttttttttttttttttttttgagacaagttatcactctgttgcccaggctagagtgtggagtgtggtggtggagtgtggtggtgatctcagctcactgcagcctcgacctcccaggctcaagtgatccttccacttcagcctctccccgagtagctgagactacaagtgcacaccaccacacctgcctaatattctgtatttttagtagagacagggttttgccatgttgcccaggctggtctcgaactcctgggatcaagcaatctgcccgccttgccctcccaaagtgctggggttacaagcctgagccactatgctttgccgaagattcccgtcttcccactgaaccttcttctttccttctcctgggccattcctgagccctggctgaggggagagaagggaaggaaagcccctcctgcggccatctcagcatccaaggcaatccttctggggctgctctgtctccagggccccagccatccccagacactgagtgcctgaggggggaccctcactcctgtggcactatggtaagataggaaacagtggcttctcctcaaagcagcctcgccggtcggtcagctgactaccaacatgggaagtggccgaagatccacatggaatgacactgataagcactttgcagtgtctgaaactcttaaacatcagtgctgtcttcctagttttacagacacaactctgtgggttggatgaggtttttctaaatgtacaaatgcagaaatatacggagggagtaaagggactgcctacaaatcacatctagagtgtggtgtacctgatttcaagtcttttattttattctcgcagcaacgggagaatccgcagtcgagggaggtgaaatgacttgctgaacgccacacggcggactccaagccccgagctcctataacagaggaggaggaaggcgggctcagctcctgccacccagcagcgggggagatgcagcccgggactaggctgggccatggggacagatccaggccccgccccctgaccttgttctctgcccgccgggaagtggggaacttgcggggagcagcctcagctagtccctggggcagagtctccacttgggtgcacgccctggggtggggcttcttcgggaagccgggggccttcaactctgctcaggagctcgggccggagaaaggccccgagacttgaagcccttgcccgggagggatgaacacgcaaaggaacccgaggaacggggtaggggaccaagagtaggaccagcttctcctgcgcggggacagggcctgtggagcggcctggaggaatctctcccagccgcgaagcccgggaaggctgcgaggccccagcgcggagcggcccctcccacctccccgagggcaggcggagcgaagcctcggggcccgggcccaggttttgtgcctacggaggctggacttccccgccaccccgaggagtcaccgagagccttctctccctcgcaggggccctgggaggcccgcgctttctctgaaagtggaaggagtgggcggggggcgcggccgaggcggggcgcgggcgtgcagcggcgcaggctccgccccggggccgtctccagccgggggcgccgagccgctccagtccccggcgcgccgcgggctggtgggctcagcggcggcgccggcactgggaaatgaccctgcccgggggcccaacgggcatggcgcggccggggggcgcgaggccctgcagcccggggctggagcgggccccgcgccggagtgtcggggagctgcgcctgctcttcgaggcgcgctgtgcggcggtcgctgcggccgcc

SEQ ID NO: 13664 - DNA, 2300 bp, Homo sapien
agagtgtagtggcatgatcttggctcactgcaacctccgtttctgaggctcaagtgattctcatgcctcagcctcccgagtagcaggggctacaggcatgcaccaccacaccgggctagttttttgtatttttattagaagcggtgttttgccatgttgcccagggtggtctcagactcctaagctcaggcaatccgcccacctcagcctcctaaagtgctgggattataagtgtgagccacagcatgtggccccaataggttttattaagcaactactgtatcagcaaataccaatgattctcaaactttgtgacaaaaatcatctggaggatattttaaaacagatcactgggtcctaccaccagaagctgctgattcagtacatctggggtgaaacccaagaatctgcatttctaacaagttcccaggtaatactgatgctgatgttcagaacaaaccacacaaccacaatttgaagagcagtggcttaaagagactttgcaaggtaaattctgtgatctcatagtgtgatatctagtgttaagtagggcatagagaccagggtttttttgttttttgttttttttgagatggagtctcactctgtcacccaggctggagtgtagtggtgcaatctcggctcactgcaacctctgccttccaggttcaagcaattctctgcctcagcctcccaagtagctgggattacaggcacctgccaccacgcacggctaatttttgtatttttagtagagacggggtttcaccatcttagccaggctggtcttgaactcctgaccttgtgatccaccccacccccaccgtccccttggcctcccaaagtgctgggattacaggtgtaagccaccacgcctggctgagaccagactttttacaaaatcactgttctgtttacaccttgaattatactcagactttaccaagtagctaactactataacttctcttttgaagtattttgtattaaacataggtctcagactttcaagttaggattttttttttttttttttttttgagatggggctttgctcttgttgcccaggctggagtgcaatggtgcgatctcgtctctgcaacctctgcctcccaggttcaagccattctcctgcctcagcctccagagtagctgggattacaggcgtgcgctaccacgtgtgtctgattttgtatttttagtagagacgggattttgccatgatggtctagctagtctcgaactcctgacctcaggtgatctgcccgcctcagcctcccaaagtgctaggattacaggcatgaaccaccgcacccggcaaatgatcatttaagcaaatgatcgaagactcaagacacaaaactacctgaagggagtggctcccacatttgtagggtaccttacagagcaatttcccttcatatgattttgcaggtggtggggaaactctcagggcagttgtggcctgtgctacatcacccattgaccagaggtgccagtactagtgctcaagatcaatcgatcgatcggtctacctacctatcatctattgaccttcagtgctactaaaaacactcggatcttctaacgtctggtccagtctttcaccccatcacagtgagaggctgtgcacaggggtaacacaggcaacggaattatatgaggcaaacacagagatccaggtttctgggagtagcaatgaggttcagccttgcagtcacaaaggcaccactaaaaggcacaagtaatggcaggtaatgaggccttacttggagcagtttagagtacttcccacgtgtggtgacgcatgccacacactcaccaccaccaccactgccacaaatgaagtgcacactccactgctcctgtcctcaggaacctggaagcccccacctggtgtccgaggtgtggctcccactttaagcgtggggcacctcctctccggcctcaaacctaccggagctcccagcaggctgcggcacatctgacggctggaaactagaacccctgggtggggactccttaaggctcctcccggaagcgtagggacctcgctgcccacacgcccctccctttcctcctctggcgtcctggggtctgaggtgggcgtggccagaccagctttaggtccggggagtgtctcgccagcggcagcacacccctgtaagtggtggccagggctgccgtggcaaaatgagctgtcaactttaggttgacaggggtgtggccgcgaccgcaagggcttttgttgccgggtggacccaacagggatgggctgctggggacagctgctggtgtgg

SEQ ID NO: 13665 - DNA, 2300 bp, Homo sapien
tagcccggcatggtgacaggtgcctgtagtcccagctactcaggaggctgaggcaggagaatggtgtgaacccgggaggtgcaggttgcagtgagctgagactgcgccagtgcactccagcctgggcgacagagcgagactctgtcacaaaaaaaaaggaaacctactgaaacaggccaggtgcagtagctcatgcctgtaatcccagcactttaggaagctgacgtaggtggatcacctgaggtcaggagctcgagaccagcctggccaacatggtgaaaccccgtctctactaaaaatacaaaaattagctgggcatggtggcgggcgcctgtaatcccagctactcgggaggctgaggcaggagaatcacttgaacccaggaggaggttgcagtgtgccgagatcatgctattgcactccagcctgggcgacaagagcaagactccgtcttaaaaaaaaaaaaagaaagaaaaagaaaaacctactgaatcagaaactcagaggttgaggcccagcaatctgtttcgttttgtttgaaacagagtctggctctgtggcccaatctggagtgcagtggttccatcttggctcactgcaacctccgcttcccaggttcaagtgattctcctggctcagcctcttgagtagctgggactacagatggacaccaccatgccctgctaatttttatatttttagtagagatggggtttcaccatgttggtcaggctggtctcgaactcctgaccttaggtgatctgccagcttcagcctcccaaagtactgggattataggcatgtgccactgtgcctggccccagcaatctggtttaacaagacttccagttgattctggtgcctgttaaagttggaaagccactggactaacattggctgccccatgatgtcctttggtctagaaatgatttacttaaggtcctactatgtgcatggcaacacgttgggtgctcagtatttagatgcaaagtacaaggtctggtgcccacaaggaactgacagtctattcaagggaacaggacataagcctgtgaaaaggtaaccggtgacagttggtagttggcagtgtgttcttagcataccacacaactggtgcaggcggtgagattccaggtgaatccaaggaaagtttggtgagtaggcgtggctggcagaggttttagagttgacgccagctaggccttaaagagttatcctttggagacaggggtggcagggaaaagagggaggatttccaagaagggagagtgggatgaacaaaggcaagattctggagaagatgataaccttgctagcaaggaagctttattccctctcttctcaccaccactatttctgcagtgcacactggcagtgttctttccttgggcctttttcatggttaccttctagctcttccataaacacattcgtcacgttggggtgtgtgtgtgtgtccacgtttctgtgtgctgccgtgggcgtgggtgctgggatgtgggatgtggtaacactggctggtgagtgcagagggacgtctgaggaacgctgtgtccctgccaggggtgtcgtaagtgcagaaggggctgtgcctgctgtacatcagaagcatgtgtgggccaggcgcggtggcacatcctgtaatcacagcactttggggggccgaggcgggcggattacctaaggtcgggagttcgagaccagcttggccaacatggtgaaaccccgtctctactaaaaatacaaaaattagccagacgtggtggcgggcacctgtaatcccagctactcgggaggctgaggcacaagaatcgcttgagcccgggaggcggaggttgcagtgagccgagattgcgccacagcactccagcctgtgcgacagagcaagactctgtctcaaaaaaaaaaaaaaaaaaaaaggatgtgtgttctgggtgatggtatagagcttacgtgggggtaataaaccgccagccgcgcagcaccgcgctcaccagtccgctgcactgaacaagcaaagcccagaatgctccgagataagaccgggagaggcggggctgggctgcggggcggaagctggaatctggcggcggcggaaacgcgatctctgcggggcaagatggcggcgcccagacaggcctggagcacgtaggtggcggggctggagggacggatttcaggtgatctgggaggaggacccagggtagcgtgtccagtttctttgctggaacctgcctgcgggcctttggtctgtaagggagcaactgtggcctcctctgtgcatagatctcgggcacggc

SEQ ID NO: 13666 - DNA, 2300 bp, Homo sapien
gagacggaagtgagccacacactctgtgtcctcgcctcaccaggaaactactaaagttcctggggaagcaaagtagaatttcataagaacaaaatggatggagaggagaaaacctatggtggctgtgaaggccctgatgccacgtatgtcaaattgatatcatctgatggccatgaatttattgtaaaaagagaacatgcattaacatcaggcacgataaaagccatgttgagtggcccaggcgttttatgggtttggcttttaaatttaggtctttggtcttaagttaatttttgtttatgctgtgaggtcagtttgctgagaacgaaaccaatgaggtcaattttagagagataccttcacatgtgctatcgaaagtatgcatgtattttacctacaaggttcgctacactaacagctccatcgagattcctgaattcccaattgcacctgaaattgtactagaactgctgatggctgcgaacttcctagattgttaaataaaataaattataataaactgttaactcttttcagtatgtaatacctgtagatcagttagtaactttttcatatatagcatgttgcctgtatgcagtttaactatataaagttcattgcaaagcagattatcttgtttttttcatagcaatcaaagttgaaatttgtttgctacatcaacaaattaagaacattttcacaaactgagaaataaacaaatatgccaattaaaaaaaaaaaaagaaagaaacagagacagagatatctggcccctgccatccatgtcttgacagtgcctcatgagtctctcctcctgctgccgcctgggggcgcccccagctgggtctcaggctgctgccagcactgctgttgttatcattagggtaattaataaacaagcactgctggggccaagtggaagaagaggcaggcccctgctgctcaggagaatccctgaaaagatccagtgagcctgcggcaaccggagctgagtggctggtccctcctctctacccaggacctctggaaggggtgtggggtgggcttccccctggagggaagggcaaggggaggagcacacttggtaggcttggtttggaaccagctctgcatgtgcctaacaggatgtctgtgggcaaggccaccctcgtgattactggttgtggggcaggctctgaagcaattattcattcatttaacaggcatctgcctatttatttatggaaagcctactgtgtgcaaggtggtctactaataatagctaatgtttgactggacagtgtgacgacacagccaactttcacaccaggtcctgggaaaaggggtagaagcaggggaagcaaccaggaaaaatgacagcccaaaaagatacgggcaattaggctttggcctgtgtagtgtagtggtggggatatatattaggtaaaacctggggattaccaagatcttgggaaactcaggacccaagttggaaaacatacggcaattggggctggagaaaatgggcatttttcaggtgggagggacttggagataaaggcatggcaataggacatgaatatggggattttgggtgaatggctcaatgaaagggaggcacgaagggatgctagccgatcctgttgggggagccccgggtcacggcagtttcggggagccagatggatgggagtgtctaggggttgaggtgctctaagtcctgagagggggatgctggattctgggatcagagtccgaacaagagttggggtgtggtgggggctgacagcggggttttgagggaaggctctggagggctgggttagaaaagatgccggagcgggtttagggaaaggaggggcgtggccggggagcccatcctggaggccaagccggatcctcaggtttggccagggggcggctggggccggcgtgccggcggggcgccggcggggccgcgggggtttgcggcgctggctgggattcgcgctccgagccagtcgccggggctccgcgggggggcggtgcgagctcgggctgcgggcgggccgggaggaggcggcggctccgagaagaacatgaatcagcggcggcgacggcggcgacggcagtggaaggagcgcggtggcgcgggagcggccccggggaccccgcgctgctgacggcggcgaccgcggccggaggcgggcgcgggtctcggaggcggtcgcctcagcaccgccccacgggcggccccagcccctcccgcagccctcctccctcccgctcccttcccgccgcctcctccccgccctcctccctcctcgctcgcgggccgggcc

SEQ ID NO: 13667 - DNA, 2300 bp, Homo sapien
tgaaggtttattggtcaaaatattaagagagaaactatttaatagtttgttagctgatttataatgtttaaatatttagacatatagtacgtggatctctttgtactcttgccctgggcccccaaaatgtaagatgaagggctggttcatagtgccctaggctcccagttttctctgagcttcagaagctctagaactttggagtggcatgtaaacaggcacagtaagtggtaagtataccctaagagtttcgtaccaagtacaaaaggacaagagttttctggagtggttgagaaaggctttcaccaagaaagtgatatttgcactgagtcttaaaggatgagtaggcctttgctaggaagagcaggtcattccaagtgaaaggaacagcatttgcaaaggtatgaagatgtggaaccctgtgtattattggggtgggggcagatgggagggcgtgggttgcaagtgtttgctgatagaggaagcattcattcaagcacccataactatacccatcccatcttccatctctcacaggctctcccctacatcattagttttctgcttttctgtaggtgacacaggccccaggaggctgggaagtcctggctgttgtggtccctgtgcccccctttacctgcctgctccgggacctggtgcctgccaccaactacagcctcagggtgcgctgtgccaatgccttggggccctctccctatgctgactgggtgccctttcagaccaagggtctaggtaagggatgcatagagcagagcgggtgggcagggctggagccgggaagggggccgtgttggctggagttctgaatggtgctggtagagatggaggttcaggcatcattcggcaaacatttactgcatataactacataccaccttgtaagtagttcttgtaggtggaacagataagcaaactggaaaagatcagataatgtggttgataaagagtgtccccaggtggttaaggaaaccccccctaaaaaggtctgaaggataaagatctgaaggatctgggatctgaacgataaagaagaagccatgtaaatatctgggggaaaatcactgccggaagaaggcacagcaagtgcaaagaccctatgacaggaacttgcttggcaattgcaaagaggctggcatagctgtgagaggggagtggtaaggggtgaggcagaaaggcagtaaccatggtgatgaagagcaacactgccgagctggggtgctgcctgtcctgcccattgcttacccctcccccagcacagtgggtgagagcagtcagagctgggaggtgaacccttccccagtttgtgcctctcagagctgtttagttcttgggagttgattccaaaggtctgcatggaattatgatggtgggaagggcaggggtcttagcaatcttctctctttggctgcagccccagccagcgctccccaaaacctccatgccatccgcacagattcaggcctcatcttggagtgggaagaagtgatccccgaggcccctttggaaggccccctgggaccctacaaactgtcctgggttcaagacaatggaacccaggtaagacagaaccctcccctctctccactctcctggagtataagccttcagggttctaaggcctttaagaatttcaaaatgattgtctttggtgggcctgggtctcccgcagccccagggaatcctttcctcctcaccctcctctgcaagctccacttctcaaaggattatgtctcctgttagggttgcatcctgtgtgcactttgtaaataaagcaggaagcacattcctgcttgagctgggggagggcacagataaggctttgtccccagctcagttcgctcccatcccccacctgtgcattccgggactgagccttgtttgtgttctggagaggcccctgcagccgggaacaggaatgtgattactcccagaaggttgtgttcctgcagcccctgaacccacagtgcccctatactcccatgttcccagctggacctttttctgtcctcaggccccagctggaggccttctccccaggctcactatggggtgggggcttttcctggctgcaggatgagctgacagtggaggggaccagggccaatttgacaggctgggatccccaaaaggacctgatcgtacgtgtgtgcgtctccaatgcagttggctgtggaccctggagtcagccactggtggtctcttctcatgaccgtgcaggtgaggcttgtaggtggagaggggcagaggctcaggggatcaaggttttcaagggcaaccta

SEQ ID NO: 13668 - DNA, 2300 bp, Homo sapien
ccagcctgggcaagagagtgagactctgtctaaaaagcaaacaaacaaacaaaaaaacaaaaaaacaaaaaaacaaagacaatccaaactggcctcaatttgcagtcaaaggaactgaaaatcaaaaagttcaaaaacgggcaggcgtggtggctcacgccagtaatcccagcattttgggaagcctaggcaggcagatcacctgaggtcggaagttcgagaccatcctggccaatatggtgaatgaaaccccatctctactaaaaatacaaaaattgccaggcatggtagcaggcgcctataatcccagctactcaggaggatgagacaccagaatcgcctgaacccgggagatggaggttgcagtgagctgagatcacgcctttgtaatctagcctgggcaacagagactcggtctcaaaaaaaaaaaaaaaaaaaaaaagttcaaaaacctgttcaccacaatcagagtgcaggaagaaaaagagctgcaagttgacatggatctgtctgacttcaaaccttgggttctttccactatagccaataggtcccaaacccagttgtgcataacaattacctgaagaacgtgttaagatatatttttccagattcccactcaagactgactcagaaaatgatactactagtatagcacttttctctgagttgttgtaaggattatatataatgaagaatattggaatgttttataaacttcaagtgtaacatcatatgcttacaatttaatgctttttattacgtatgatcatctaataccctttcttttggttttctagtcagggaataattttctgataattaggcttatggagtaccttgaaattagaaaagggtgccccaaactatattttggcttgataaccacattataaatgaatacatttaatttttaatctataaataagagctcttgagcttgaccatcgctagtcaagttcttcaagcttaatcatctctttaagaattgatgaaatcgttctaaaatccggcaaagctgaagaatggagttcaaagcagaaaaggtgtgaattgttttaagtggggatttcattaggttttggcctgaagggcagtttgtgaatatgttacaaagttaattggttctgatgcatgaccactttttctgagttaggagacggtgtttttttttttttctcgtttccaatataccatatttcgtacgaggtggaaccagcaactgtgatagacatgtccccgcctcctttaaaacgcctcttgctcttaccacccctactttccccaacagtagcaataagtttagcaagaaaggtctcatcttctatcccaagggaaattctaagtgccatttccaccctcaagtggggctcctggtaagttgcatttaaattagcattctttttcactggccaggaaagggctgcagttcatttgcaggcaaatacccttgctgttttttttttttttcctgaatctttacaaagtcactcagcaggcacacactaaacgcttgctccgtggagaaaggttaaacggtttccccaagaccacacagatcaaacaagtgggagaggaggggctgaaagtgcctggtatacctcgccacactcccataattacccaaaccgtctcattccaagcccaaggaccgggctttcaaggggacacgaaaggaacgcccgggaggtgagcgccaggagatcgggagaggtgcctttcccggcatgctctgcagcacaccgaggggcgccaggcgtatcccggcgtgcatcggggagcgcccaagggcgatggttcccggctcctggagaggcgtgcgaagttaagccggtaggtgcgagcttccttagctttgagcctctggtttctcgtttcctctttatgggtttaaatccataacggcagaaaaggatggccctctaactaccctccctctccgcgtgcgaacgactcggcgccgcttcgagctcggtgccaggtgattagcgggtaggggcgggcttgcgaccagcacgtgacccgaactggcagccaatgactagccgggtggtccagcagcgcgaggattccgggacccgcgagcggagcggcgcgtgggtcggttgcggtcggccccggcaggtatgcgcaggcgccttgcttgccacgcgctacgcccgtccccacgcgcctggtggcgtgttcttggcgcgaagtgttaagagtctgggtgtttttgtgcgttggggggaaggagagggtggcgggggcgggggggcgctgaggcgtcacgtggacgccacagccaatctcaggcc

SEQ ID NO: 13669 - DNA, 2300 bp, Homo sapien
gaggaaatttcttacattatccaaagtatacaaccaagaactttagtatgagaatgctgcattaaaagttgaatgtaaccatttaagtggttactcaaagcaaacaaaaaataaaaaagaaaaacaagcggttacttggtacctgcatgatggtaaatccaaactggatccctgaaatgtgtgtggtggtatgattatttttagaatatcatctaaaaacacttaaaagttctcataggaccctcagattcttgacatctcccgacctctctaggttaggcggactccactttgaaaaactatggatagttttcctctcccaccgagatctgtagtactgaatcttcaaagttcagcgttttttttttgttttgtttttttaaagtatctagtatttagttatatgtttgcctggtgtagggaaggagtaccaaaagagaatctccattccccttcttcccaagttgtcctcacagatcccccagttagagagatcatttgggttaacttgtctctttggggatgcatggttgttaaccagtcattcacaccttatgatcatatattttaatgctaaatcaacataaatttacttcttccccagaaaatggaaaatttttatgaggaaacctcagatccttgagaggaaggcattcttggtaaggtgggagattctgacagggcagcttgtaggaaagaagttcttgggttcagggaagaggaggaaggtgttaaactgttacttttcaattttgcctaggatcttgaatgctcttgctgaccgtgcctgacttggggtttcagaatgccttcagaagtctctaaagtagcctacacgttttctagttcagactattccagcagtttctgtcaatgttgttgtatatctcctcaggaagagcaaagtgtagagaaatatgaccttcctaagtaaaaagtaggtcagatcagtagtgttggataagcctccttctgttgactccttccttagtcttctcattctccttcatagtgttttgtattgtcacatagcatgtcacgtagtaggttctcagtgcttgctaattcttatcaaagaaggcagttttggatcattgaccacaaaatctgctctcctactccctacttcttttttgccttttaagaaactacgcttcctttttactggtgtcaggagcacagaagaaagaacagctggtaaggagtagagaaggagaaagaaaactactttttgaaggttaggagaaatactgtccattgatttacttcagcaactgcctgacacataatagatattcactaatactttctttgcacctcatagcttaaatgtcttgaagaaacaaaaattgaatgcacaggatcaaggcactaaagcttagataacacactcctgcatcgtttccctgttttatcaagatatctttcatctttatatccggcaatttagtggcaactcttcgctttccaactgcgcactgagtctttcggtctcctccccattttcctagtcgtcttcggttgtggatgttgtaaactcgaccatccgtctctcaaggtctttggcttcaaggtttcccaatgctctggagctgtccaagccccggtactccggggtggaagacctcagattcatttgacgggcttgtggaggttgggggtctgcggagccccgtgtgggtggggctgggcgcggccggggcggagccggcgaggagccctagggaaagggtgaaaggcacagttgagaaaggcccgccgggcattggtttcacagtttccacgaaggcttcgtgtgcaagcctgaggagtttaggtgcctccctcctgcctcgcctttcttggttctagaaccttcagtaggcttttctgggttgcagggacccggaaaagcagcggcttccactcggggggcgggtcccaagggtcttgctgctgctctggggccgtttggactcctggtgttgggggaggggtcagggaggtgctgctcgcgtctccttttgcgcctgcgcggcgggctccgagcgggtaggagcgcgtgcgcggtgacgtggacgtccggtgcgcgcgcgcaggctcttcagctggagcggacacacggtgtgcgaaccgaacagaataacccgcccccagcgggatgtgaaggactccgggtgaggccggccacgccccgcacggtaactctcgggcctgggtggagggcatcgcttagtactggcccgattggagtttttcgagagtttgaagctcttgtgtatttgaacggcgtgagaaacgttccgctgagagagcttcgc

SEQ ID NO: 13670 - DNA, 2300 bp, Homo sapien
ggttcaagcaattctcttgtcttagcctcccgagtacctgggattatgggcgcacaccaccatgcctagctaatttttttatttttagtagagacagggtttcaccatgttggccaggctggtcttgagctcctgacctcaagtgatctgacctccttggcctcccagagtgcttggattacaggcgtgagccactgctcccccgccgctattattttttaatagagacggactttcactacgttggacaggctggtctgggactcctgacttcaagcaatcctcctgccttggcctcccaaagtgctgggattataggtgtgagtcaccatgtccagccccctttttatattagggaaaggagttctttataagttgcaaataccttttcctggttagtttgctttttgattttgcttaaatgattttgccagattaaaaaatttacagaatattaaattttattttatttttatttctttgagacggagtctttccctgtcacccaggctggagtgcagtggcgtgatcttggctcagtgcaccttctgcctcctaggatcaagtgattctcatgcctcagcctcctgagtagctgggactacaggcgtgcaccaccacaccaggctaattttttaatttttaatagagatggggtttcgccatgttggccaggctagtctcgaattcctggctttaaatgatccactggcctcagcctctcaaagtgctgggattgcaggtgtgagccaccacacctggcatcatatagtattaaatttatcactttttttttttttggccttactggttttagattttgtgtcttatcaaaaaacttttctcaggatttaggaataaaaaaattaaatattagagtcatctggaatttatttcagtgtaaggtccattgagttccagtgatttgtcatggcttctttaaacgtgtgtactaagaagttagatagctttttacttatttatggaaccatgtcttctgaaccatatgaagaactaattctgtacaattagctctttgggatgaaaatggaactttacttatttaatttactcatcactggggaacttgctatataaaggaatcttctggtaaattcataaagtgttaggatgctttaaaaatgcataaccttcaaatttaactttttaattttgtatacttttttaataatgaatatactcttttgtttctttgtgtgagattatagtatttatagtgaattgttagaggattaggatataagcaccttaactaattagattaaaatgaactttaaaaaatgattagatattccagagtaaatattcttactgtgattgaaagaaaagcttagaagcaaagtcttagaagaatttaggaatattttggggataacataatcgttcttgtatttttgttcaagaaataaatactcacttgattaaagggtgttttttgtttttggtttttttttgcttgtttcttaggatgggaaggccattgtgactatgtggtgattacagttgtcttactactgagtttcctactgaaatcatggaggagaaacagcagattatattggctaatcaagatggtggaacagtggcaggagcagcacctaccttctttgtcatcttaaagcagccaggaaatggcaaaactgatcaaggaattttggttactaatcaggatgcctgtgctttggctagtagtgtgtcatcaccagtaaaatctaaagggaagatttgccttccagctgattgtactgtgggtggaatcactgttaccctcgataacaatagtatgtggaatgagttctatcatcgaagcacagagatgattctgaccaagcaaggaagacgcatgtttccttactgtcgttattggataacaggtttagattcaaatttgaagtatattcttgtcatggatatatctcctgtggataaccatcgttataagtggaatggtcgttggtgggaacctagtgggaaggctgaacctcatgttttggggagggttttcattcatccagaatctccttccacaggtcattattggatgcatcaaccagtatctttctataaactcaaacttaccaacaatacactggaccaagaagggcatatcatcttgcactctatgcatcgttacctgccgaggcttcatttggtgcctgcagaaaaggctgtggaggtgatacaattaaatggccctggtgtccacacttttaccttcccacagactgaattctttgcagtaacagcttatcagaacattcagattactcagctgaaaa

SEQ ID NO: 13671 - DNA, 2300 bp, Homo sapien
cccgccaccacgcccagctgattttttgtatttttagcaccgtgttagccaggatggtcttgatctcctgacctcgtgatccacctgcctcggcctcccaaagcactgggattacaggcgtgagccactgcgcccggctccagggtttaattcagtggtgcaattgtagctcactgcagcctcgaactcctgggcacaagcagtcctggcacctcagtcttctgaatagctggtactacaggcgtgtgccaccatgcctggctataaatgctgttttcagtcataggctttgaactatttaaaaaaaaatgcccacaatcctttgttacatgttatttgttagtgaatatatatagtggtgtgtatagtttttctcaaagcagttttcatcctgctttcctgtgctgctaacgtgttgacttgtatggatattttgaggtggggggaaatgagaggtgcagttttagaatttctgagtctgagaattttaattcgtcattactttatgtggaatcttttttttttttttcttttttgacacagggtcttgctctgtcgccaggctggaggcagtggcacaatctcggctctctgcaacctccgcctcccgggttcaagcgattattctgcctcagcctcttgagtagctgggactactggcatgtgctaccacgctgagctaatttttgtatttttagtagagatggggtttcaccatgttggccagaatggtctcaatctcttgaccttgtgatccgcctgcctcagcctcccaaagtagtgggattacaggcgtgagccatcgctcctgcccaattttttatttctaccatattctcaagatacattggtacagttcttaggctttcaatggatgattgggaggagggggaaactagatgtttatgttgtttttggatgaattatacacaatatatctgggtcatacgtatttgcctttaactccctatcttttattttggaagaattagtggtgaattctttatattgaaagtgagtttttcaattttaaagttggaaaatcatctggcaacatcatgactatactaaaaaccaatgaattgtatactctaaaattgctgcaatattatgttttatgttatgtgaatttaatctcaaaacatacaggaaaatatcagctggcagtttaatggccctttccggtttgtgttgcaattcttagttgtgatggatgtgtgttcgctttacagggttgttaatcaccgtgtggatttttagagtttttgagtgtttttgaggaatggctcaggaaatctgatgtgttacttggattcctaacatctttttttttttttctcttcaagtcttgttaatggatcattttgtacttttaaaatccctttctcctctctctctccagtcttattgccagcagttttgaagatgactcccgtgtagcctcaccgttagaccagaacggaagcttcaatgttgttattaaagaggaacctctagatgattatgactacgaacttggtgagtgcccagaaggggtcactgtgaaacaggaagagacagatgaagagacggatgtatactcaaacagtgatgatgatcctatactagagaaacagctaaagaggcacaataaagttgacaacccagaagctgaccatctatcttctaaatggcttccaagcagcccatcaggtgttgctaaagctaaaatgttcaaattagacactggaaagatgccagtagtctatctggagccctgtgctgtcaccagaagcacagttaagatttctgaactccccgataacatgctttccacatctcgaaaggataaatcttctatgttggcagaattggaatatttgcctacatacattgaaaattccaatgagactgccttctgcttaggcaaggaatcagaaaatggtcttagaaaacattcaccagatctcagagtggtacaaaaatatcccttactgaaagagcctcagtggaaatatcctgatatatctgacagcattagcacagaaagaatactcgacgattcaaaggattcagttggagactcactttcaggaaaagaggacttgggcagaaagagaacaactatgcttaagattgcaacagccgcaaaggtagtgaatgctaatcagaatgcctctccaaatgtccctggaaaaagaggaaggccacgaaaattgaaactctgtaaggcaggacgaccacctaagaacacaggaaagtctttaatttctacaaagaatacacctgtaagccctgggagtacctttccagatgtgaag

SEQ ID NO: 13672 - DNA, 2300 bp, Homo sapien
tgagctgccgcgcccaagccttccatggtttaaaatgaactgaaaatacttgtcttgctgttttctgtctgctacccattttcctgtagtcacaaccctgaggttcagtcaggcttaaataattgctgcagcctttttaacagcatttctgttatttctgtttctgcagttacaaaaaacattctcaagcattagtttagaactgtatacttcagagttttatagtgatttcctatagtcttatacttcaaactaaactaatccaagcattttgactgtatccctcttggtctccgttcttagtgcttttccttgttcactgcattcgtttgcaatttaaccagataaatatgccagttttccaaaatacttttctcaccttttgatcttttcacagtatttataacaatgtaattcatgtctctgtacttaatttttttgtttcttaaaaactaaattttgtggttgggcatggtggctcatgcctgtaatctaccagcactttgggaggccgaagcaagcggattgcctgagctcaggaattcgagaccagcctgggcaacatggtgaaaacccctctctacaaaaaaatgcaaaaacagccagatgtggtggcgcattcctgtagtccgagctacttgcggggctgaggtgggaggatcacttgagcccagggaggttgaggctgcagtgagccaagatcacaccactgcactccagccggagtgacagagcgagaccctgtctcaaacaaacaaacaaaaacccaagtaaattttacacgcctcttcttgtggtcttcctttttctctaatgttttgtatcacactccaggcattccagtctttctccctcgctttttaaagacggggtcttgctccattgcccaggttggagtgcagtggtccaatctcagctcactgcagccttgacctcctgggctcaagtgattctccctgctcagcctccagaatagctgtgaccacaggtgtgcgccaccatgcctggctaagtttttgtagagctggggtttgtgatgttgcccagcctggtcttgaactcctgagctcaagaaatccacctgccttggcctcactaagtgccgggattacaggcatgaacccccgtgctcagtctcactctcataaataatcttttggcattctgttgaggcctgctttaatttctttttttttttttttcccctgttatgtgtttttcttttcttttctttttttttgagatggagttttggtcttgttgcccagctggagtgcagtggcgtgatctcggctcaccgcaacctccccgtctcgggttcaagcaattctcctgcttcagcctcctgagtatctggggattgcattgcaggcatgtgccaccatgctcagctaattttgtatttttagtagagacgggttttctccatgttggtcaggctggtctcgaactcccgacctcaggtgatctgcctgcctcagcctcccaaagcgctgggattgcaggagtgagccactgtgcacaggctccctgttacgtttttacttatctttggtctctttaatcaggtcaaagattgtcaaagattgaagattcttaggttaaatacattgttagcactttgtaagaattagtgcctcaataaataatataatgtgatagttttagagtaagacataattttagagaatggattttaatgtttttagtgcccaagactagagaatggattttaatgtcattaatatctgagactcattctcttcacttggttttatttattttttctttctgaggagggatagtttgtttattaagtatttattttaaaaaatttatttatgtttttagggacagggtccttgttacgttacttaggctggtcttgaactcctagcctgtagcgatcgttttgcttcttcctgtcaaagtactgggattacaggtgggagtcactgtgcccagctaagggatagtttagaagattcactatcttgtagctcaatattcttggccatttttagtgtttttatggagattcataaatctgtcctagatttctttaagcattttatgttttcttatttctaggtggaaattcagaaagttcactgaaaaatcgttctgctttctgtagtgataagctagatgaatacttggaaaatgaaggcaagctgatggaaacaagcatgggtttttcttctaatgctcccacatctcctgtggtgtaccagcttcccactaagagtaccagttatgtacgaacacttgatagtgtactaaagaagcaatctactatt

SEQ ID NO: 13673 - DNA, 2300 bp, Homo sapien
ctgtaatcccagcttcttgagaggctgaggcaggagaatcatttgaacctgggaggtggaggttgcagtgagctgagattgtgccactgtattccagcttgggcaacagagggagattgtctcaaaaaaaaaaaagtgcacttttatattagagtagcaaatgtgtggaagtgtctgatattattgcaaagttagcttgactttcattagattggctgcttctaagtcactaaggacttctccattaataatatgattgatataggctgggcatggtggctcacacctgtaataccagcactttgggaggtgaaggcgggtagatcatgaggtcaggagttcaagaccagcctgaccaacatggtgaaaccccatctctactaaaaatacaaaaattagccgggcatggtggcgtgtgcctgtaatcccagctaggaggctgaggcaggagaatcgcctgaacctgggaggcagaggttgcagtgagccgagatcacgccactgcattccagcctgggcgacagagtgagactccatctcaaaagagaaaataatattaatatgattgatctacttaattaaaaaacttattattgcagtttactgttgtgcatgctatgtaaatgcttctgttgatatttcttatactcttgatgaggagaacagtattttctctaccttatatattgattgacactttgaaaacagaggtttgcctgatacaatttctagtgagactagactccctaaaatacaagcatggaaattttttgttgtcttctgcccaggactcacaaagccaccatagaatgtgtctgcataagcagtcaggcaactgtaaactttgtaaactttggggaagctgcagagtaggcttcagcgcagtcccaagggatccgggagggggtatctgacctatttctgtatagcctgaaaagttacagtaaagtctactttcagggggaatgatcacattctttgtaccaaactcaaggcagagatattcttgatctctgtgggaataatcacaatttaaccaaagtagcaaagagtaattttgttttgtgtctctgaagatggagttgcttgctgtagctggtctcctcaccagttccctgttagagagtagattctacctcactccatctcccccaacccccgattttgaaatggtgaaaaggaaatatagaaaaggttatcttctctagagttgcctggcaatatgacctagagaacatgggtagagacttgggaagtttttgttttctttctttaaaaaaaaaagaaaagaaatcaacccccacaaaaaacaactgtgctggtacccatgatgggcagtctgataaactcaggcagcagaggggatctttacttcatttgttggttcactttcttctgactatttagttaattatgtctagaataagaatgagttcgtaccaacattcagtttgaacccatgttttatccaagagatgaaaatagtattttcaaagctaagctttttgaaaatgaaaaactgtgaggtaattgtggcttaggttattgcaacaatgattgtcttataacttaaagtagatttcacttatatttttcaaatatgaaggatgcttgaaaggacccttgtgtgagagcttcattatgtctctctggtcttatcagagagattctgtgggacactcatttttgctgatgaggttaatagcttaaccagaatgccttatttacaaggaaaacaattggataattctagttgtttagatttgatgataactttcacataactaggatgcagaaatgatgagtttccgattctctattttcaaactacaatatgaaggagatgagattagttcagaatatcagttgacagcatttttctaccttctgattactcagattattctaaatggaaaaagtctacttctttttcccttttaaatctgaaaaatagacttatgaaaacttgtaaaaatgaagcccctgtcaagggagaggagttagcaagagaattttatctttacagaatttctctttgccacttgtttcaggttaatggtaagagttacccgcaggctaagttgctattgggacagatgggggcattgcatccagccaataggctagctgcttatatcacaggcaggttgcgaccctcagtcctggacctctcaaccctcagtactgtcatctccaaggtagcatccaatgccaaggtggctgcatccaggaaaccacgtaccctgttgccttcaacatccaattccaaaatggcatcctcctctggcactgcaacaaat

SEQ ID NO: 13674 - DNA, 2300 bp, Homo sapien
ttttttgtgtgggcagagtgcctgtttgatagagaatcacgttaagctaaagtctttgttttgtttcatttgtttgatttttttttctcttcagtagcagactttttaagttttatttattaatgttaaataagcctaccaatttttatttattaatgttaaataagctcaccaatttgaatagtaatgttagaccagtttcatttatgcttactattaccatgattcctacctctttatctctttgatctaaaaaaaaaaatctagattactcatactgttttttcctatgtctttagtatttcgaaatatgtcttccaatcaggaaagggcatctttaaagtactattaatggtttgaaatctctattaattcacatcttctgcattaaatttctgctttttctttttgttttaaaaacatcttttgcctcttctaagccaggtttatttccctgcttctttgatgtctcttaatttcattccattttggggggcttaagtaattttttccttctgaaaaataattcccacaaacctttaagctttgcatatttgttagtgaattttaaaaaccaaaagccctttataaaccaaggatttttagttctttatcttcctcaggtggtataagcttagaaattgacccataactctagtaagtgttatgagctttaattttaaagttaaattgtgcagaatctggattttatttaaaaacataagaggccaggcacattggctcatacctataatcccaacattttaggaggccaaggcaggaggattgcttgagccccaggggttccagaccagcctgggcaacatagcaaactccatctccacaaaaaaaaaaaaaagcgtgcacctgtggtcccagctacttgggaggctgagcctgggagttcgaggtggcagtgagctgtgatcccaccactgcactctagcctgggtgacagagtgcgatgctgtctcaaaagaatgaagttgaagcataattttatcatgaatgatccctttaacaggaatccagatttagagagataaccatgtttttctttaggcaaaagtattatctctttaaatgtgcctcttgacagttgatactctattttttaccattctaaatgtaaagctccataatgtctggctgttctcagccataaatagtgtattatgaaactacagaatttcagcaactttataatccaaattagacgttatttgaagcaaggtcagattctgtgccttaatgactgggcatggtggctcatggctgcagtcccagcactttggaaggccgagatggcaggatcacttgaggccaggagtttgagactagcttgagcaacaaagcaagaccctgtctctgcaaagaataacataattagccaggtgtagtgacacatccctgtagtcccagttacttggaaggctgaggcaggaggatctcttgaaccaaggagtttgagactgcagtgagctatgattgagctactgcactgaaggtgacaagtgcaaccctgcctctttaaaaaaaaaaaaatatagactgggcgcggtggctcacgcctgtaatctcagcactttgggaggccgagaacggcagatcacttgaggtcaggggtttgagaccagcctcaccaacatggtgaaaccctgtctctacccaaaaatacagaaataagccaggtgtgctggtgcacacctgtagtcgcagctactcggtatgctgaagtggaagaatcacttgaactagggaggtgcggaggttgtagtcagtcgaggttgtgtcattgcactccagcctgagcaacaaagcaagactgtgtcttaaaaaatattatgaatacttttttttcctacgtgtgttaaaggggaatttgggtaccatgtttccatttcctgtttttcagaaaatgctgctcaaattccagtggctactccacaggtctctcctaacacagtgaaacgtgctggacctcgattgttgttgattccagtgcagcagggttctcctactcttagacctgtctcaaacacacaacttcagggacatcggatggtcttgcagcctgttaggagtccaagtggaatgaacttattcaggcaccctaatgggcagattgtccagcttctacctttgcatcagcttcgaggctctaatacccagcccaacttacagcctgtcatgtttcggaacccaggtataaagttcttttttatgaacttttcttttgttgaatcacttggccatatggtatgttaatacaccaagattgtttttcttcatctcttaag

SEQ ID NO: 13675 - DNA, 2300 bp, Homo sapien
attaaaaatgtgtgggccgggcatggtggctcacgcctgtaatcctggcactttgggaggccaaggcaggcggatcacgaggtcaggagatcgagacctcctggccaacatggtgaaaccccatctttactaaaaatacaaaaattaactgggtgtggtggcgcgtgcctgtaatcccagctactcgggaggctgaggcaagagaatggcttgaaaccaggagtcggaggttgcagtgagctgagatcgccactgcagtccagtctggggacagagcaagactctgtttaaaaaaaaaaaaaaaaaaaaaaaaaaagcgtggctttggcctaagactggaagtacccagattccagacttaagaaatcctcattaaaatgctttcagttgtttttcatgaaagaaatgaccagtgatactttgtaaaccatttatctggccatgagtgatcaggtgagaaaaccgttagcggacaccagaatgatctggagaggattagggacggctcttgtgggcacatttttactctagtttcatgggtggagatggcatctgccgtggtctgcagcatgcaagtaaagacaccaggtggcaccatttattagctttcaatcccatggagaggtcccatcatgtaactaccaagaggttgaaggaaccaactacctcttgcatattgtagctaatggttcttgccttcttcttccagacttgggaaataaatttgaaaatcgtattttctgtttcataatatttgcagtgcatggttgaagggaagaaggccacgtgctattgccagttggtctccaggaggtgacatccatcatctccatgtcaacttgtgagctttacaaatctaattttcagtacgtggctacagtatacacaagaaaatatgtgctttgccacttggctctaaaggctcaccgttgtacacaagcaatgagtttaggggttcttccctcttgttatcacatgtcatctccacagggtttcaaaagatctggatagggtgagacagacacaccagtgtagtactcccttgggtcccttgtctttggcttaggctttttcataaggtataataatttgttagaggttcttccctcttgcagacacatgtcatctccacagggattcaaaagatctggatagggtgagacggacacaccagtgtactattcccttgggacccaagtctctggcttaggctttttcataaggtgatttcttgtggtagtagtcaagtggagaatactcaggaaatactatttcatgtaacatttccgtgtattccctctgcctcccccgacatgagttagaaaactacccctcgatctagtatcagcaagctcgacagtgacctcagcaaggaacagccctagataaaaggattcataagtaaatggaatgaggaaaagatctggagcaacaaagtcctggtcagctttaggtgaggaagcacaatgggatgttggaggctaaagaagccatgaaacctaaagtattataacatagcatattcacttctctttcccccgcacgcccaaagctctgttcaaggccaccctttcccctttcatgatgaccaggttgcccagtgcaaaaatactgttcttagctattaaattgcattactcagaataatcctttccacgttgagtctacgtgccggactggctgcgagcagaaactacttcagtcgctttaaatctcaacacttgtggtcgctgggagcagagcttttaggctgtagctcagtcttgtaattctgagctaggagtttcagctacggtccctcgggcctatcagatgacaaccttaacaccctggaggcgtggttatcgtcttggggctctgggaagtgcagttccatgggggaccaggcctgataataccataaaaggcttggttctctcaattctgaagccatgttctgttgaccttcctctaaaagcggtacccgcaattgtgcggattccgtggttccctagtcccaagccgtctgcttcctgggccctttcattggctccgcccccgtaaaccttgctcgtccactctggaagcgctctcctgactacaggccgcgcccctcgcgtcggctccgcccacccagcccgcggcttggcccaggcggtagttcgcgttttgagccgatcgtgccaccatagctcctgctgctgcctctaccgctgcggctaccgcggcggagctgaaattgccgaacgcgatgcccgagggcgctgtgagcggggtggccttagctcgccgaggctggtgaggctgggcccgaacggggg

SEQ ID NO: 13676 - DNA, 2300 bp, Homo sapien
ggcgacatttgagcgaggccagaagcccctttggcatgcttctgtgagtcattctcagattttacctggtctgaaagaaaacaattcaaaggcccagggtccctggttgaccttgtgtgtcctgctccctgtgtctgtgctgccccatgcatagctcatcccatctgggggatggagagtggtaggaggtggatcctatgggaatcctgggctctttgtggtagcagcaggcctggacctgtgtagggaagggggatgttgaaggcttggcccttcctgggcagtgggcccagcacctggcactggtactccacagcgtgactcccccaggctgaggccttacgtccttctgtgagagtgagcagccgccctgcaccctcaggtgctgagttgcaggactcagctgattggtccaacccagcccttggcatgtggtggatcccagccagcactgagcaagggctcaccctgctgggcagggtcaggggatgtggagagaaagattgatacaaactgtgccccgcactcctctccccagctgacctaggagcttgctcagagttcaccaagaaggctgagagggctccttggtgcttttgagaacaggtcaggagggcctcaagtcaagcacacaaggagccctggctatgctgctctcacttcagcatctgcgttatcgtccctgcatgtgtagctgcgaccgtggttgcatgctgtctttctcttgttggatggcttccaaatatcaataattagaaataaaaatagttgcttaagggatgacctctgtgtgtttccttttcttgcttagctcttccatggcacacctgagaatttcttaggctatactgggggcaaggggatgttagaggagggagaaattgcctcattgcctctagccagtcatccttctatctacgtagtgttcctacacacacacacatgcatcattcacccttcttccaccatggagctgaacataggagaaggaggaaacagaggatattgtgtcccaggaagactgagtttgtatgcagtgacttggaaagtgttttaagcagtctgatgcactaccctttaaaggctgaaatgctgctttgggatgagaattaagggaaaactcataaacttgcaaatagatcccagtttttctggatttggaatatggttggctggattatgcatcgagtcaattcaattagatcaactctcagctgaagccctttactgtggttcctgtgtaactaatcagaaggctagggaacctgtccccattcagactagagcctttgctggagagaggagtctgtagagggcctcaggtcagcacagattgcaggaaggttcagaaaacgttgtttaaccactgagaactttctgggctctgaattcatgatagtggcaggcctggggctattacttttcatatactgcataaagtattaaaacctaaatatctaaatttggctgggcacagtggctcacgcctgtaatcccaacactttgggaggccaaggtgggtggatcacctgaggtcaggagtttgagaccagccgaccaatatagtgaaatcacatctctactaaaaatataaaaaaattagccaggcttggtgatgggtgcctgtaatcccagctactggggaggctgagacagaagaattgcttgaacgcgggaggtggaggttgcagtgagccgagatcacgccactgcactccagcctgggtgatagagtgagactccatctcaaaaaaaaaagaaaaaaaaatctaaatctgtgcactttgaactcttataattttctttctttctttcttttttttttttttttttgtagacctagtctcgctctgtcacccaggctggagtgccatggcgtgattttggcttgctgcaagctccgcctcctgggttcacgccattctcctgcctcagcctccccagtagctgggactacaggtgcccgccaccacgcctggctaatttttgtatttttagtagagatggggtttcaccatgttggccaggatggtctcgatctcctgacctcgtgatctgccagcctcagcctcccaaagtgctgggattacaggcgtgagccaccactcccggctctgttataattttcgtttgcctgctcaagagcgatggggtgcagagtttccagagccatcttgcttttgtcgtactttttttttttttgagacagagtctagttcttgtcgcccaggctggactgcaatggcatgatctcaactcattgcaaccttcacctcctgggttcaagcaattctcctgcc

SEQ ID NO: 13677 - DNA, 2300 bp, Homo sapien
gggtgtccccagccatcaggagacttgagttggtatttggacctgagcccgcacattccactcccattctccctccaagaggggcccagcattgtatttccctgtgaccccttactctcctggccagaacttgagccagctgtgggatgttgctgcaggacagtaagccctcacctgggcaaacatgaagctctggcctcctttcctcagccccttgttcttccctgtcctccaccctggaccccagccggctgctggagcccagaggccaccttctccctgcatcctgaatgatgcttagtcagaagcctgtgttggaacatccctcgtttacggggcgctggcctacctcctgaggacctcagccacagatgagatcacacgcatgcacgtgcacacatgtacacacacacacctacctgcacagcacgctgttgagtgttggttgctagagtatctggctggctgctgtgtgcctggtttcctcacatcctgcctcagcttcaccaccctggcttatgtggaacacctatcagggagcagaaaaggggtgcagtacactaagtgaacccagattctggattcttggtgtccacagcctagctgatacgagatagcccataggacacctggtttaggtagaaggagcctcctcaaaggcagtgctgggcacccacgggtgtgctggatactggagtttgagaggagggaggtgctggggccaaaggagacactagaaaagtggtagatgggacaggtaagtggcagaggtgaggggataagttagaatgtaaaagggcagtaattaggggtgagggaaaggagataggggaccctaggaggtagagtgggaccatgtcgtgaggcagttgaagagttgaggaaaggtttttctgggccctactgctcccctctgctgcaggtaagtcagagcagctttaccacagcttcaggccacgagagccccttcacccgccctgctgcgccataggcagaggcttataaagaaatgggttctgggccaggtgtggtggctcaagcctgtaatcccagcactttgggaggccgaggcgggtggatcacctgaggttaggagttcgagatcagcctggccaacatggtgaaaccctgtctactaaaaataaaaaaattagctgggcgtggtggtgggcgcctgtaatcccagctactcgggaggtttaggcaggagaatcgcttgaaccctggaggtggaggtggaggttgcagtgagccgagatcgcgccattgcactccaacctaggtgacaaagctacacgccatctcaaaaaaaaaaaagaaaaagggttacaaaaggttcccagctccggggcatcagcctgagtgcgcttgagctgctccaaacctggcccttccccactcctctagcatcgccacccgcatggccctggaactcccgcggcggcgggggcgggcccgtgcctgctgtgccccgacttcccacaccagccgcgcccaccgcaggtgggactcaggttcgccctctgggccaggtccttcacgaggagggagctacccttcgccagaagtttgtgagaatgtggccgcccttttcctgccctctgccccatgtgggtggggggcctcgtggcccggccggcgccccgtccccttctgcatgtctgaggccaccggcaaccgccgccccactccagatttgcccccgccttgttttgaaagccccttatttataacttttatactttgtgcaggtcgcggcgcttcctgcctcatcctcggctgcatggggcgggggcgctgtttttaacgtgcccgtttgtactgatgtatgaacttgtcaataaacacaattgtttgttaaccctgggatgccggccagtggggcaggccgaagcgggcgctgccagtcgctccaccgcttcggtggcagaacccggtgtgtgtccaggggcaggacggggcggggtgctgggggtgtggcctgcggcgggtgcctctggaagggcggggcgagggtctgggggtgtggcctgcggcggggactctggggagggcggggcgagtgcttggggtgtggcctgcggcggggcgtcggggaaaggcggggtctcggccggcgctgacgcagccatggcggaggcggctttggaagccgtgcggagcgagttacgagaattcccggccgctgcaaggggtgagtggctctcccacaggctgcggcgatttccgaacacgggaggggccctgggatgccgctgacaccgggggctcggaacctcgtgtgtgcgactgccctgagg

SEQ ID NO: 13678 - DNA, 2300 bp, Homo sapien
gactgggtgctgcagacatcagcccttccatcccctgtcttcttctttctctcagagctctgcgtgcctcttgctgtgccctacctggacaaacccccaactccgctccacttctaccgggactgggtctgccccaacaggccgtgcattatccgcaacgctctgcagcactggccggccctccagaagtggtccctcccctatttcaggtgggagctgccctggggtcaggtgtgagcagtgattactggcatctgggcatgggctgagtgtccattcctctagagccacagtgggctccacagaggtgagtgtggccgtgaccccagatggttacgcggatgccgtgagaggggatcgcttcatgatgccagctgagcgccgcctgcccctgagcttcgtgctggatgtgctggagggccgggcccagcaccctggagtcctctatgtgcagaagcagtgctccaacctgcccagcgagctgccccagctgctgcctgatctggaatcccatgtgccctgggcctccgaagccctgggtgagtggaggtggggtggtcgtggccctggacagggaagatatgggaaggaggggggtcagcctgtttgcccttaggtgatgacctggcctatgggcttggtcctgtcagcatctggtgcagctcactaaatacattcccaggccttgacttaatcatagatgaattgccaaagattgttgtccttccttctgccccagggagggaggaccccttccccaagatttcccaacctctgcctcttctccctgacccctttcttgggattcttctgtgctcacccaggttttggctctggcatcactggatggcagctttccccagcctggccttcctaacttgctctctgccttctgccctgcaggaaagatgcccgatgctgtgaacttctggctgggggaggcggctgcagtgacttcttgtaggtgtaaggggaatacaaaggtggggaaggagcaggttggggcagagggagggaagacgaggccaggagtggagggatggccctgggtggaggttgggctgttctctaagatttcttttggcttctaggactcgggcaccacagagggtttcccctgacagctgaggtcggggaatggacccatggcattgggggcgggtgcattgtttcttctagacccaaagaaacctccctgaaggcccgctgggccagggggtaagtgtaggagaacttcccctcttgttgaagaggagtccagggcctggtgagcatcaggtccctggtaggcagagttccagaatgcccatcagagcccctggcatctccagcccactggctctgtgcgtgcttctcttttgtcataggacgtcttggggtgcagggctctcagcatgatggtttgcctcctcccgtgcccctgccctccataccctgcccccgggccttctttctgttggcagtgcacaaggaccactatgagaacctctactgcgtggtctcaggagagaagcatttcctgttccatccgcccagcgaccggcccttcatcccctatggtaggggatgtggcctgcagggaggggctggggaacagctggcccaagggggagggaggcagcaagagcctgggaggccagttcccaggcctgaggtgtggctgtggcatccccagtgcaccagggcccctgatccccttgcccctgcccagggctggctggggtggaggagggtctggcaagttccaggctgtttgcaattcccccacacccttctcccttgggctccagagctgtacacgccggcaacctaccagctaactgaagagggcacctttaaggtggtggatgaagaggccatggagaaggtgtctgtcctgttcttgggctctagggagggagaagggcagaagcctggctctgaagaacaggcacaaaagatctggggaggtggcaccttgctctgaaaagtctctaagtctgaggcctttcactgctgagccaagcagggcctgtggtgttgacctttggaagggacagagcctgaagtcctggggggtctggggggctgctccctggcatctgatgtgttcccaggtgccctggatcccactggaccccttggcgccagacctagcacggtaccctagttacagtcaggcccaggcccttcgctgcacggtgcgggccggtgagatgctctatctgccggctctgtggttccaccacgtccagcagtcccagggctgcatcgcaggtgaagagttgcccaggccgcctggggagaggccctgtcaaggt

SEQ ID NO: 13679 - DNA, 2300 bp, Homo sapien
ggagagcctaaaggatactagcccgagaaggtggaagcaggtctgtgtgaggcataaatctggagccagcctgcccgggctccaaccccaattgtggacctcaggcaagtgactgcttctctgtgcctcagtttccttgtggagtgggccatcgtaaatagtatctgtgcataaggtggttgtgcgataaatgagttaatgtatgcaaagcccttggcccagagccggcgcagagcattgtgtaagtgctggcaggcgtcatgatggagatatcatgtctcctcttgttgattcaggattctgatgagatggaggatgggcctggggttcaggattaggccttgaggcactgctccagcctcctttgtggcccctgtcacccttggcttcatcggcccgtagcaggtctcccctctcccacctctgcaggcagaggtgtccaggacctgcctgctcacggttcgtgtcctgcaggcccatcgcctaccctctaaggacctaggtgagtgcgcaccgccctggcccctgtgctgggctgagggaggaggagggtgctgaggaggagggtgctgtggctggatttggtggaggcgggtgggccggtgggcagggcctagaggagggagctgagaggagcttctgggtggaaggtggcagctggggctctgcctctggcccccacttcccctccccctcagtcttaacccacatggggctctaggtgatggaaggaagtgggtctgggcggctgggaagggctcttgtccaccgctgggcacttgttccttcccgcagtgaccccctctgactgctacgtgactctctggctgcccacggcctgcagccacaggctccagacacgcacggtcaagaacagcagtagccctgtctggaaccagagctttcacttcaggatccacaggcagctcaaggtgggccaggcatcagcgctgactctacccacatcctcgccagccactgccgctgccctgctcacctttctgtcccctccctcctgcagccctgtcactcttttcccctccagaatgtcatggaactgaaagtctttgaccaggacctggtgaccggagatgaccctgtgttgtcagtactgtttgatgcggggactctgcgggctggggagttccggcgcgagagcttctcactgagccctcaggcaaggcggtgtttccacggcagccctagctggtgtctgggttgaaatctccacgcgcacacatgcacacacacgcatgtctctcatactcactgacatatgtgcactccttctgaccctttctaacttacttctggctctcttcccagggtgaggggcgcctggaagttgaatttcgcctgcagagtctgtgagtcaggggcctggggcagtttgggtgggagtgccttgtgggaaggacagcactagtgcctgggggatgcccaggtctctgtggggtgggaacctggactcctgctaagggggctctgggggctctttccagggctgaccgtggcgagtggctcgtcagcaatggcgttctggtggtgagtgtgccagtgctctgggaggcggtctggggtccccgggactccctcatgccagcgacttgaggtacaggcccaccgctgcctcagcctggggaccctgggatttcagtttgttaagggaatacaatctcaagggcccaggtaatgaagtgcagaccagcagcagccagggtgctgcgagggtggggtccctgaatggggggtggggttagtgtctgaggggctgtcttcatgactcaggcccgggagctctcctgcttgcacgttcaactggaggagacaggagaccagaagtgtgagtccccaacccactgggacagcccctggctctcagctcttgtcttccccctttaagcattggacaattctccttggggcctgagctttccccttaggccttctcgggggactgtggtgggggatccatctccaccagaccatttcagcggggagagggaggtgccctccaggccacgcagcaagatgggttctgtgggcagagataccgtccccagcctctctgctctggttcctgtttccagcctcagagcacagagttcagcttgtggttcctgggtcctgtgagggtccgcaggaggcctctgtgggcactggcaccttccgcttccactgcccagcctgctgggagcaggagctgagtattcgcctgcaggtagtgtgcctcgctccctcgaggtggggcccccagaacttcctccctccctctgcacctcctcccagtctgacctctg

SEQ ID NO: 13680 - DNA, 2300 bp, Homo sapien
taaatccagactcccaggctccacccagtcagactgtcttgggccagagcctgggaatttgcacttgaacaacaccttgggtggctcttaggtacaccaaagttgagactcctctgccctacatcctgccatttggacagggaggatgggtgagtcaaggggagaagccctgcaggatctggcccccagccccctgtggctccatcttccaccctgtggaatcacatagctccaaggcccatgggattcttatagttccatgggattctaagcacaggacttcaggcctttgcagggccgtgcctgctgtctgaaagtattctcccaggtatctgcatggctattcacctccctgcctttaactcttcactcagatgttgcctagcctgaccactttatttaacacagaaacttaaggactatttctcccacccaaatacacactctcgatccccttgccctgctcaagtgaggatcttggctttgttttctggtgtatcctaggggagtggcacacagcaggcaatcgatcagtaagtactgaatggagaaagaaaaggagtgagactttccataagacctgaagggcaactggcttcagccggccactactagccctgtgggaggagctgcaatcctgggtgtccccctaggtaaactttggtatatctggctggcctctaaaggatcccacccatgctcctggggtggattccacctgccatgtcaatcaccttggcttagagttggagcctctggtgagtggggtgtttgtctgctcctcccagctcctgagagcctatcctcctgacttcctattgagcgatgtcacgctggtggcttaaactcaccgtgatggggggtattaacgccataggatcagcgaatacagcacactggagtttttatttcccccagagaatcatttgttaaacgtttaccagcacaccgctgatctgggttcaatgaatctgtctccctttgaagccaggtgccttgaggtgggggtctgggctttgcttagtggagcccagcgcctgcatagaatgcccagggcatgggagcatctccataagcgaatgcatccctcattctgccacacattccctgtgtgtttgcggcaactccgtcatcctttctagaccacagttgcctcctatgtgtatggagacaaggatgtcaccctcacaggtatcagtgacatgctgtatattaaagcttggggagagctgcaacacctctgacaaaggctgtggggcttacacccttccccagttcctggaggggagatgactggctcacagggtcattgtccctggatcaactagggcccagcattctgcagctggcagcgttctgctcttgcacctgctcaggacagcagtcactcccattccctttgcttgggcttctcccctccctggctttcctccaacacaccccaggaggctggatgtaagctccactccaggatatagtgataggcacgcacagtcaggctccatccagccaggcccagctcagtgacttcacagcctccagggacagccacctccaggagcccttggccttcacagttcccggtttccaatgatccctttgccccaccccacccctgcaccagcccctcaccctggccatgagggtccctctgtccctggagctccggcctccttttagtgcccatctccttagcctgtccctttctttcaggtgactctgcctccccccatttgctgaggcctcctccctccttctccaagacaggccctgctcctcttccccacctgccgtcttagtcccacatctgggctctgttggctggttaaccatcgatcttgcctggtaaataattcagggcctctgtttcctcatctgtgaaatgaaaagcctaagagaacgctaagattcttttggcctagaatcctgtgagtctctcttatgacagacagtgacattttccaccccagtagggacctggattgctactgccatggccagctgggtgctctccaagtcaggggtgctgtgcgaggagggcgtggcttctgctcctctgtgtcccagccactcctcctgtactcaggccccagctcctctgttctgcccagtggcctggcgcaggaaaggtgacccagtagttcagcctgtcccagctgcctgccccagcaccatcccagacccctttccctggggcccaccttggccctgaggaaggccagagctcggctgctgttctccaggaagtgcacacgcaggcggccccggctcgggggtggcagggcctcccctgagatgag

SEQ ID NO: 13681 - DNA, 2300 bp, Homo sapien
cacctgaagtccttcctattcctactagatatttttttccactgtgtgggccaatgcattccctttatactgtgtaagccaggcatggtggctcacacctataatcccagcaatgcaggaggctgaagtgggaagatcgttgaggccaggagttcaagaccagcctgggcaacctaagaagaccctgtctctaaaaaagaattaaatataaataaataaataataaaaatataatgtttaaaccagtttcacttgagattttagttacttgcaacataaataatccaaactttgttccgacccacagggttctcatttcaccaggggctgcaatcagtcgtggccaaacaggagccagtccttgcattgtatgcagtggctttagctgccgttgagctagaaaggaagaaaagcagtccacagcccccgccaacagcttcaaaatgccaatccctgttgaggtctatgtgcgaagcaccacgcagttcagtctgtcctccccgctcacaacatcacacaggactccacgggccgagcagttcagtctgtcctcccacgctcacaacatcacacaggactccatgggctgagggtcttactaggagaaggaacaagctcagtctccctggggtaagcgggtgggatgagggacttcctagaagaaacaggattttaactggggcaggcaggataggtgaatgtggatgatggagaatgggaaaggacgttcaaagctgaaagagcagctgaagcccagccttggggcaggagagctctggtcctgctcaggaaatggtgagtggcccatggagagcacccagagtgaggggggcagactagcctggttaggtaagctggcaggcttccaaggcctggctgaggcaaggtctggcaagtctggattttccttcccaggctgtgggaggcttcacaggcacgagcagagctgcactgtggaaaggtgcggggtggtggtgtccaggatgccgagttagggggtccgtgatgaggacccccaggggcagtgagggcagaagggggggtgcacgggaggaccgccacagcaactgctgcgagcaagggagggacgcagggtgtctggaagccagccgctgcagaaggggcctggcagggagaggacagcaggagaggaagcgtctctcagacgcaggaagccgcaccccacccgagaccacggcacctctcagcgtcacccctgactgcctgcagtgggcccaggcggttcaagtgtgactcatccctagcccagctctcaagggcgcgctgagcggctgtcctgctgtgggctgtggctgccaggagcgcctccctgaggagcgggctgtcgcttcagaggctccagggccgctggaagacacccacacacacacaccccagcccacactgctaccctgagtttagccagaggcgggtgagacccccagaattagaactcgccttcactctggcatgtagtccacggctgctcggggaggaagggatgggcgcccaccagctccctctgcacccctgcctccgagccccgggccacggccagctctgtggagcccagagttaacaccgtgtctctaattttggaggagactccacagccctcgcagttccaggtcaccccttcctccagggagcctacccttcagccccgggctaggcaggctgcactctggcagggcctggaaagccaagcccagggtctgtgaggccctcagtctatgggctgttccctgggggtgaatgagaagaccacggcccaggacgctccctcatcccctcgccctgggtgctcacagagaggccccaagagggtacagagggcagtctcagattgggaagtgcgtccacaggcttcccacagaggctctgccctttggtacctcctacgcagactgcagcaccccatgcggtggcagggccgctccatgggcctctgcgtcctgggagccaggacccccacctggagttggagaagttgctggcggggaagggaggatgatgaaggaggacatcatctggcaatggccctggagcattcctgaaccaccccctccctgtctgggccacgccctgtggcaggtgggaggacaatgccgcctgtgtgccgtcaccccagcacgctggctcaaggggagggctgtggtgcagccctgctccagccttggcctctcctgatgtccctctccctccctccacagcccctgctatctgccatctccatccgtccagctgggccgcctctgtggaacccaggcatcaccaaggtaagcagcccctgctatcta

SEQ ID NO: 13682 - DNA, 2300 bp, Homo sapien
tagcaggggctccctgatgacacctgggcacaacaaggacctcacagcaaagacaaacaggaggaaatgcctagggtgtggggacatgccaccactaaattacaaaaatatatgcctttcttctttgtatgtttcaacagtaccgcttcccactcttgtaccacttggccataacactttattatccctagtacctaaaaactagacagtattactgagaccttaaatgtgacatttgtcatctttcaaggtgccagttactgtaatacagctatggttcattttgagtgtctgggtgacggtgacatatttaattctatttttgtcttgtccataagcaccaaataaagcaattttgaaattactttcttcacactcaatttattatctagaacgacatttcaatacacagtatatttgttttgtggaattcattcgcagtgtatctggaggcctggatttaacatatttcctgtagtgatagctactctatttgtaggaactatttaggtcactggagtggagaaaaagaggtcgctacttaacagaaatggcatgtatccaaatatagatgcagttttctcaacacctgttgcacatcaaatgatgaagagattgttacaatttccaaaaccctggaccaaaaccttaaatgatcagcactttgtttcaactgatacacggcttaagtcagaaaaataagttcttcttaccaaaaacagtgagcctaaatatgctggctgctttagaaataaaacaggtgatcaacaaagcaatctgtttctgtctaaataatttcccagcaaaagtcacttcttttgaaactatatgatttgaaccacagggtatgcacagtgattgtgtgctttcagaaacacggtaagcatgacaaatattttcagttgtcaagggtaagcgaggagggaatgacccacctaagaaatggaaactaacaaatagtaatatgacactcccccttagttccacaggctggtgcggctgctacacgcagctcacttcctacgggcggctaaaggcggtgcatgaactgaacgtaggcggcctctttatcccctccccacaacactgtggggtggcacgtaaagacctcaagggaagggggcctgggcgatacgctctcctgctgccattcatttgttcaagaaatagttgaacaaatgaatagttaaacaaactctccaactaggactctgtcccattcggataccctacgcctctccccccatttccatccctaggcatcactccctcgtcaagaatatgctgattatggctcgcgccccctctctcccttggaccctcccgccagggcgaccggacgaggccagcgggagcaacgccttccgaaccgcaaggaaggagggctcggagtgcgcagggcgcgggttcgcgggaccctccagcgcgcggggctggccagccggggcggggccgagggcaccgggcgccgagctccgggaggggtccccgaggtcgcgccggccgggaggggcagcggcgggaggcggccgactgcggcgcacacgtggggagggcggagcggggcgggagccgggcgaggggcggtgacggtacctgatgaaggtggtcttgccggtgctgtactggcccaccagcaggatcatgggcttgttctcgaagtcggcgtcctccagcgcaggcgagtggaactcgtggaagcggtacgcctcctccagcggcagcaccttgcgcaggtagagcgagcgcagcccgcccgtcaccgtctgcaccgcgtccgcgccgccagcgcgttcgcgcccgcccgcctgccgccccatccagctgaacatcctgccgccagtccacgctcggatgggaccctgctccgggttcgactctccccggctcgcactgagccgccccggccgcgctggccgccgcccgaggagggccccgccttgtgctgccacagccagtcttcggccgctacgtcacgcgcgctcgcccactattcagacgagctctctcaggtccttcctgattggatctctgccagagagggctgaaggcgtcagccaattgagaggaggttcttaatgaattattgatgacggagtcattctagaggactgggcggggagatggtgtcttcccggccgggtggcactgaccggtcatgctcagggcccccttctggttgccggtgcctcacctctggccaggtggcatcggcttccgggtaaatctgagctgcccaaagcgagcctccggaggctgctccatctcctggaacgtttactcattcaggcctctggacg

SEQ ID NO: 13683 - DNA, 2300 bp, Homo sapien
tatcctttcacttactgaaggacatgttagttgcttccaatttttggcacttatgaataaagccactatgaacatccatgtacaggcttttctgtggatataagttttcaattcatttgggtaaatactaaggagctgatttctgcatcatatggtaagattgtatttatatccgtttgtttttatgtattctaaaaaaatacatcgaagcttttacttttgttgtcaaatatgtcagcctttgctttcataatttctgtccttaatgttggttagaaaggcttttccaccgccaaattgtataaatctcttgtaccttcttctagtagtgcagtggtttcattttctttttacatttcaatctttgttttattttgacacaaggcagatgtctaactttattttcccttggctttcttttcacttccctagttacatacaattccctccaactatgtgacccacacaacaactccaaaggagtttccattttgctcttaaggaaactagggcagagaggtaactcatcacatttaaaatcacacagccattaatttacatagtcaaggttcaaacccagatcttttgatgcaaagtcctgttctctcatactccaagtatggtccagggatgggtagcattggcaatacccgagagcctgttagaaatgtagagtcatgggccccatcccatacctaccgaatcagaatccgcatttctgttaggttggagaagtactgcagggtgtactgtttccccagacttaggccacatcagagtcacctagggcatctgttgagctccatctctcctcaatattttaactcagtaggtctggactgaagaccaggaatctgcattttaacaagcatcccagctcataaatgcatatatgcaggtggccccatggatcacacttgagaaatgctctaaaacaactaagaaatattcctaagctacaatcaaggacacaaaaggtgattatttcccccaatctcaacttagataagtgagtatccttttaacctagaaaagaaacaggccaggggcggtggctcacgcctataatcccaatactttgggaggccaaggcaggcggatcatctgaggtcaggagttcaagaccagccttaccaatatggtgaaaccccatctctactaaaaatacaaaaattagctgggcatggtggtgagcgcctgtagtcccagctactcaggaggctgagacaggaaaattgcttgaacccgggaagcggaggttgcagtgagccgagatcgtgccactgcactccagcctgggcgacagagcgagactccgtctcagaaaacaacaacaacaacaaaaaacagctaggaggtgacaatgactcacatgtcaatatgtggaaataaagttgtaataatgaggataatgtaataatgagagtaatgactaaattttcggctttacagaaaaacacataaagaaaactaaggggaaaaagcctttagctgatccagaatttagtgagggcaatgtggagaagtaggagaaacggctactcaaatagattccagtccacttcccctcaagattgtgtcaattatgcccgtgagcctgggtctcttggcctgtaaaacggagtcataaccacccgcccccgggaagacagaacctgcctgtccactttctgaacttttcatccccagtatcgacgtccagaggcctgaatgagtaaacgttccaggagatggagcagcctccggaggctcgctttgggcagctcagatttacccggaagccgatgccacctggccagaggtgaggcaccggcaaccagaagggggccctgagcatgaccggtcagtgccacccggccgggaagacaccatctccccgcccagtcctctagaatgactccgtcatcaataattcattaagaacctcctctcaattggctgacgccttcagccctctctggcagagatccaatcaggaaggacctgagagagctcgtctgaatagtgggcgagcgcgcgtgacgtagcggccgaagactggctgtggcagcacaaggcggggccctcctcgggcggcggccagcgcggccggggcggctcagtgcgagccggggagagtcgaacccggagcagggtcccatccgagcgtggactggcggcaggatgttcagctggatggggcggcaggcgggcgggcgcgaacgcgctggcggcgcggacgcggtgcagacggtgacgggcgggctgcgctcgctctacctgcgcaaggtgctgccgctggaggaggcgtaccgcttcca

SEQ ID NO: 13684 - DNA, 2300 bp, Homo sapien
tctgggatcacttggctctgaattgtcacctctgacaagcttttcatctttccctccccagggtgagagttatgaattacacatgaagtctacaccctggtatagtacccgcattctgtccgtgcctctcacttattcatagcagtgggtgtgcagtggtatctcactgtggttttgatttgcatttcccctatggctaatgatgttgaacatctttccatgggctggctggcatatcatcttctttggagacatttctattagatcctttgcccactttttatgtgggttatttgtgtttttttattgttaagttgtaagagtgctttacatatgccagatacaaatcccttgtcagatatatgatttgcaaatatttcctcttattctatggcgtatcttttcacattcttgttggtgtcctttgaagcacaaaggactttacttttgaggaaatttgtttttttatcttgtcacttgtgcttttggtgtcatatctaagaaaccagaaatcattgcctaatccaatgtcctgaaatttttattttattttattttattttattttattttgaaatggagtctcactgtcgcccaggctggagtgcagtggtgtgatctcagctcactgcaacctctgtctcctgggttaagcgattctcctgcctcagcctccccagtagctgggattacagatgcacacctctacacctggctaatttttgtattttcagtagagacggggtttcaccgtattggccagctggtctcgaactcctgacctcaagtgatccaccctcctcggcttcccaaagtgctgggattacaagcgtgcgccaccgcgcccgaccaaagtcctgaaaatatattcccatgtttttttctaagacttgtttagttttagctctcacatttaggtctatgatcaatttttaggtaatcaatctacatggtgtaaaagaggggctcaacctcgttctttggcatgtggatatccagatgtctcagcaccatctgctgaaaacaacatcgttttcagaaatcttgattgtcagaaatcaagtggccatgatttctattgacagtttgattagctatttgcccttggaaaagctctttgcccttactgagtctctgttttcctcatctgtacattgggagaataacaaggatcctgtgcatcactgggttgctctgaggatccagctagacagcacgtgcgaagtactcagtaatccatctggcaagtgggatgctcagcaaacgtcagctaatgttattgttattattgttgttgtattattattattcattccctgttgaggccaaagaaagaattattttctaacagccatgtctgcagccctgtgctggacaaagaggagacatgatggaaatctcctaggcccagccttcaaggagatgtggctttgtcagtgagccaaggctcagttggaaatggtcaaggtacattcatctggagtcactggggagctgggcctcagaggatgcacaggctggaggtgggcaaagggaagacacttctggtgaaggcaggggcctgtgccaagacccggaaacaggactgcttctgggagctctgggacctgacccagaagtttcgcgggtagtttgaggtgagcttggaaagatcaggcagggtcttggatgccaggccaggagcctggacttgtttggggcagggatgtgattaaaaaaaaaaaagaggacaagcattgtgcatgtcacagaggtgcctgccccacctgcctgcagactatgaggtgacacaatgagatcaggaatgggatggtttttgtcaattgcacacacacacagaataattgttattctaggagcaggaagagctcattgaagaacgtgagctccataggaacagggagtttgtttacctagcacagaagagtccataccgtggggccttgttcagagggatttggcaaaatgatctcagcgccttttgtcacccatgcctggccctgggctagagaagccacctgggggaagactttctggactttccagatctggccgaggagacagaggactcaaagcgtccctaacacagtgccaacagttatcttttgttgagtaccagctcgcattgtgccagctaaggctttgggggctttgcatttgttatctctttaagtgctgaagacagtgctgagagttcagcacgattcgccccactttacagatgggaaagtggagacccaaggtcacagaagtggtcgctggcagaagtaggctttgagcctaggtccaatggaccctga

SEQ ID NO: 13685 - DNA, 2300 bp, Homo sapien
agatttcctgcaaattccctgtaattcatactggggaccattggaaaatggggtggaaggatgactgtggttgacacatgagtgttctcgtcagggacagaagagctgccagcaaggaggacacacacactgggtgtgttgagtttcgccatggatgtgggagagggaccctccttgggtaggctgggtaggaatcctcacacctggctgggcatcaggatcatctgagggtttttaaaaggcaaactccaaagtgacttctgacaggctgattctcaggggagacccagaagtccgcatgcttcacatgctctcacgtgtacacattcactgagtcactctgatgataagggctgctgcggcaggttgggagcctctagaactagacactcttccatcttggagagcccaaaggaaggatgacgtattcatggtacacatactgcccagtagaaacagcccagggctgacagcatcaacctcagctctggcggcagaatccttcccaaggtggtgctccaggcaggcaccaccattcgccttgctggtgcttgggaagagctctatttgcaattctagctcagcatagaatgaggcctttctgttcccttacaattcagggaggctctgtggaggctcccccaaaaggcaagctatagtcgttgccatcaaagagcttgggccaggcatggtgcctcacgcctgtaatcccagcactttgggacgccaaggcaggtggattgcttgagctcaggaatttgagaccagcctgggcaacatgatgtaactccatctctacaaaacatgcaaaaattagccaagtgtaacttgtagtcccagctactctactcgggaggctgaggtgggaggatcacttgggcctgggaggtggaggttgcagtgatccaagattgcaccactgcactccagcctgggtgacagagtgagaccctgtctcaaaataaaataaaacaaaggcagagcttggagctctattgaggaggaaattaagaacagaaggcaagaataatcaatggggtacaacctcatgttatgcaaagcaagaaagaagagggacgatgagggggaggcaaggatgtcaggaaagcattcgggaggagctgaaacttgaactgcattaaggtgaacctagaagagggggcagtccatcccctggcataggttgcagtatatgctaaaagggcattgctgcatcctttctacaaagcaatacgtggatgtgtgcatgtgtccttgtgtctgtgtgtcagtatccacacccacttcacccttaaatccacgaagatgggcctggaagcaccgctggcattgtggtccctatgaatggccctcgctggagattcatagtacacagcctgcatgccctgtccagcgaccctgcatctagggctgttcagaacacaggggcaggagtgggaactgacccacatatggtccccagaccccacgggaggagctgcctcctcacccccagccaggtcccccatcctgcccctgtcctggcggagccactgcctccagggtactcccagcctcacttaggccctgatgccctctggccccaggtgatggatcagaagctgtcaggacagagagccgccctggaacggggtcagaaccctctgcccctctacttgagcctcaatgtcaaagagaacaatctggagacactggacttcaagggtacagttctacctactcccctcccacatactccaccccccaaaccctctgcaccccgacagcccccagagaattcatgctggaagctccgcacagattgcccaatgttccggaagggcagtggtgctgaggggctcagggcatctctctgtgcttgagagtgggtagtgcttgagggtgtggaccaagggctgggaggggtgtggtcagtccaggactgcccattcctcacatctgctgcattggtgccaggcacagcagggctcaggcctgctgggggcaggggcagtgtctttcgccagagctggggactcccgcaatccactcccctcacactcctgcctctccttcccaccccattagagtgggttgagttctccccctatgaggtcggtttcctgaagtacggggccttcgtccctcctgagctcttcggctccgagttcttcatgggacggctgatgaggaggatcccggagccccggatctgctttctggaaggtgagggtggtggctctgaaggccctgggcagccctgggccaggtgtctgaatggacatgggtcctgtagctcaggtggggcagaacctcaggac

SEQ ID NO: 13686 - DNA, 2300 bp, Homo sapien
tagattattgggctaaatatatattaatttcacctgtatcattttacctctttttttgtggccactagaaagtttaatacaacatctgcagagctcccagaacattcctactggacagtgctgttctagaccccttctctagaaacattcacacatgcatacatagtcacatactggactgtgctgttctagaccccttctctggaaacattcacacatgcatacatagtcacctactggactgtgctgttctagaccccttctctggaaacattcacacatgcatacatagtcacataattttgtatacaatttcagggacggttaaaagtatcctaattcccatccatggaccctagacccaaattaagaatctctgaattaggaatttcgtagttttcaccaggcccagcatctaccacaccatcattgcacaggtggggaaactgagcaccacgtcctcctccaggcacagccagctgtcttctgggggtgagggggtgtctggccctcccgtactggagtggggcgctggggctggggtcacctcaaggaacgtgttgctgcggctctgcctccctaggttcccccagcggatcccggcgggcgtatggggatgacaggggcagggaggttaatcaggactcctaaggtcccaggattcctctggaacgggcctaaacaatggaggccaccaaggaccagggaagttctggtgggtgggcttcaggacagacagtacaatcccagcctttccagtcaccagctgggtgattctgtattgctttgtctgtgacccacttgaaatgacttgttctttgtagttttctacatattacatttacttctttcccccccacccctttttttaaagagacagtgtatcactctgtcacccaggctgaagtgcaaaggtgcaattatagctcactgcagccttgaactcctgggctcaaacaattctcccacctcagcctcctgagtagctgggaccatagacacgtgccaccatgccccattaatttagaaaatttttttggtagagatggggtctcaacatgttgcccaggctggtctccatttcctggcctcaagcaactctccctccttgacctcccaaagtgccaggattacaggcgttagctgccatgctcaaccactacattcatttttttattaaattttatatcatgcaaatgacagatatttccacccaaataatgtttacttgttcatagaccattagattcctgttttggccaactctgaaataatacattttagatccacttgtagtattttaagattaactcagtttcatttgctttgaaaaacaacatcatcgctgttcaactgtttacagaattgatggtaaaatgactgaattcatgtcattttaggagagcgttcagtgctaatgtgtacactgaatgctttaagcggtgaggtggcttcacaaagtttacttctacaattttcataacctaagaatctcctgattggtctcttttacttttattacaaagtctaattgaaatcccctaaattcttagggcccgccgcatggaggtgaggggcttgtggtggggaatgtccagacccctgtgctgctccctggagcttgctcaggtcaggtgaggaggatacactagcccgggcctgtcaccacgactgctcttgttttcatcccctgaactccctgctgcacagagctgcccaggagggctggctccttgcctagtctcaggtgctcagccctcctcctctagaggctggccctggctccagtggagctgggggtttcctcagctctacccccaccccatcctctgccctcagcctcaggggaaccagcttcctgccaccactcctgggactcgtctgcctccccctggctgcatcttctgtcctgaaactccaggtctggaagaggtgctccgcctgcaggtcctggagccctgccagaggtttctggagatgctggttgacccagcctcttggggaagaggggcaggtgcagggctgaaggagcgacctgggggtggagccccaacctgtttataggatcgtggctcattgaaggctggcagattcatgctggtcctatcccactgggaccgtcgctgccactcagccagagagccagcatcttggcaagggctgggcctggagtgaagctggaagggctagcatggagagcctgtcacctgggggaccacctggccacccttaccaggtaacagtgtctgcagagcatgtgggcaccagtcagggcaggcctggagccagggtgcattctg

SEQ ID NO: 13687 - DNA, 2300 bp, Homo sapien
gtggttcaatgaagcattggtcagaggcttgggaggtggggtcagggaggaggagggatgtggggagggctcactgttggggaggggcacccctgaactataaggaccactgggcaaaggaggatgccactttcccctctatttcactgtcccgcccctgtctagacgactgccagaagcctcagctgcacaacccctcgaggctgcgaacgaggctcctcaccccacaggggcccttctcccaggctgtgctggacatattcacctcccgcttcacttccgcccagagctttaacttcacccggggtctctgcttgcacaaggactatgtggctggcagggagttcgtggcctggaaaggtgggtgctgccttgggtgggagatggggggcttcccttcctgcctgcacctctggctcactggagccagtgctggctttgggctgggggttgaggtgtggtctcctgctgcctatgggctgatgcggagcgactctaaatactgctggaagctggaaggcagggccaagggcttggggcaggagtctccatggctgtcagagagaactctacagagagaaggcaaacgtgaatgcaaatacagaagcggttgctagcaagagtaactgcattcgtccctgtgcgtacacatgggttccttgcagacacacacccggacgccttccccaaccagctcacccccatgcgggactgcctgtacctggtggacggaggctttgccatcaactctccgttcccactggctctgctgcctcagagagcagtggacctcattctgtcctttgactattccttggaagccccttttgaggtgagctgggaggcagggatgtggggagcacctgcagtgagtggacagaaagggtgagggaggagaggaggggaaagaaggctctggtgagggggactggctgggtgtgtggggattgccctttgtggacggcctgggttccactctgtgtgtgagggagctgccttctgaacgctgttggcagcacaggtctcccagttgcaggagagttgctgagattatggtgggcgtgggaagaggaggccaaagagggtccccaggaatcttctagcctcatccatagaagatcccccagttctagactctgcccattcatgacagatttccccactccagcttggacctgagtctgtggcccctttgttaccatggtaacaacagagccatgagggtcccctctgatgcagaagccctgcagcaagtccctccatctctgctgggtggtggacggatgcccccattcccatgtgggtgctggtggtgctgctggagcagcccttcctttggtctcctctttgtcctgggtccagtgagagcctgggattgactggggattgatgaagcctcttctgacgtggaccttctgtgattgtcgcatgtcaaccttgtgaaactgacatcagcttctaatagggagcagagaggggtgagagaagggaagaccatggtggttcctggaggaccatggcggaatgctgttgaggcagtggatgattgattgttgatcattactgattattgttaatcttcacaacaccactggatggggagctttttttttttttttttttttttttttttagatggagtctcactctgtcaccaggctggagtgcagtggtgcaatcttggctcgctgcaacctctgcctcctaggttcaaatgattctcctgcctcagcctcccgagtagctgggactataggcacacaccaccatgcccagctaatttttgtaattttagtagagacggggtttcaccatgttggccagggtggtcttgatctcttgacctcatgatctgccagcctcggcctcccaaagtgctgggattacaggcatgagccaccatgcccggccggaagtttaaaaattttttattttacacatgagaaaccagctcagaaaggagctgtcacctgcctgaagtcactcagctagtcagaaacagagctggcattgaagcctgggcgtgtgtgagtccagggcggcgggagtggccagggtggaggaaaggcagagtcagaggcttgctcctgctcaggtcttgaagatgacagagaagtactgcctggaccgaggaatccccttccctagcatcgaggtgggccctgaggacatggaggaggcccgtgagtgctatctgtttgccaaggctgaggacccccgctcccccattgtgctgcacttccccctggttaaccgtaccttccgcacacacctggccccaggtaagggaagctccaggc

SEQ ID NO: 13688 - DNA, 2300 bp, Homo sapien
gctccttataataaacctaataaagcaagaaaccaagcctatctgggtctcttatttctccctcccgtggagtttgatgaaaataacaatgaaaagatagtagtttagcaaagaacttagaagaataagccaattagtgaccaagaaaaaatgaatataatacttgcattacaaatgccacgtggtacagccagtgtggtcatggctgatgagtcagcagcacagatacggaacacatccatcattacagaattctgcgggacacactggcgtctgggagatccaagtgttttcccccatcatgtagtagcacctggtgcctcttcctgcagcccatgatgaaggaattgggatggagggacgcagaggtgtttgggaagtggagaagtgttggttcactttggccaactccaaagagaaaatgtagtccttgttgtctctgtcccatctggcactaggggcaatgactttattgtgcagtggggccgatgacttccagaagaggatggtacagccagaaagacacatcagtcaggagctagagccccagcctggttctgcccccagctagctctgtgccctctcctcttgtatggatccgcaggtcccctgcatacattcacagctatcaccaactgccagactctcatttcttagagcccaggccaagtcttggcttcacaatccaaataaagcagaaacaggcccttctttggggcctggtcactggcagtcacacattccttttttggggggagtttctggtctgaacttgcccattcggttcattttggagttgaatcacatcttttttggatgttgtatttttcagcctgtgactctaggccttgggaagagtggagatgactgaatcttagttgagggacagaaattctctccctcccacagttcacggcccccgagatcctcactcttcctggagactgtgcctgtctcagccaccttgatggttgtggtccacagaagagcgaacatcacatccatctgcagcctaaggcctacgatggccaaagagaatgctaaagcctgtatatctggtcgctgaaggatacgtagacttgttgtttggcctgtccttatttataaccccctgcccatatgcctgtctgtacctggacactgtacactgacccaggaagcgagcctgggccaaagccacagggagtcatgagactgaatttctccaggatgtggatgggcccgcctcacctctgtcacctttgcgtttctgggcctagcacaggtctggcacccaccaggctcttggtgtttggcgaattaatgagggtggtcaggagagattaaaaacatctttgatgagttcatgtcctttgtagggacatggatgaagctggaaaccatcattctgagcaaactatcgcaaggacagaaaaccaaacaccacatgttctcactcataggtgggaattgaacaatgagaacacttagacacagggcggggaacatcacacaccggggcatgtcggggggcagggggcatgggggagggatagcattaggagaaatacctaatgtaaatgacgagttaatgggtgcagcacaccaatatggcacatgtatacacatgtaacaaacctgcacgttgtgcacatgtaccgtagaacttaaagtataattagaaaatatatataaagagagaaacatctttgatcccagatgaaacactgaagcagagatttctaggcttcagcttaagagccgcagggaaggtgggacttgaagggtggctagtttcaggccttttccacagctggaggagactcttccctgatttgcacttgccagctggtctctgggccagctgtgccagcttcacctagaggtcttgttggaaatagctccggtgtctatttttcacaaacagcccagtgataaccagggcgctgggtttgggaacaagagtgctaaccagagaccccaagagtctcttggagagggactgagctgcctcctgcctggggaaattaagctccagtcacttcctggagcatgtcaaactccacctccagcaggccatccagcctgagttctctgcagagcaggcagctccaccctcccaactcagtgctgcctgtcacacctgagccagcagtttgtgcaaccagaggagcgcaggcagggttccctgctggggcccgggctgcccagccatgctttgggcactctggccaaggtggctggcagacaagatgctgcccctcctgggggcagtgctgcttcagaagagagagaagaggggccctctgtggaggcactgg

SEQ ID NO: 13689 - DNA, 2300 bp, Homo sapien
tctcccaaagccagtggcattgtggaaggccctccactgccaatgtcttagctgtaggaaggtgagcacacgtccttccctggccttcttcactgacaatgggaatgtgtgaagtaactgacactagtattgtgccagagagatggcagagcaagaccatgggctctgccagactcaagagaatacatactggatgaagttctaggataggcagaaactcatctccagggatcaaaagcagatcagtaggtgggattgtttgggaatagcacgaggaactttctggagtgatagaaatgttatcttccttcactgaggtggttacatgcatgtacacatctgtcaaaatgtatctgatggtacactttaaaagattagattttattgtaagttatacctcaataaggttgatttttaaaaaaataaaagaacatgggctttggagtcagcccccagtgtgaatcctgccctaccccttatgtagcagctgacacctgtgccttgggttcctcacctgtaaaataaggataatattatcggcacttgttttaggtttaagatggtatatataaagtgcttggcatggtgcctggtctgtagtaaatattcaataaataattgttgttgtctctgtggcaatttggcagtgctaaaaatcgaatgctaatgtgagatcaggccaataggcatgagctgattggaggtattcagaattacccagtagctcagatgacaaaggaagacttagtcctggccttaaccccacattttgacctttgcagaaacgaagtcaattggtaaagaagctgaatgactctgatcaccagtcaagcacctcaccgctcatggaaggcactcccaccatcaaatccaagaagaagctgctacaaatcatcgacaccaccctgctcaagtgctatctccatgtgagttacctgagcgctcgggtgccacaattcccagttaccctgacagtctgggaaagtaaaagggagtgctagaccctgagggacctgccattagtaagagtgaagtctttgattctggaaaccatatagacttctcctgatgtctgtgagtctcttggaattaagaggatagggcaagatatcaatgcacaattgtacagtggattcatcttctctggtcggattgcagttagtgctacaaagtcagctgggacagtatttccttcaagaaatgttctcccccacagaacattaaaacacattgtgcgaaggtccataaatgctctaaaagcctctacctgctgtcctgaaagagggctgtctgctttctcttgcttgtgctacattcctggcctttcagcctagagcaggcctgggccagggaagggtggggctccccaggaagcagtttccactgaactcctgctctttctgcagacaaatgtggccctggtggcccccttgctacgcctggagaacaatcactgccacatcgaggagagcgagcacgtgctaaagaaggctcacaagtacagtgagcttatcatcctgtatgagaagaaggggctccacgagaaaggtgtgggagtggttccttggatctgggaggggctcttgtacatggcaggggaaacccactgagatatggaaatctcccgtggggaaaaggctcatgaccttgttcttgggcttggtggccagctctgcaggtgctcgtggaccagtccaagaaagccaactcccctctgaaaggccacgagaggacagtgcagtatctgcagcatctgggtaagtccgccttttgaaaggggtgggaaagcgctcctgttcaaatgacctggtctccctctgtttctgtttctggttggttgctcccctccctcccgtgctcgtgttcactcaatttcattcctccaaatggcataaaagtccctcggtggttggcctgtgacagccccctggtatggagccagcccagtagggctaacaaccccaagtggctcatgcttgagctgtcttttcaggaaaatgaattctggggcaacctgcccacctgccttcccagtgccacaggcaagatgggcctcaactgctgacaagtcctgcttttccttctaggcacagaaaacctgcatttgattttctcctactcagtgtgggtgctgagagacttcccagaagatggcctgaaggtgagccacaggagtcccttggatttatctggtaaacacttggttctgattgcacttgagacagcagtggatggagaggagggtggattcatgcatctgtcttcattggtgcatgaagaaagggtggactgggaagcgc

SEQ ID NO: 13690 - DNA, 2300 bp, Homo sapien
tcagtgagatccctgtaactggataggctccgtggtccctttttattactgttattgaatgaacatttgctaaaccttgtcagaaatgtttaattgggtctcatgatttcctattttccagatccatgtggtttcccagtttaagattctggtcagcttgttaggtaagaaaaggagttgcatttgtatcctgtgtctaacaagaaaagatatgacctaattaatcctttcatggttaatttgatagtggttacttaacaatgaactgacgtgttccaaacctggtataacagggtacatggttaataaaggcagcagcatcctccatagactcgaactcttctctccaaggagtctcactttattcattcattcgttcattgatcaaatatttattgagcctattctatgcaaagtctggactagacattcgggataccaagttcagtgagacatagttgctatctttgagacttacattctgattatgaagactaaatgacaggaagtaatcacgatacaatgtggtaagttacagtgaaaatttataaaaagtgttgtggaatcttggtaatgggagggactatattgtctagtagataactagactttcagtaggaaaagaggccagcagcgtatcacaaacacagggaacaactagaacaaaggccttgagatgtggcagtttgtggcaaattgtttattgtggccagactaaggatatgtggtggagattggcaggatatcaggtaagagacagagcagggctacactgttgaggccctcatgtgaaaaaccatggtttcatagaaagcagccagtgaggccttttctggacatgcaggggactagcagctgatctcacactttgcgctgttgaccctggggcccaaagagtaaaatcatgttaaatgttgttcctgggtccacagataaacatctgaggtaacttaatcttcatgactaaaactagatatgaggcccaggtaaaatgattattttgattgctttgctaggaaagaaatcattgccatgggttagtacaaaatgcacaggggatttcccttttctaattggagcctcctaatgtgagtagctttgaaagccatttcttgtataaatactgcatcataatatttcagacttgaaatggacagagtataagagtgctttggactgggtgcagtggctcacaccagtaatcccagcactttgggaggctaaggcaggaggattgcttgagtccaggagtttgagaccagcctgggcaacacagggagacctcatctccacaaaaaataaacaaaattagccaggtgtggtggtgcatgcctgtagtcctagctactcaggaggctgaggtaggaggatcacttgagtctcaaggaggttaaggctgtagtgagctgagatcatgccccttttgttgatgcactctagcctgggcaacagagtgagaccgtgcctcaaaaaaaaaaaaaaaaaaaaaaaaaagagtgttttggaagtgaaagatctcttttactcaagtcagccccaattttttttttttttttttttgagacggagtctcactctgtcgcccaggctggagtgtagtggtgcagccctggctcactgcaacttctgacctcctgggtcaagggattctcctgcttcaaccccctgagtagctgggattacaggcacccaccaccatacccagctgatttttgtatttttagtagagacagggtttcactgtgttacccaggctggtctcaaactcttgacctcaagtgatctgcctgtctcagcctcccaaagtgctgggatgacaggtgtgagccaccatgccgggccaagctcaaatgtttaaggaagaaaatatccaagtttagaagaccaagtgacctcttaaatgctttgtactggttataggtgagaatgaatcatcctagtgaaactgaagggacatcttcaaccaacatctgccatttgcttcttctagatgttaacacagttactttttttgcctcgatagtggctatgctagagaattatgatcattgatcctgatgttatacctcctcccaaacagaaaataacatttatgtccatgacctattgacatttcaacaaatcactacggtttcaaaggcaaagggagcatcactgtttacttgtgacctccaggtaagtttacccaagatgaaatttggctttatgctttaatcaatacagtctttcctacatcattcctaccattagatgggaagaatgacactgatgatccatacccaacagagactccaaagatt

SEQ ID NO: 13691 - DNA, 2300 bp, Homo sapien
accacaatcttcactaactcatactgcagtgaaagtgttaacccttaggtagtttctctacaactctttgctatggtgatttttaaaaaagtttcctaggaagtatctctgaggaacagcaatctgaagaactgactatattctcatgctaagtcattagccaaaagctggtggtattgttgcatgctgctattgcatattaaaacgtagcagatgaataatagttgtaatgcagcaggatagttggtcaaattatttttttaggctgctttgatgttgacttgagactaggaaaaaaaaaagcccattgtgttaagcgggagtgtatagttcaagttctatagcctgggccctgataattctacttacagctttctgtattactgggaatagatatagtgtgtcatttcttaggttcagaagaaattgatagctttgcagtaatctgtaaaacaatataaaccttagggttttgggcctgaacgaaaaggtactagaccttccagcacaacagctggtaattctaaatttttaagaaggtgatcagcttctatggtgaaaatcagctataacacaggatttgtgtagcaattttcatgtttttgactacttgaaagtacttttcacttgattatcagaacagcatttggtaaagatgggacaagtattcctaatttacatatgaagaaactgatattgtgtaaaaataaaatgaccaggaccagtttttttgacttcatatcacagacttaccctttttcttttacatttttgctttaaacccaaatgcttaattttttgacctacgatgttttcctagggggaaatgaccagatatagatcattcttgcagcccaaactttgttgttttttaagtcttcaaggggaatactaaggtaaccgcagacagtacaggtcccaggtcctataggaggaaaagccatgacaccttcctaaaggaatattaggatgtaagacacagctttggaaagttgaattggtaggaatgtggtcatcaaattaaaaggaggcttatttcactgacttccaagagttagtgaatcatctcttgcctaaactcttgctactcaaaatgtgatccagggaccagcaacatctgggagatttttggtgctcaactgagggtcttactctggtcctactgaatcaaaagaggcattttaacaatgtctctaggtgatttgtatgcacgttaaatttgaaaagcattggcctcaaatggtggttctcagggtaattttgcctcccagaggacatacggaaaagagacatttttatacctctgtggggaagataactggcatttggtgggtggaagttagggatgctgttaaacatcttacattgtacagaacatgccccctcccccaacaagaaattatcctgtcctaaatgccggtagtgctatcgctgaacaaccctaacctaaaatggtggttctcaagcttttaagtgcatggactcaccttggggtttattaaaacataggttgctgttcccttcgagtttcagattcagtagaactggaatgggcctgaaactttgcatttctaacaagttcacaggtgctgctgctactgctgttgttgctggtctagaaccactttcagaaccactggcctagaacaaccatgaaagcattaaggtaaggtgcttgtactaattgggatataatggtaatactaaagctaccacttactgagagcttagtgggtgtcaggtgttgctaagcgctcacgacactaggtcacaggtatttacaaaaattttgcagattaggaaagtatggcatcgaaatattaaattttctaaatcacagctaatttcctaattggtagatctccgtctgaggtcgacgccaaaggccgagtttttaaccatcacgcccactgcctaaagcagttctaagattaagagtttgttccttctatggtaagcccatggctactcgggatggagtagctatgggtccagagtgacgatggcaactcagcaacaaaacaattcatttagagtgcaccgggaggaaggggcgggacttcggctgcggaagaggcgggcctaactagcaggaagtccggggttgacgatggctgtgttgttgaagggcctgtagccggggggttcctggccggatcccggtctacccttagcccagactcgttccggaccccagcccggcccggaacactctgggcgagacggcggtggcaactctccccttgccgccatgcacgacgctttcgagccagtgccgatcctagaaaagctgcctctgc

SEQ ID NO: 13692 - DNA, 2300 bp, Homo sapien
tgtgttacaaccacctatagcattcagtacagtaacatgttatacaggtttatagcctaggagcaataggctgtaccatacaaactaggcgtgtagtgccatccagttttaagtatactctatgatgtttgcataatgacaaaatcacctaaggatgcttttctcagaaagtatcaactgtaaatgtaattcgactgagatgtgactgaatattcaatgtagtatatacagcatatatattaatatatacattatatatactaatatataatgtctacatagtgtatatatgcaatgtaaacaccagaaaaacaagagaagaaaataaagttcacacgagtactttgaagatgattcagtaaaaggaccttagtaatactaaaaatatttatacctagataatgccagactattagatttcagaacttataaaataggtaatttaaaacattacctataaatttttaaaattcaaattaaaacttcatgaaattcaaaaactcacacttcaggaagatagtggtatttctgaagaggatctttccaaaactaaaataatttttcccctgcaaacataaaggaaagataattagcctcagatggcttcaattaccaaagcatcatataactatctaagactgctagaaattccaacttaacttaaatctttatgggacgtaccccttaatcagttcattccctttactcaccaatcactgctcagaataaccaatcattttttctaatgaactattctgtgtgcaaataaccagagttttattttcaaatctaaaaagacttaactattaaccattttagtaacaagtaaaaacctaactgaacacctgaaaatcttcaccactgaacaaaaggtataacgtttaccataataaaagcccaaataagatttggacattacagtcagtgagcagagcagaatgaaacaaaaaggccaacgtaggtttaatggggctaatgcttttcagcatttcctccctgcatctggtttttgtctgctcacaggactatacctgttactgaaataaggtttaaaatgggtaaggggcagaaagggtcaacccatgtagttaattatccaaatgaaagactagccttaccacattaaattttaagtactatttcttcaattttaaccattcccatgttaaaacacatttcttaaatctctatgctttctagtcacacagtaaagcttagaatagccattccaaagttgaagcgaagtcgaaccatctcgtaagcagaattacccagggaccaagaagtgcagaggaagaaaaagaaagaaagaaatgaagactcctatttacatatctttcttatccaacccggggacactggattctgtgaaacatctgaaagataaacaactctccgtttgtacatcaagtttacatctcaagtcaggcactgaaagttctgtttttctgatgagaagccgctccaccactcctttctgttgctgaagtggcccttacattcccgctagcctaatcacagaagtgcgcggctttccactccagggaggtgggtcccagttggctagccacacagaccatcccagcaaccccaccccttttgaagagacttttgcggaaccttcatggaccccttgggccgccgtagccccaccccttgctcctctaggttcagacgttagtgaagtgaatactcaccgacggtatcggaatgtgccatttggaccggtcggcagcagctacggttgccggtcccgcactgaaaaacgacagtggtgacgggtgagctcccagaagcagaagaatgacaggcaacacctgaagccacgcagccgccgccatcttcacagccgtggagtgcctaccgaaagcatttcaccctcttccggttcgtcccgccttcttccggctctgctctaagggcgggattatccgggtcctggaaacgtcgcggagcttgtttgctgtgcggcgtagcggcccctctctcagacagtcgtctgtgcgccgtgagactttggacctactgcgcaggcgtcatcctgttggaacctggtcagctgggttagagagatcgctacatgccagcctggcctgagtcttttctgtctcccagccgttaaaggttttaggaccaggcaggcaccccgtgcaggatttggctctctacttccgctcgccccagcccttcatcccttctaagtcaatgtcagactttggggccagaaagtctggaaaagccctaagcctggctgcccaagtggcgtctagtagtgagttctccggtttgggtggtattta

SEQ ID NO: 13693 - DNA, 2300 bp, Homo sapien
aggaagatagtggtatttctgaagaggatctttccaaaactaaaataatttttcccctgcaaacataaaggaaagataattagcctcagatggcttcaattaccaaagcatcatataactatctaagactgctagaaattccaacttaacttaaatctttatgggacgtaccccttaatcagttcattccctttactcaccaatcactgctcagaataaccaatcattttttctaatgaactattctgtgtgcaaataaccagagttttattttcaaatctaaaaagacttaactattaaccattttagtaacaagtaaaaacctaactgaacacctgaaaatcttcaccactgaacaaaaggtataacgtttaccataataaaagcccaaataagatttggacattacagtcagtgagcagagcagaatgaaacaaaaaggccaacgtaggtttaatggggctaatgcttttcagcatttcctccctgcatctggtttttgtctgctcacaggactatacctgttactgaaataaggtttaaaatgggtaaggggcagaaagggtcaacccatgtagttaattatccaaatgaaagactagccttaccacattaaattttaagtactatttcttcaattttaaccattcccatgttaaaacacatttcttaaatctctatgctttctagtcacacagtaaagcttagaatagccattccaaagttgaagcgaagtcgaaccatctcgtaagcagaattacccagggaccaagaagtgcagaggaagaaaaagaaagaaagaaatgaagactcctatttacatatctttcttatccaacccggggacactggattctgtgaaacatctgaaagataaacaactctccgtttgtacatcaagtttacatctcaagtcaggcactgaaagttctgtttttctgatgagaagccgctccaccactcctttctgttgctgaagtggcccttacattcccgctagcctaatcacagaagtgcgcggctttccactccagggaggtgggtcccagttggctagccacacagaccatcccagcaaccccaccccttttgaagagacttttgcggaaccttcatggaccccttgggccgccgtagccccaccccttgctcctctaggttcagacgttagtgaagtgaatactcaccgacggtatcggaatgtgccatttggaccggtcggcagcagctacggttgccggtcccgcactgaaaaacgacagtggtgacgggtgagctcccagaagcagaagaatgacaggcaacacctgaagccacgcagccgccgccatcttcacagccgtggagtgcctaccgaaagcatttcaccctcttccggttcgtcccgccttcttccggctctgctctaagggcgggattatccgggtcctggaaacgtcgcggagcttgtttgctgtgcggcgtagcggcccctctctcagacagtcgtctgtgcgccgtgagactttggacctactgcgcaggcgtcatcctgttggaacctggtcagctgggttagagagatcgctacatgccagcctggcctgagtcttttctgtctcccagccgttaaaggttttaggaccaggcaggcaccccgtgcaggatttggctctctacttccgctcgccccagcccttcatcccttctaagtcaatgtcagactttggggccagaaagtctggaaaagccctaagcctggctgcccaagtggcgtctagtagtgagttctccggtttgggtggtatttaagcaaaggctggaattcggcggtggtggagtacacgcgattcctagactgggtagtgtaacaaccttcaaaggccccttctagccctgaagagtacgatgctgcagtacaatctggctggagacctagcctccagcaaagacccggccggcacttcccacccttaaccgaaaacggagacagagagggtcagttttcaaaatctgtggcgtgaccccgccactgagatagatctgcagatgcttcgtcccagtcagggaggccgtctcggcatttccaggttcttaacgctcttgatttttaccctctaggactcattgcgtacacgccctcaccgccgcccagtttcggttcctaacaaaagcacgttcctcatcagccacccataatcaagacaaatttgccaaataaatcattgtagaaacgctagtttgggcctgaaaaattccaggagcaagagtcaagatttgtcactccatgagaatctggaggggactcccttcccagaaac

SEQ ID NO: 13694 - DNA, 2300 bp, Homo sapien
tagtcagcatgtccatgattatgtagaaagctatgactgaacacaaacgtcgaaatattatgaaaacaagcccaggcagatatacttggccatactaaaaaactgtttgtccttcactgaactcagtctttgtccgtttattttaatttattaaaaaaattttttttgagacaggatctcgctctgcctcctacgttggagtgaagtggcacgatcttggcttgctgcaactgccgcctcctgggctcaggctatcttcctgcctcagcctcctgagtagctgggactacaggcccacatcaccacgtctggctaactttaaaatttttgtagagacagggattcagcatgttgcccaggctggtctgaactcctgggttcaagcaatctgcccacctataggcctcccaaagtgctgggattacaggcatgagcgaaccggcccagtttattttaatcaagtgtacaaagattggagaatcttttgtttcctctttacagcttcgaagaattaactctgggatgatataggaaggggtgattatagatgaatttggaaagcaacatgcctgaaattcacgtgttaagagttctgattgcaacttttccactgttaatgttatttaaccatcctttttttttggagacagggtctcactttgttgcccaagcagtggcaagatcacagctccactgcagcctccaaatccatcctcccagtggtctcccaagtagctgggactccgagggggcggggagggggtctcgaactcctgaactcaagcgatcctcccaccttagcctcccaaagtgctgtgggattacctgcgtgagccactgcacccggcctatttaaccatcctgaaagtattttatgagaggctattaatatcaactaacttcccgcgaattgagagaaaagataaaggtcagcaaataccaaatacgcaaataagaaatgcaattaaaacactattccctgtttctagggaccctggggtcactcgctacagaagcacttggcctttaccttatttcctctttcactgctgcttccatggcttctctgtcactccgaccagctcccagctctcaggacaagggccctgggcgatcttttaaaaaagccgattgggtgtctttctaaaattacaaccagtacttcatcgtcaagtttctgggaagggagtcccctccagattctcatggagtgacaaatcttgactcttgctcctggaatttttcaggcccaaactagcgtttctacaatgatttatttggcaaatttgtcttgattatgggtggctgatgaggaacgtgcttttgttaggaaccgaaactgggcggcggtgagggcgtgtacgcaatgagtcctagagggtaaaaatcaagagcgttaagaacctggaaatgccgagacggcctccctgactgggacgaagcatctgcagatctatctcagtggcggggtcacgccacagattttgaaaactgaccctctctgtctccgttttcggttaagggtgggaagtgccggccgggtctttgctggaggctaggtctccagccagattgtactgcagcatcgtactcttcagggctagaaggggcctttgaaggttgttacactacccagtctaggaatcgcgtgtactccaccaccgccgaattccagcctttgcttaaataccacccaaaccggagaactcactactagacgccacttgggcagccaggcttagggcttttccagactttctggccccaaagtctgacattgacttagaagggatgaagggctggggcgagcggaagtagagagccaaatcctgcacggggtgcctgcctggtcctaaaacctttaacggctgggagacagaaaagactcaggccaggctggcatgtagcgatctctctaacccagctgaccaggttccaacaggatgacgcctgcgcagtaggtccaaagtctcacggcgcacagacgactgtctgagagaggggccgctacgccgcacagcaaacaagctccgcgacgtttccaggacccggataatcccgcccttagagcagagccggaagaaggcgggacgaaccggaagagggtgaaatgctttcggtaggcactccacggctgtgaagatggcggcggctgcgtggcttcaggtgttgcctgtcattcttctgcttctgggagctcacccgtcaccactgtcgtttttcagtgcgggaccggcaaccgtagctgctgccgaccggtccaaatggcacattccgataccgtcggtgagtattcactt

SEQ ID NO: 13695 - DNA, 2300 bp, Homo sapien
gagagatcttttcctggcctatagactgctaccttcttgctgtgcctacacatggcagagagagataaagagaaggtgctgtctcagttttcttcttacaaggacactgttcctgtcgtttcaggaccccatccttatgaccacatttttaaccttagttaactccataaaggcctgatctccaaatatctcaggcttggggattcagcatatgaatttgggggacatacaaacattcagtccataatgtgttcctctgtaaaaagaaccaaggatgctagtgttctgcacaatagcacatatgcatagagacagaaggtaggtccgggggtgcctagtgctggggcagaggagggttaaggagtcatggggaatgactgtaaactggtccagggtttctttttggggtgatgaaaatgctttaaaattgagtgtggtgatggttgcatgactctgaatatgctgaaaactgtttaattgtatactttaaattggtgagttgtatggtatatgaattctatcaaagctgtaaaatgtgagaaaaaaagttaaaaatcacatctactctgatttcacagaatgagacatcagagacaaacacacctcttccccgtatgtttacatttgtgtgtctaagaagaacaaaaacactgaaaacaaaaaacatggtagtcaccatatgtgccatctggaatatcattctacaggattaaggcaaaaaacaggagttttcagttgtaatcctgggcccaggggaatgcatcagttatgatgttaaaatcaaagtggtccatccaggctatcttgagtttctaaagggaactttctttctacacctgaattacaaccactgccacactactacaggcccaaagtagtgtgaagattaatagatactgatattattttgtaaaccatcagcagcaatatgaaccccattatttaaaaaaatagtttcagataccaactttcagatctagaagagaacttaacaattatctactctaatccctcacacaggtaaaaaaccctgagattcagagaagttaaattatttgtccaggaacacagcaaacttgtggcagaattgagacaagcccccaggtgcattcccttgggctggactcccattctggaacccatttcactctaacttatggccttgttctttgaaaaaaaaaaaaaaaaagaagagagagattggccagtgaggaaggggcatgtgtggggagatggaagtgctttacttctcactgccgaggcaagttaagcagaggtgggacatctgaactactgagtcctcagtctcaacttcatgtatgttcttgtactctcctgcatgctcattcttgagtcagagcaaagcacaagcccttctctgacacaggcagcttccttataggaggtgggaaacctaccctggcattgctacctggagtgccattccagaagactcatagttatgggcctgttgttagggtctcttaaagtacccttggtagtctctaatgtaagagcagcagtttcacagatttaccctcagaattgagtcagtcatccaggtaatccatgtaatccaaacagggagcaagaggggacaggctgcagtgagtgaggacaaaagtcatctgtccaaaccaagaaaccaccatcagttatacatacacacatacacagacttctgggcccactcacacagacagaaaacttcactcttcagcagggttctggaaataagcatgtatatactacactgataggaaaatttaaaatacaaaataggaaaagccacttataggatgggcagaaaggaattcatcacttaagaggaaaaaacagcaaagacaggtatagataacaaaccaatgaagggtgggaagtttccctaataattaaaaagtggaccattcttcagcgttagagctcttttccttttaatgccaggacccccatatttgccatctctgtgccccaaaatttattttgcctacaaatccgtacttgtagactgtgaattttataaaatgaaatatttttaaattctaccttgaaattttcttatatgaatactgcttccctgagcgtgctgctctgttacagattccagtgtttcagcgaggtggaagtgtgataccaataaagacaactgtaggaaaatccacaggctggatgactgaatcctcctatggactccgggttgctctaagcactaaggtatttggtaaatctgttactcattttgtttctactctttctttacagtgatagccttttgagtgtgtgacactacgtaaaagtgg

SEQ ID NO: 13696 - DNA, 2300 bp, Homo sapien
aaacttatgacagtgggggaaagaaaccccacctttgctgtctatgccactggtgactttgagggtggaagtcagtctttttgttgcaggcagataggccagcttctgattggagatgctgcataccacatgagcctgggcagattatacctattcctgtgctgtccacatagcagatattcagttaatgcccattgagtggatgctgatttgcgtcagcgagtaaatgtagcattcgacctgatctaactccaaagtaatattaaattcaggtcttctctaacaacaccatttattgagtgcttaagaaaatcctggcactgtgtaaaatgtattacataaattatttaattgttaccaaaacctaataacagaatgactgtaattgtacctattttataggtgagaaatctgagacagaaaggaagaaataactcacctaaagttacacaggcacagccaataaggggccaacctagactttgaaccgaggtggtcagtcaccagagaccactgtcctctattctgcctctccaagactagtaaaaagccctgggcattttcttggagggacagatggctaggctgatggttcctgcaagcccagacatagagtccttcaaagccgcaatcccagggatcaggaggctgatagtactccctattttacctgtcacttcccaccttcttccatagcctctaatcttggattattgagactggtcgcatgggaacaggcatgactgcagcctaggacatgcctccactctgccatacttgaaatgtgctcatctccttacagcccagggagcagctattgtgggtagaagacaaggtggaggccaggcaggcacttcccttccccagagccacttatgctctcatctaagagccctgaaaccaggtgtgacatcccaggagttgacagacagtctggttcagtatctaattccaacttctgtctcagatgcctaatgtggcatggctgaatgagtcaacatataacctgtacagtaagtcctcacttaacatcattgataggtgcttgtaaactgtgactttaacgaaaacataccgtgtgctgtagggacttaactcttgtttatatcagttagcctggtttcactatacagtacatcattttgcttaaagtcacagcttacgagaacctatcgatgatgttaagtgaggattttctctgctcaggtgcacttttttttttttttaagacggagtctctttctgtcacctgggctggagtgcagtggcgtgatctgggttcactacaacctctgcctcctgggttcaagcaattcttctgtctcagcctcccaagtagctgggattacaggcacccgccgccacacccggcttatttttgtatttttagtagagacagggtttcactattgttggccatgctggtctcgaactcctgacctcatgtgatccacccgcctcggcctcccaaagtgcagagattagagacgtgagccacatggcccagcaggaccactttttagcagattcagtcccagtgttcattttgtggatggggagagacaagaggtggcaaggtcaagtgtgcaggtagagacagggattttctcaaatgaggactctgctgagtagcattttccatgcagacatttccaatgagcgctgacccaagaacattctaaaaaagataccaaatctaacattgaataatgttctgatatcctaaaattttaggactaaaaatcatgttctctaaaattcacagaatatttttgtagaattcagtacctcccgttcaccctaactagcttttttgcaatattgttttccattcatttgatggccagtagttgggtggtctgtataactgcctactcaataacatgtcagcagttctcagcttctttccagtgttcaccttactcagatactcccttttcattttctggcaacaccagcacttcatggcaacagaaatgtccctagccaggttctctctctaccatgcagtctctcttgctctcatactcacagtgtttcttcacatctatttttagttttcctggctcaagcatcttcaggccactgaaacacaaccctcactctctttctctctccctctggcatgcatgctgctggtaggagacccccaagtcaacattgcttcagaaatcctttagcactcatttctcaggagaacttatggcttcagaatcacagctcggtttttaagatggacataacctgtacgaccttctgatgggctttcaactttgaactggatgtggacacttttctct

SEQ ID NO: 13697 - DNA, 2300 bp, Homo sapien
cagagatgatgaaaacctagaccaagtcagtagcagcagagatggaggggagacagcagatttagggagagcatattgggtgatgtagggaaggaagaagaatgatgtcaagattcccagttggggacctgacaacattgcaacataagacacacaagaagatcgggtgggtggctcatgcctataatcccagcactttgggaggcagagccaggaggatcacttgagcccaggagttcaagaccagcacaggcaacatagtgacacctcatcgttacaaaaaataaaaaaaaaaatgaggtgggaggattgcttgagctcgggaggttgaggctacaataaactgtgatcatgccactgcactcctgcctgggtgacagagtgagaccctgcctcaaaaaaaaaagacacacaagagaaaaatatcagcgtgttgtttgtttttggtggagttaattgtggggttctagggaaaggaatttagcttgggacatggaaagtttgaggttcctgtagagtgtcccagtgaagatttgtaatagagcatcggatgcgcatattagatggcacttggtgatatgataagaactcaaaaaatatttgaggaataaaggaaagaagaggccagacgtggtggcttatgcctgtaatcccagcactttgggaggctgaggcaggcggatcacttgtggtcaggagttcgagaccagcttggctaacatggtgaaaacccatctctactaaagatacaaaaattaaccggggatgatggtgggtgcctgtaatcccagctacttgggaggctcagtcagaagaatcgcttgaacccaggaggcggaggctgcagtgagccgagatcgcgccactgcactctagcctgggcaacagagccagactccgtctcaaaaaaaaaaaagtgagagagattgaggctgggatatatggctcaggcatcatgcgcgtgtagggggcagttaaaaagcagaagtaagaaagattgcctagggaggcaggaagggtgaggtgagaggagaagaggcccaggaccagattctagtcaccaacagcgtttaaggggcaggtaaggaaaacaaaaccatcagcaaagactgagaatgaaagcccagagaggaaggaaaagccacacatacaatcagtacagctccatctgaataaaggtagcgccccccccccccccaaatcattagagaaatgcctgaatcgtgttttctgttgatatttcctaagcacctagatgtagggaatagaaataaatggctccctctgtctcatccccttcctgccctctgagaggcagctgtgaatgcgtgcttcctttctgggggtgcagatactttctggaccaaccctcagtaccgtctgaagctcctggaggaggacgatgaccctgatgactcggaggtgatttgcagcttcctggtggccctgatgcagaagaaccggcggaaggaccggaagctaggggccagtctcttcaccattggcttcgccatctacgaggtgtgcagtcctgattggctccagcccaggaaacatactttcccagggaggacgcttccaggggcttctagaggggccctctggcttcctcaatacccagtgacccacagagctcctggtatcaggaccacttgtgtttgtaacaagcaaaaaataccagggggggcattagagaggcagtggagcgggcctggcagaacaggtgcctgggggtcaggcttccgcatgcgggctgcagttgctggcattgccttccgcaggctcctcatcctcattcacatctgaagcatcttcctttctgtttcttctcaaggttcccaaagaggtatagcagcagcagcggccagcagttgtgtgcagcactacccagggggccccgagtctgtctgtggctcgtcgagaagcttcctggtggggtttgtgggcaggactgtgataggagagggccttgcctgtgttatttccactgcagagcaggtgcctcagggcattgcatgacccatgactaccacccccaggatgtgcactttctccctcgcaccagacactgcacgtcacacacatgcctttgcacactcaccctcctccacgcttacagccacacacacagtcacacagacgcgttctgagggtggctgcccgcttgggatggaggaatcacttccctcagaacccagccaagtcctctaggcctccttgggggtccttccagcctgaggggcttcggagctgaggagcagctgttctggtaagtgtccctgagtgtggggatgacacat

SEQ ID NO: 13698 - DNA, 2300 bp, Homo sapien
gaaactgtgacatgggtgaccagggagttgggaagggacccttggaggtggctgtggcaggacaggatgttcctcccgaggggctcatgtgccctgggctctccccatctctcagatgcacgggaacaagcagcacctgcagaaggacttcttcctgtacaacgcctccaaggccaggagcaaaacctacatcaacatgcgggaggtgtcccagcgcttccgcctgcctcccagcgagtacgtcatcgtgccctccacctacgagccccaccaggagggggaattcatcctccgggtcttctctgaaaagaggaacctctctgagtgagtgctggcccagctttcccacgtgtttctaaaagctcacatggcccactccagaggttgaaggcatgaggcagctagacacgtctcctccagggtccttctgctgctcctgagccactggccacattacccccattcattcattcatccattctgtgatatttattgagcacctactatgttccaggcactgtcctaggcactaaggatagagtagtgaagtaaacagaaagaaatccctgccttcatggagcttaatattctaacatgagacaataatggataggaaaaacatatgtagcatgttagatttggagaggtgatatggagcaaaaataaagtagggaagagggataggaggtgttggggatgcttgaaattttaggttagcatggccaggaaagccacatcctgtccctggccaccacagatgagctcatagcccctgccactctgatctctgtccttggaagatgcaccaggtccatgggtaggtggctgggtcatgcctttggggggctctgagcaatactaacaagaacctgcgtgcctgggcttggctgtcggggatggtgctgacatggggctggttcctggggttggggtgttccaggggttctctagaggctggttctggcttggctgccaggaagccgtgcaccagagcaaaccgtccacgggcctcctgcttgcttctggtgacactgagaccccacatgtctgtattcctcacagggaagttgaaaataccatctccgtggatcggccagtggtgagtggtttagatcttctgtgcgaaaagtccagagggtccccttccctgaccatgcaggggacagatggtgcaggggagaatgggcactggcagagggaatgggagtctgggctgtgctgagcagtccctccttggcactgcaaatcctactttggcatggccagaagtaatcggccttaagcaccgggggccattgaggcagttcaggggctgggaaatatggaagagggtcctggaaaggagaagcaatttgaacaatcggagggaacaaggccacaggaagggatgacaagagccgcagcgaacactggattctgagactggataacattggatttcacacatagagaaaagaaagtaagctggtgccggacctggtgttgacacttggatcctccacttaccagcggggtgacctggacaatttctgtaatccctctcactcagtttcctactcagtaaaacggggatgataatgtgccttgcaaggcttttgtgaggcttcatcaatgaggtgatgtatgtgaagtgtctggcacagcatgggcactcaaacagaggtgctttttcacactttacaccttacaaggtacttttcacatgtgtcatcgcgatacttgcaaggttgctgagaggtagatggggttataatccctggtgttcaagaaaggaagcagaggctcaatggggttgaatgacttctctgagttcacagagctcagtaagtggcagggttggaactcacattcagactctctgactccagacttaggtttttccgcacctccacgctgaggccagccccaggcagtgagaagcccaaagtccgaagcacagagtgctgtgtgttgggctctgtgtgttgaggagtcttgtgactgccttggggctttgggctgtagtcagctgacagtcctttgtgctctgtggggatgacgtaggccaatgggaggacaaatgcccctctgaactgtcttctgggcagtgacagtcatggtcataatcctgaccctgagccagtgccaggtctccaagtgccttctgaatgaccacaggcgattggttttagtggtaggtgtgtggggatctgttctggtcatctggatgctggtcatcggtgtgcagtattgatcaggacctgcaaacccaaaagcttatgggagctggcacgtcacgtgagtagagcaggcaggtgcag

SEQ ID NO: 13699 - DNA, 2300 bp, Homo sapien
gtgctagcatttctggtggtgcctggtggtgatggatccatcacaggggtcctccaggtactggtgctggcccagaccagagctgacactcctcaggcactaccacattccaggcactgtgcttggggtcagtccctctcttttttttcccccccaattataacagtatctacaaagtaggtgctgttatttttcccctttcacaggtgagatagactcaaagaagtgaacttgcccaaggaacagaactaatgagtggggaaaatggaactggaaaccatgtctgtttactccaaaacctgtgtttcttgccctctttctctgatgccagccccctacacttcaaggcctgtgttgtccagacccacactcgggcctgccagtgtgtgcctggcagggatgctccatggccacaccatatccatcctacacatcccccctcagactgtgacctccatttgctctgggatccccacaagcttcagctgcttgagcaagacactgcttagaaggcagagcaagccaaggcctctggggcctgctgggagccaaagctggggagccgtttccacgggtctatctgcttgagctgtcctagatgagcagcatggaagggcagtggtgcatgagtccaggcgggctgcttttctgctccgagaggctctgcctgcccagttgttctctgcattgcagcctcaatccccacagccttgccttcccccggctttccctacaggtgcaccgcatccacagtgttggcaccatgcagcagccgctctccgtccttttcatatccttgtcacttgcacgagcatgtcttgaaaatatcccttgtttgtgtagcatcttaaatgtttttgcagtatgattttgcattcagtatctcatttgatccccacaagagccctatgaggagggaaagcagattttaccattaaaggatgagtaaactgaggccagagaggatatttttggttttttttgagacagtctcactctgtcacccagcctggagtgcagtggcttgatcttggctcactgcaagctccacctcccatgttcacaccattttcctgcctcagcctcccaagtagctgggactacaggcacccaccaccacacccagctaatttttttgtatctttagtagagatggggtttcacccagttagccaggatggtcttgatctcctgaccttgtgatctgcctgcttcggcctcctaaagtgctgggattacaggcgtgagccaccgtgcccggccagagaggatatttcttatatgaggggcagggctgggattccagcccagtgttctgatggctcacccactgaccatgccactaatccgtgtcctttttcaatctatactttgcagggttgtagaggttcctttgaggtgcctcagtagctgccatggtgatgtggggtgctgagggcaaagagctctgttctcattaatcagagaagcttgtgtttttatatacaccatgtttctgcaggaaatttaatttgaacagtgtttccatctggaaaaaaaaaagtctacaaaatacttgacaatcactgcactagatcatgctgcttttagcattcttagcatttcacgtgctgagctctcaatactctaccatgaggagggatggagtgggtatgaaaagataaagaactgaagtcacacggcttgtcagtggcagagatagagcttgaaccgaggttgaagagctcccgcctattcctttcctcttctcactggataaagctgctccaagagaggtgctgcctcagtgtgcctgttcagactgtaatcctcccttccttcctgcctcctccctcctctctccagcccatcatcttcgtttcggacagagcaaacagcaacaaggagctgggtgtggaccaggagtcagaggagggcaaaggcaaaacaagccctgataagcaaaagcagtccccacaggtgtctgggcatgtggcatgggtggggtggccagcacgctacaggggcttcctatgcgcttgggatacacaggggctggaggcttcccaggagtttgtcttgaacatctggaggtttgaatttgtcccactgaccttttctttcagcaagttcccctgaaatttgggctgctgcttgggtgaatatcccaggatgggggttccattctaggagtggactggcaggctgagcctcccatggagctgatccagccaggatacagagaaggggaggcaaaggctgagacagaaccagcttgagagcggaggcgcaactcttgtctcctggtggccttgagcatt

SEQ ID NO: 13700 - DNA, 2300 bp, Homo sapien
aaaaactcttttaaaaggcttttcagtattaagggttctaacgtgtagtctttggcatagcaggaccgtacactagtgaaaaagattttgtaaccattttttaacattgagacataacttcatacagtaaagcacacagattttaagtatacagcttgatgaatttttctgcagatatttgtttgtataactaccacaaagatcaaaacgtagaccatttcatagccctgaagcttccctcaaatgcctccctgggcataaccttcttctaaagctaatcactattttgactcctgtcatagattacttttctctgtgcttagctgtcatatcagtataactgtaccacatgtgttcttttatgtctagctttagctcaccataatgtttgaaaattcatctgtattggtacatgtgccaatagtttgttccttttttattgctatgtaatgttcaatttcccctataaagttacaaaagatctcataggattaatgggaagcaacatgaatcttaatatttaggcatatttactgtcttttgctgtatcttacaatttcatatatggcacttatgtttgtgattttttcaggggagaaattgaataatttaagtgactgactcttttaggtatgaaagaaggttgggagacgagaccaatggatttgacaagccacagcttttctcatcctacccaattgtaaccatcttgattttaatatctacagccaagcccacttaaaaagctacacctgggtcttcagtatcattcaacaacaaatttttttttttttaattgagacggggtctcgctgtgtcgcccaggctggagtgtggtgacctgatctctgctcactgcaacctccgcctccgtggttcaagcagttctcctgcctcagcctcccaagtagctgggactacaagcacgcaccaccatgcccagctaatttttgtagttttagtagaaacagggtttcaccgtgttagccaggatagtctcaatctcctgacctcgtgattcacccgcctcggcttcccaacgtgtaggattacaggcatgagccactgtgtccggcctcaacaacaaattttgaatttactatgtcctgtcccaattcttggttctagataaagagatttgctagtacaatctagttggaggaaattggtagaaatcgttttctggccgggcacagtggctcatgcatgtaagggaggccgaggcgggcagatcacgaggtcaggagatcgagaccatcctggctaatacgatgaaaccccgtctctactaaaaaaatacaaaaaattagctgggcgtggtggcgggcgcctgtggtcccagctactcgggaggctgaggcaggagaatggtgtgaaccggggaggtggagcttgcagtgagccgagatcgcaccactgcactccagcctgggcgacagagcaggactccgtctcaaaaagaaatcgttttttgaaggtcagatcaaacagtgggtattaaatctgcatgtgcatctgaattactagggaaattttttaaaacacagattctagagcccactgaattaagagtctcagggatggggttggagcttgggttctatgtattttaaaagcctcttgagtaatttagcccagctaacctggcaccagtttgaaggagacatttgggagctattgaaatagagaatcatgtgcggaaaaccacatatttgattagtgcatttatcaaatatataactataatcctgattttcctctttagatgtcaaaatagagctttgtcttttatatttggcctcttaatttaagaggctaagacctaactcatagtaccctttgaagaatttctacattctaagttagaaacatgggtaacattactagaatttatgtttatttttcatattacctacagcttggaagtcttaggcctcatatttcaaaggagaaacagatctaagatagtcccctacaaaatagaggatgtcacactttcttccgcataagagtcattttaaagtctgctttctggaggaattgtttttgacatctcatttgccagtaccctctgctgattaaaggttgtgtgcttttatcagagccgagagtgtgtggagcagttacagctggaagaccgggtcctctgcctccacagtagatggcgaatcctctatgcgggactggcaaatggcactgtggtcaccttcaacataaaggttagtggttggaggagaaaaggcttacttcccatgcacttgaaaacagtgtgagcatgtgtgggaagaagtagcaggcag

SEQ ID NO: 13701 - DNA, 2300 bp, Homo sapien
caaaaattggaaccctaggttctgcaactacagaattgttatctggcagcactcgaactgctgatgagaaagaggaggatgaccgcatcctgaagacttctagagagctatccacttccccatgtaatcccatagttcgccagaaagaatctgaattacaaatgacatctgcagccagtccacaccctggcttattgctagacttgaaaacctctctagaagatgcacaggttgatgactctattaaatctcatgtatcttatgaaacagaaggctttgagagtgctagcttggatgcagagcttcaaaaaagtgacatcagtcagccctcgggccctctcctgcctgaactaagtaagcttggctttcctgcctcacttcagagggatctaacccggcacattagtttgaagagcaaaactggagtacaccttcctgagccaaacctcaatagtgcccgccgcattcgcaatattagcggtcaccgaaagagtgagacagagaaggagtctgggctcaagccaaccctacggcagattctaaatgcatctcggagaaatgtcaactgggaacaggtcattcagcaagtaaccaagaaaaagcaagagctgggcaaaggcttacccaggtgtgtgctgcttttcggtgtcttttttttcctcactttcttttaaagtaaccctttgaccctgatcaagagaattctacgtgtttcatttaattaaatgtttgccaacaatatctgttgtagatgtcttgatttaatatcaaatagtgactgatactctatgacagatggaataaagtatttcctagcagagagtgcaggttaaaatggaagcacacctacttgagaaacaaggtggtgacgtaggaaaaaagtcatggctttacaggggtaaaatccgtcactttataggggtagaaaatgacagcataaaaatgtagagctatagatctctgtctttttctagatcttaattttggaatgcgtgctataacttttaaatacaactgttctcattaccttttacttagaacctacgaatagttaacttttctgtatgtactctgggcattatctttatgactacaacatgctttctcttaagcgcttgtgtaatattttggctcttcatcttatgttgaggtactagacttttctgaatgctaaaacagtgttcaacgtaagtttgctacttgaaagtcataactctgctgcatgatgatacagttctccaggcttcaggggcatttctgtacttgttgaaataatgggtttatttccccccactttcctttcccacaccttgtgagtagcatttgaaattgtaagtataaagcacttgtaagtgctcagtaaaagggtttttttttttgttttggtttgtttgcttttaaaaattatatgctgtatgtattattatagatttagcgctccatatgaaacaaaactcaatttttactccctcaaatatattattatagctgtatacaaacctctaatctggtacttgtgacaacgtaatatatttatatctgtaccactgactagactgtgagccccttgaaggcaagagccaccttactttttataacctcagtgcttgagagagcctggcacattaaaaaataatgcccctcccaacaaccatatccaatttatgttttcattttttctttcttccttaaggtttggcatagaaatggtaccccttgttcaaaatgaacaagaagccttagatttggatggggaacctgatctgtccagtctagaaggattccagtgggaaggtgtttccatttcctcgtcccctggcttggcaagaaagcgaagcctttctgagagcagcgtgatcatggacagagctccttctgtgtatagcttcttcagtgaggaaggtacaggcaaagaaaatgagccccagcagatggtttcacctagtaactcattgagggctggacagagccagaaagcaaccatgcacctcaaacaagaagtgacacctcgggctgcctccctccgaacaggtgaaagggctgaaaatgttgctacccaaaggcgacatagtgcacaattatcctctgaccatataatacctttgatgcatttggcaaaagacttgaacagccaggagaggtctataccaccgtcagagaatcagaattcccaggagagtaatggagagggaaactgtctgtcatcaagcgcatcctcagcccttgcgatctccagtttagcggatgcagccacagatagtagctgtacctctggtgctgaacaaaatgatggccaaagt

SEQ ID NO: 13702 - DNA, 2300 bp, Homo sapien
ccagcctgggcgacaaagcgagactccatctccaaaaaaaaaaaaaaaatacttgcctcaggattataaaaactaagtgagataatctatataaggtgcttagcattaaatgcctgacactcaggtactcagtaaattttagctagcagtactcagtattttgagcacttaccacatgctaagcaccatgcccatgcacaccataggcagtttgtagaagaaaatggtttttacacctattgctgtgatgcttactgaagcttattcatgtttctgtggactcctcgtctgacatgaacatgaaacagctgtagtttctttttaaaaacctctggctcatgaagctccttatagcacatattatggttactacttgtttggtatatgctattttcctcctgtttgtgaccttactgtctcagctaggttctaaggccttcacaaactggaactgtacataaaagtcttcttataccactaacagttattgaatgggtactggacaaagtgtttattaataaaaataaccatgcaaagtatcatcttatttaaaataggttaagaaatggagtttttcagaaagaacctacaactggaaaaatcatggtattaagggcagctgaacataaaattgtactaaatatgataactaggccgggcgcagtggctcaagcctgtacccctgtaatcccagcactttgggaggccgcggtgggtggattacctgaggtcaggagtttgagatcagcctggccaacatggtgaaaccccgtctctactaaaaatacaaaaattagccgggtgtggtggcgcatgcctgtaatcccagctagtcgggagtctgaggcaggagaattgcttgagcctgggagacagaggttgcagtgacctgagattgtgccactgcactccaccctggccaacagtgcaagactctgtctcaaaaaaaaaaaaaaaaaaaaaagataactatagctataaaatatacttgttctttttccaaaaaacctgcataatacaaaaataataattggatgatagggacaaaatctcagaacatgccaagaaaaacaagaccaagaaagggagggaatataaatgtgccaaatttttgtttgtttttttgagagagtctcactgtgttacccaggctggagtgtaatggcataatctcagctcactgcaacctccacctcctgggttcaagtgattctcattcctcagcctcccgagtagctggggttacaggcgtgctccactacgcctggctaatttttgtatttttagtagagatggggtttctccatgtcggccatgttggtcttgaattcctgacctaaagtgaactgcccgcctcggcctcccaaagtgctggaattatagatgtgagccaccacacctggccaaatgtgccaaatttttaatatttctgagtgatgggggagatggttgtaattacttgaaatttaagtaatttaaaatgttttatttttaaattaataagttgaggaatatacgtttaaatatatcatttaaagatatgaaaacaaccactattagatataaaaccagactcggttacatattctaagtaacgggaggaaagtacaagggaagtttggtgggttatgcctttcaaggtagcataggaattcctttaaatcgctaatgaaaaactgtttttcttccagacaagatgaaccttccaatagcaaccaagaaataaactctgatgacagacgaccccaatggagacgagaagaccgaattccttaccaagacagagagagttacagtcagcctgcatggcatcatcgtggacctccacagcgggattggaaatgggaaaaagatggctttaataatactaggaaaaacagctttccacattctttgaggaatggtggtggaccaagaggacgttccgggtggcataagggtgttgcaggaggctcctcgacttggtttcacaaccatagtaattctggaggtggttggctttcaaatagtggagcagtagattggaatcataatggtacaggaaggaattccagttggctttctgaaggaacaggtggcttttccagttggcatatgaacaacagtaacggaaactggaaatccagtgtacgtagtacaaataattggaattacagtggccctggagacaaatttcaaccaggcagaaacagaaattctaactgtcaaatggaagacatgactatgctatggaacaagaaatctaataagtcaaacaaatacagtcacgacagatataattggcagcggcaagaaaatga

SEQ ID NO: 13703 - DNA, 2300 bp, Homo sapien
ttctgatgctgcccattgtgatagatttatataattaacttctttgtgtgttgctttgagaaacagcttgttattaacgttcagttggaatgagctaccatcaatttaattgcttgagagaaaagtatcggtatccctggtaaactggagaaagttgaggattattcttttttctttttttcttttctttttgagacggagtctcactctgttgcccaggctggagtgcagtggtgcgatctcagcttactacaacctctgcctcctgggttcaagcgattctcctgcctcagcctcttgagtagctgggattacaggtgcccgccaccatgcccgtctaatttttgtatttttagtagagacggggttttaccagtttggcccgggtggtctcaaactcctgacctcaggtgatccatccgcctcggcctcccaaagtgctggaattacaggtgtgagccaccacgcctggccgaagattattctttaagtgtataaatgtagtaagtgcagttgaaaaccctcagtaaaaataatgtatttaagtacctgtggaattagaatattgatattctgggtaatcaggtattgatatttttaggaaacctggtcagagcacattaaaatgaatcttaaaaatgtcagtatttgaggttacaaagtcaaaaaagagtgaaaacttgcaaattttctcagtttttctgagctcttctccatgatccttacaaaataaggaacagtgttgtttttttaaacttactgggcattgtttgagtgtttaaactttgtcaccctaaacaagagtgtctatgctaagtatttactagaagacagtttctgttacaggtcacctgaatattcatttaaaaaaaaaaagaaaacaccttaccaaaaaacagcacacctagaatttagctgttttttggtaaggtgttgtttttttttttcttttgtttttttgagatggagtctggctctatcacccaggctggagtgcagtggtgtaatctcggctcattgcaacctttgcctcctgggttcaagcgattctcctgcctcagcctcccgaatagctgggaatacaggtgcacaccaccacaccaggctaatttttgtatttttagtagtgatagggtttcacaattttggtcaggctggtctcaaactgctgacctcatgatctgcccgccttggcctccccaagtgctgggattacaggcgtgagccccaccaagcccggccttttttttttttttttccttgaatgaatattcaggtgatctgtaacagtaactgtcctctagtaaatgaagtgcccagttttgagggtctcttctggttgatgtaaattctgcctatgtctagttaggtatttgtgagggaaagatggaacagaggtgcacgtgtgtgtatgtgttctgtctggacaaagacggcatgtccttttgggttgttggttttttttttaatagattggcataggaagtgcaaaaatataactagtctaaatccaggacacatgatacagagttaagccaatttggattgttgaatggatactgctgtcttgtaactatggtgttcagatgtttctcataaatgactgcatagtcagctgacccagtcaagggatttccagaagctaaaaagcagttaaattactgatctgctacagctgtggacactgattcaagactggcttctgaagactggctaagtgagatttgcatgaagtatgtaaagtaaaaaaacaaaacaaagcaaaaaagtctgcctagtttaactaaaaacctggttttgcatctctctcaactgtagcattttctgaaacttgagaaaacacatttgcttggcacagctgttaacttcctacaactgaaatgctttccattccctttaaaataagcccttctgaagcagaatgtagatcacatgtatcatccagaccaaaaaagtttgcctggactactcctggggtccggaatcctcacattccaggcagagctccagctgttccgatttagttaccgacttgggattggctgcgccacctactcttgtttccaccccttaactttcactggaagaaagctctagactaaagattaaatgtaagcgctgtcaccaggccttctgagtgcagctggcaccatgggtgtgctccagagcaacttctgcttgctctgagccccctgccctgcctcccctttcaccatgtttcctctgacaagattttaagtacagcaattcaagaagatttctcctcctaaacgacatttatctgaagtctattgcctctt

SEQ ID NO: 13704 - DNA, 2300 bp, Homo sapien
actacaggtgtgcaccaccactgccggctaatttctgcattttttgtagagacacggtttcaccatgtcacccaggctggtctcaaactcctggactcaagcgatctgcctcccttgacctcccaaagttataggattacatgtgtgagccactgctcccagtctgctgctaaacatcttataatgcacaggatacccctgacaaaaaagtatatgttccaaaatgtcagtaatcccaaagttgagaaaccataatctagcgttaccttggcactcaccaatatctgactgtggtcttctacaggcttttccctgaatgatggcccagagtttatagggtaaaatagttcctccattgcatgcctttgaaggagaatagaatgagcagcgtaccacaacccttgagtgtttcaaggacttgtgatgtcacaaacacggaattggaagtttcctaaacctctagaacaaatctggatttacatagaagaggttaatatagccgcttcctttcttttttctctctctttttttttttttttttttttttgagacgcagtctcgctctgtcgctaggctggagtgcaggggcgaggtctcggctcactgcaacctccgactcccgggttcaagcgattctccttcctcagccttccgagtagctgggactacaggcacgcaccaccacgcccagctaatttttgtgtttttagtagagaaggggtttcaccatgttggccaggatggtctcgatctctggacctcatgatctgcccacctcgtcctcccaaagtgctgggattacaggcgtgagccactgtgccccaccgctgcttacttttatttgagacgttgaaggtcttgttaaacagagatgttataatctcaataatataggagggacactccacataattatcaacctgaatgtcatttcatttatctgatagtcttagtcactaaaattaggtttctgagggaatgggtatgggctaagtttaataataaatataggcggccgggcgcggtggctcacacctgtaataccagcacttagggaagccgaggtgggcggatcatttgaagtcaggagtttgagacctgcctggccaatatggcgaaaccccatctctactaaaaatacaaaaattagttgggcgtggtagtgcacgtctgtaattccagctacttgggaggctgaggcaggattatcgcttgaacccggaaggtggaggttgcagtgaaccaagagagcggttctgcactacagcctgaacgacagagcaagactccatctcaaaataactaactaactaactaactaaataaataaataataaatgtaggctgggcgcggtggctgacacctgcaatcccagaactttggaaggccaaggcaggcagatcacttgagccgaggagtttgagaccagcctgggcaacatggtgaaaccccgtctctacttaaaaaatattataaataccttaggcatgagtaagaataaagtcagtattatggaatgtctgctctgtgataggcagcattcatagataaacacttgacctatgttatttaatcctagcaacaccctgtgagataacattatcctaattttaactcaagaacctgaggttccaagaagaattgtaatttacccaaagtcacaaattattcgtagctagtccaagatctgaaactcaggtctggctgttctaaagctcttgcaccttccattcaacttcagaaagttttacaaggaaggagtgttttcaaaatgtagcccgaacagttgccactgactaaaggaaatggcgggacaccaaggaagagagtaggagctacagggaggccgggaaagaacaaggagaaacaaggagaatgaaaaagggaccagggaggctgttcatagcgtccaacgctgcgtactgactctcccgcaagcgggcctgcctttgttcttcctccattctttttgagaaaaacctcttcctgtgtgtccgttgttcactctcttgtgttcaaataaagctagattattgagaactgcggacggcaaaggaaaaaaaagcgagcgtgacggcttcggtgtgcgcctgcgcgttggcggcggctgtggcggggcccggcggggagcgggtccggagcaggctcccggacccaaaactgaagggggcgtctgaggcgtcagggagctccctcgcctggctctcggcggcctgatggagtaagaggggttggctgtgaatgtgagtatcgacgggccggcctgcgttgagcgtatcggagcccaagggtcctggtc

SEQ ID NO: 13705 - DNA, 2300 bp, Homo sapien
atgaccatcacaaccctaaatgaactaatgaactcaaccatacattttctccacctctgccctcaacaagtgactgctgcttgagaaatttacacaggagggcagaaaatggtgagttcatttttgcccatattaaaaaggccctcaatattgcttaccagtcctacaacattcttctgtcaacttgttgtattactttctacaatattccaaatcttctcagctttcctttaaactcccaataccacctccttttctatcagaagatgaccccatcttcaacttcacagagaaaacaagtcagcaaatgagaactttaacttcctgttactaaacatacagaaacatacttcctctcataattggggaaatatctcctctctctctctttctccctccctgccctcttccaaaaccattattcttaccagtgtttcgaactgcctctaaactgcctctattcttaccctttcaagatctttgcctactgactatcccttctcttcctttattcaaccatttttttctcagttgaatcttccctaccatgctcaagtttctcctgtcttaattctaacaaaaatcaaaaaaacaaaaacaaaaaatcttgatccttcatcattctccctccttcctccctgtcaaggccaaactttccaaaagcattctacaacttgtccccatctctacatctcccccacctccaaactactaagttgtttttttcaaccccagcattccaacaaacagctttcactgagataatcagtgacctctgtgttatgaaattaaaaaaaacatttctcaggcttcatcttccttgatcccttaggaatagactacttactccttgaagcactttttttttttttttttgagatggagtctggcactgtcgccagtgatagacattatgatagtaatgtagctgggattacagacacccgccaccacacccagctattttttctttcttttttttttttttttgtaggggggacggaatttcactctcgttgcccagcctggagtgcaatggcatgatcttggcccactgcaacctccgcctcccaggttcaagcgattctcctgcctcagcctcccgactagctgggattacaggcgcctgccaccatgcccggctaattttttgtatttttagtagagatggggtttctctatgttggccaggctggtctggaactcctgacctcgtgatctgcccgcttcagcctcccaaagtgctgggattgattacaggcgtgagccactgtgcctggtgaagcactttcttttcttgatttccagcagtttattttattcttagaggtgcatggaggggttcctgcagcaaatagtttacaataatcctccatctgcttaaaactcttcaatagctttcagtgcccctagtacaaagtggtctaaaattccaaggccttccaagatctagcgattgttggccttctaaagctttctttcctctacactcggggatgtacgattagcactaagcctctaacaaggatgaactactagaaatttccagaaggcgttatgctgttctcgacataagctgttccccagagcctggaaaactctagctctttctctgccggatttccgggggaactcctacttatccttcatgactcaagtcacttcctccgggaacccttccagacacccctaagaataaaacgctttgttcattatcagccaaaggcgcctcaaattttctatgtgctatgcactgtattctatccactataatttgtttacatatctatatcttagtctagacatattgaaaggcgatgaagagcagggaaagcactgtattcgctttcttttcttcagcgttcatccagcacagtgcctggcatacggtttgccctcagtaaatgtttattgcatgaacacctcccagcttcgggcaggactgaaatctatccggttaactagtgaattcccagactctccgtctgcgtggcagggacatttaaacccccagcaccgtgattggctccagctgcaggggtgtgtctgtgtccgcggcgaacgggaagtgagcaggcgcgcgggctcggcgcgcgcaggcgcgactagggtgcagcgccaggtccggtgttggggtgtccgagttgccgccggagaggagtggcctcgcccgcttggtgagtctccaggagtgggacggagggagctggccgggatgaagtctgagactatgtcctgagaagaaagagtgtatcgtattggttgaaaagttggtggggtcgggcttaagcggaggaggg

SEQ ID NO: 13706 - DNA, 2300 bp, Homo sapien
aagctgtacaacagtgaaatgggctatctccagaaagcctatcacttaatattcttcagcaaaaggagacacactttgtaacaaagatgtcaaaaccccacacaaaacgaaaaacaaaactgaattacctctgactcccgactctgagaacctcagtttaggcctcatttccacattatatccctgacatagctcctggctagctggttaggggcatatatttgaggaggatctgaagaagtcttcaagatttgtgagacagtagtttaacttttgaaatgatctctccctgttacctaccccaccctccccaaaacacctacacaactaacacatccagtgtctcaactaattccatggcactttgggccttgaaattagttcagcctatagaagaaacctctcatttagcctctgatacttagctctatgatggcagtttaggaaacaagaggttaacaggtatcaggagaccttaaagccacacatatgctgtaggaaaaaaaaccttaaagctctagacctgattctggttgaggttgagttcgatgacttgcagctctcccactgagtcaggtatacttcgaatctggttcttagagagatccatcacatccaggtgccgtaggctacaaagttggggaggtaatgctcccagttggttcccagagaggctcagggtcttgagggcagagagttgcccaaaggtagacggcagctctctaaggtgattgttgtttaggcttagcgtctctagttttttcagattgcatatctcatcaggcagaacagctggcaaagaaaaatttttttaaaacctgaatgtgatagagctgaaaacaactttgatgaagtttataaagactatatggcagcctgcttcgcctcttgttaatatatgtaaaactcccacatgtgccatttttagatattgcattttaccaacatagtctttagaaggtgagggtgccatcaaaatgccggagagcatttgtgtgtataatgggctccttttgtaaaggggcccaaggcacaatccgacagcaattttgtgatatttggaagatcctccccttctcatccatcccccattccaagttaggtagctttgtttacattacatccccaaaatgttcttctctttcaagtccaaattaacccagtaacaatcattataacacccaatcattataaggcttattttagatgtaattacaagaagtagaaagaaggcttcaaggattccggcattcgcaacttgagccctcctgcacggtttcataacaaaaacaaaaatcagcttgtaagagaaaaccacccctggtaacagctgatcactagcaaaagcctccctggcgagagccatactcagtttgttgttgttcagggagaggctcttcagcagagtgaactttcctatcagcaaaggcggtaggctttcgatcttgttgttggacaagtcgatggtcctgagattgctcgtcagcttctgcaagtctgcggggaactggagaaaggagttcacagcgtggggaatcccgcaccgactaagttcgccgcccccgccgtccctctccctttaagttccctggtcgtgtccctcccagtctcacctcggtcagccctcggtccttaagctgaaagacaccagttttctgcgccgtttccacatgagcgcggagcgcactgtttcccatcctagcgccgcggctcaggtccctgcgggaaggaagcgctgctgtcaccgcccagtccacccggtcggcctcccggctggggctcctgccccagctctcaactcccgccgatccctggctcctggggcccgacccaagagcgacaaggaagaaacggaagaacacacagcccgaccaccaagccctgccgcctttgcagctctgcggaggccaggcgcctctgggagcctacggaagatcagggagccccggactcgcctcccaccgctcagctgccgtaaggctccgcaggtgaagacccaggacccgcagtagccgggatgcgctccccggcttagtcccgggcgggaacgccctgtgacgtcatcgagccgcgccgtgcgttcgccctgcgatcccgctcactcttggcgccttcgcggaaggtgcgtccgagccatggccgctgccaacccgtgggacccggcgtccgcgcctaacggcgctgggctagtgctaggccacttcatagcttcggggatggtcaatcaggtacgtgggggtggcggtggtgtcatcaagggggtgcccaaggtggcaacaatatggctgtgagttggtgct

SEQ ID NO: 13707 - DNA, 2300 bp, Homo sapien
gaggtcaggagatcgagaccatcctggctaacatggtgaaaccccatttctactaaaaatacaaaaattagccgggtgaggtggtgagcacctgtagtcccagctactcatgaggctgaggcaggagaatggcatgaacccaggaggtggagcttgcagtgagccaagactgtgccactgcactccagcctgggcaacagagcgagactccgtctcaaaaaaaaaagaaaacacaggagagaagggaggaaggattacactgtagagtgctgtggtcactcctggtaaagttagtcaactaggaccacctgaatctccccatcacccagacaatgggtgttcaacaaaagcttaaaatcttttaatacagtatcacagcctcttataacagttcatcttgagaggggatacaatgtgtcaaaagggagagtactaagatctaattctcctttaacagtctagtgaccatgggcaagtttcttggtctaagccttagtttcttaaattaaaaaatactgtaaggtattagagtctctaatggctcttctgactataaaaagttatgtattttccgtaaatcttccatcatgtttgtagtgcttttttttttttttttttccctgagacagggtctcactctgtcgcccaggctaagtgcagtggcccgatcgcatctcactgcaacctccatctcttaagctcaagccatcttcccatctgagcctccaggacccatgtggtccgcggagtagttgggactacaggtgtacgccaccatgccggctaatatgtgctgatttttacagatcagtttaacttttctgttttctttttagtgaaatttctcaacttcctctatatatcaaaatttatttccccatttttctcaatgcccttgatcccacttgccccatgccctcctgtcactgcattccattatttcctcacatgttcaatttctccctctgttggctccttcctccgacatgctcctcttgcccaacctaaaactgccactccgtgactccttgggttaatgtctcttttctctccttctcaaaattaatctcttcctccattcacgttccaaggtcttatctttttagccaatacttttttttttttttttttttttttgcctttaaagatgccaaggccgggcgcggtggctcacgcctgtaatcccagcactttgggaggccgaggcgggtggatcacgaggtcaggagatcgggaccatcctggcttacaaggtgaaaccccgtctctactaaacatacaaaaaaaaattagctgggtgtggtggtgggcgcctgtagtcccagctactccagaggctgaggcaggagaatcgcttgaaccaggaaggcggaggttgcagtgagccgagaccacgccactgcactccagcctgggcgttagagcgagactctgtctcatataaataaataaataaataataaaataaaataaaaatgtcaaaaaagagcttctggcgctcttctctacccagcacctcccgccccaaatacgattcaacacttcccacaaacgagggttgttggaaatgcttgttccgcaaggggacagaacgacccgtatttcccatccccgcccttacactacagtctagaggcagtatcactggatgaaaaaaaggctggtaacagtctaatctcccacaaactggactgggacaaatttaccctacagacactcaaaacacagtctaccctaaacaccatctactcagatccccgctttccaagcatccacggcagaacgttcgcggctgttgcctggaaggggctcttattactctagtacagaccccaaccaggaccctcaccactcccacagccagcagcaccaactcacagccatattgttgccaccttgggcacccccttgatgacaccaccgccacccccacgtacctgattgaccatccccgaagctatgaagtggcctagcactagcccagcgccgttaggcgcggacgccgggtcccacgggttggcagcggccatggctcggacgcaccttccgcgaaggcgccaagagtgagcgggatcgcagggcgaacgcacggcgcggctcgatgacgtcacagggcgttcccgcccgggactaagccggggagcgcatcccggctactgcgggtcctgggtcttcacctgcggagccttacggcagctgagcggtgggaggcgagtccggggctccctgatcttccgtaggctcccagaggcgcctggcctccgcagagctgcaaaggcggcagggcttggtggtcgggc

SEQ ID NO: 13708 - DNA, 2300 bp, Homo sapien
gaggcagaggttgcagtgagctgagatagtgccactgcaccccagtctgggcaacagagcaagactctgtctcaaacaacaacaacaacaacaaaacaaccaaaaacacacaacaacaacaacaaacagaaaatgaagcttttatgtgggtacaggattgctgtaagaaaaacatacctggccagcgtggtggctcacacctgtaatcccaacactttgggaagcagaggtggtcagattgcctgaagtcaggagttcaagaccattctggccaacatggtgaaaccccgtctctactaaaaatacaaaaaaattagctgggtgtggtggcacacgcctgtaatcccagctactcgggaggctgaggcaggggaattgcttgaaccagagagttgaaggttgcagtaagccaagatcgcgccactgcactccagcctgggcgacagagtgagacaacatctcaaaaaaaaaaaaaaaaaaaaaaaaaaaaaaaaggaaaacatacctatctatatacctatatactcttaatatgatttgagaacaagcaaagtcattatatgacaacttgaagcaaaaggaaggtgaaggatccaaacaattttatgccagtaagggatgatttgataaatttggaaaggtttggtttaaaatatgtcaagataacaagagaagcagcttctgctgaccaagagggagcaaatgagttcctagacaccattaaggaaataattgagaagaaagggtatctgcctgaacagcttttcggtgcatatgcaagttccctattctggaaaaataaatgccacaaaggacatttattagtaaggaagagaagcaagcaccaggatttaaggcaggaagggatacgctaatattttgtgcaaatgcagttgggtttatgatcagcactgcccttatctatatggctgctaaccctcaagccttgaagggaaaagataaacaccagccacctgtcttttggttgtacaagaagacctggacaataaccctttatctgaattggttccatctatgctttgtccctgatgtcaggaagtaccttgccagtaagggactgccttctatttttttattttattttttttagacagggttttgctctgtcgcccaggctgaagtacagtggcgcgatccaggctcactgcagcctccgcctccagggttcaagtaattctcctgcctcagcctcccgggtagctggaattacaggcgcacgccaacaggcccggctaattttcgtattttgagtacagacggggtttcaccaggttggtcaggctgaactcgaacccctgacctcaggtgatctcgcttcagcctcccaaagtgctgggattacagacgtgagccactgcacccggcctgcctcgaaaatttaaccacagaattgacagttcaagcgaacgcagagaataaaagtatttagcaaattactttgcaaactttcggaccaaaagttgatttacttgactttacatagcacggacacctagtcgaggaacaaaaactatttctgggtaagcggggccaggaacaacagacttagcactgagtcctcgcggcccactcggctcaggattggctgaagctgggccggcactgctgggcccggtgcggcacgcgcatgggtgggggcgtcccaagaggctgtagggcggagcgaggcggggcgagcccgggcgtcctcccgcccaccgactagccaaggctcggcgggcaccacccagctcgggatgcagcgcgtgtttgggcgggggcgacccgggaggcttcggatggaacgaggcggagcgagccctggcatcctcccgcccaccaggctaaggactggccgaacgtccacacgggcccgcctgctctggctgcggcgcgtgtttgggcgggggcgagtcaggaggctttaaggaggattgaggggaggcggggccgggagttctcccgcccaccgggctcaggattggccgaagctaggcaggcaccgccccgctcgggcggcagctcgcgtccgcgcggcggcgtccccagaggcgcgtggggcgggcggggctgggttggggctgtgtctgggcttagggcgggggcctgggatgctgccgctgagctgacccgctggacttgggttgtggcagacggatggcgaacgtgcaggtcgccgtgcgggtccggccgctcagcaagaggtgagtctccgcgggagagggcgcctgaggcttcacaggagctgaaaagagcgggaggtccgcgtctccccctgcagagattctggcgcgcagaaa

SEQ ID NO: 13709 - DNA, 2300 bp, Homo sapien
ttttgtaaatgacagggtttcactgtttctatggctgagtagtactccattttgtatatgtaccacattttgtttatgtttgtctcttgatggacatttaggttgcttccaaatcctcactattgtgaatagtactgcaataaacatgggagtgcagatacctttttgacatactgatttcattttctttggataaatacccagtagtgggattgctggatcatatggtaattttatctttagtgttttttttctgaggaacctccatactcttctccatagtggctgtactaatttacattcccaccaatagtgtataagggttcccttttctccacatcctcaccagcattcattattgcctgtcttttggataaaagccatttctcctggggtgagatgataactcattgtagtttcaatttggatttctctgatgatcagtgatgttaatatatctttttatatgtctgtcatttgtatgtcttcttttgagaagtgtttattcagatcttttgcctattttaaaattgaatttttagattttttattgatttttttgcattccttatgtattctggttattaatcctttgtcagatggatagtttgcagatatattcgcctgttctgtgggttgtcacttcacttggttgattgtttcctttgctatgcagaagctttttaacttgatgtgatcccattcatccatttttgctttagttgcctgtgtttctggtgtattattcaagaaatctatgcccagacctatgtcctggagagtattctcagtgttaatgtttagtagtttcatagtttgaggtcttagatttaagtccttaatccattttgatttgatttttatataaggtgagagataggggtcaagtttcattcttctgcatgtggatatccagttttcccagcaccatttgttgaagagactgtcttctcccctgtgtatgttttggcacctttgtcaaaaatgagttcactgtggtgtgtggatgtctttctgggttcactgttttgttctattggtctgcgtgtctgtttttatgccagtaccgtgctgttttggctactgtagctctgtagtataatttgaagtacggtaatatgattccttcagttttgttctttttgctcaggatggctttggctattctgggtcttctgtggttcaataaaaattttaggattgttttttctatttctgtgaagaatgtcattggtattttggtagagattgcaagtatttctcatactaccccagttaaatttcttttttttccccaagacagtctcttgctctgttttccaggctggagtgcagggacgtgatcattgctcactgtagccatgacctcctgggtgcaagcaatcctcccacctcagcctcccaagtagccaggactataggtatacaccactacaccctgctaattttgtttattttttgtagagacaaggtctcaccatgttgccaggctgatattcaactcttgcactcaagggatcttcttcctcagcctcctaaagtgctgggattacaggcctcaaccactgtgcctggcctatagttttcattgtagaggtctttcattttggttaagactattcctaggtatcttatttgtagctattgtaaatgggattgcattcttgatttctttttcagattgttctctgttaacatatagaaatgctactgatttttgtatgttgattttgtatcttgcaagtttactgaatttgtttatgagttctaacaggtttttggtggagtctttaggttttcccaaatatatcatctgcaaacagggataatttgacttcttcctttccaatttgaatgctttttctttctttctcttgtccgattgctctagctaggacttctacattgaataaccgtggtgaaaatgggcattgttgtcttattccagatcctagagggaaaggctttcagttttttcctgttcagtctgatactagctgtggatcccttcttgtatatggcttttattgtgttgaggtatgttccttgtgtacccagtttctcaagggtttttttttctcataaaaaggatgttgaattttatcaaatgctttttcaacaatagtttaaatgatcatatggtttttgtccttcattctgttgacatgatgtatcacattcattgatttgcatatgttgagtcatccttgcatccctaggataaattccacttggtcacgataaatgatcttttttttctttttttttttttttttttgtgagactgagtctcactctgt

SEQ ID NO: 13710 - DNA, 2300 bp, Homo sapien
gttttaccttgatcctcagttccaaccccattgtgagctccaaccccattgtgagctccaaccccattgtgagctccagccccattgtgagcaggctgaatcacaggtagagccaagctactctgaacaagccgactctctccaaggcatgcagctttcaagagagagcccactgatgtccatggattcctggttttcctgtgactctaagatcaaccccagcagccccccaggaatagtgggttctttatgtccaagtcctgatatgcaggaatttcactcctgtaagggggagaggcctggatactggccaaatactgaggaactaaagccatcagatgcagaaacggttctgccatatagctccaaactgcaccaaggcagtactgagctcctctgcagtgcaagagatgagcacacagcctctgctgctgatacgtctaggctgtctctctggggaattcaaaggcttattcaaccaggagctgatggcacctttcagggcagatgtatccctgacatgacccagcagggcagctctgaagcatcccacaattctagcgtatcaaacgtgctggctgcctctgccaccaccttgactcatgtaggcagcacccatgaaagggattggtctgcccttcagcagaagtacctccttgaactctcttgtcctgttttggaggccataggagcacccaagccagcttacccctaccttgaggaagactctggttccctggcccaagcttctagcaaaggaggagatactctattgccagttggccctagggtatctagcaatctgaatctcaacaactttccagtccatctgtccagaatcaggcgtttgagggcagagaaagaacaggacagtttaaatgccaaattagaaggtgtttcagatttctttagcactagtgagaaagaggcgagttatgacgaaacttattcggcagacttagaatcattgtctgcttctcgatctacaaatgcacaggtctttgcaacagagaacgcgataccagattccatgacagaagcatgtgaagtcaagcagaacaacttggaagaatgccttcagagttgcaggaaacctggactgatgacttcctctgatgaggattttttccagaagaacgcttgtcacagtaatgtcactacagccaccaaagcagaccattggtcccaaggctgggctcctctcaggaaaaatagtgcagtccagccagggcaattaagtcccgacagccactacccactagaggaagagaagacagattgccaggagagctctaaggaagcagttagaagacacataaatgtttcctttgcccttccttcaggtccagagctataccttcactctgctccctggaatccattgtcatcttccctgcagcccccactcttggaaacattctatgtgaccaaaagcagggatgccctgacagaaactgccttagagattccagcttgcagagaagtaagggtaccctccccaccccccagggaagcctggggctttggtcacaaccaccaagctctccaaggtgcttatttgaagaataatttgccagtgctgttacaaaaccagaattctaagattgcctcatctcagcaggtcacagctgagataccagttgatctgaataccagggaagtcatcagagaatcaggtaaatgccctggaaatattacagaagaaagccatgattcagtttattcttctgttactcagaacagacattttctcccctctaccagcacaaaagtatgtgaatttgaaaaccaagttgtaattttaaataaaaaacacagttttccagcacttgagggaggagaggtcactgctcagtcctgttgcggtgcttcctcagacagcactgagtctgggaagtctctcctctttcgtgaatctgaggcacgagaggaagaagagctggatcagaatacggttctgaggcagaccatcaatgtaagccttgagaaagacatgccaggggaaagtgctgtttctttgaaatccagatcagtagatcgtagagtaagcagcccagtgatggtggcccagggtggtggcccaacccctaagtgggaagggaaaaatgaaactgggcttcttgaaaaaggtcttcgtcccaaagatagctcagaagagtttaagcttccaggtacaaagcctgcatatgaaaggttccagttagttgcatgccctcaggaaagaaaccccagtgaatgcaagtcacaagaaatgttaaatcccaacagagaaccttctggaaagaaacagaataaaagag

SEQ ID NO: 13711 - DNA, 2300 bp, Homo sapien
tagaaacgggaccgttcttaactgacagcttggtactgtccttctagattccctggaaagtccactgttccaaagcatccacgattgtgtcttctttgcagtgcaggttttggagtgtcactttcagtgagtttccctggctgaggcatttgggcctcattctcatcatctgcttagctctctggctgcttgggatatatgctggtgcttaacacaggggcagtggtcctggaccttctcctacctataatctttctttaattttgtgttaaggctatgaatgtagtccctgaaagaattgagatcgggccaggtgtggtggctcacgcctgcattcccaccactttgagaggccgaggcaggacagtgacttaggcccaggagttttagaccagcctgggcaacatgacaaaatcccatctccaccaaaaaaaaaaaaaaaaaaaggccgggtgtgggggagtgcgcctataatcccagctacttaggaggctgaggtggaaggatctcctgagcctgggaggtccaggctgtagtgagatcacgccactgcagcctgggtgacgcccagcccagcctgggtgacagagacccccatctcaaaaaaaaagaaaaagaaatggacccctgtggtcttggcagctgagctttggtttctgggtaatgttcctgtcctgctgtcttggtccttgctctgtaaagtctcatatcctccccttgactttcattatctttgatccttggcccatgaccttgcagtacatatctgggcttgcatacctgcgccatgccttagagatcctctgtggtgtgcaggtgcttgcttcctacttgcagtctgtgttctggtctcagtcataggtgctcttgtccctgcagggttctttccaacctggacaaagggaccttgaagctgctggctgagaatgagcggctgctgtgcttctcaccagctctgcaaggccgccttcgagctgcctatgagggcagtgttgccaaggtagtaaccccagcttagttgcccactagcctggacctaacccttcctagctttcataaattcaggcaaccctgctgacgacacttcagtgtaatgtgagctaactctgggcaagaataagagggagaagttttctcagcatgaccctgcagttcctaacgttcctgctgtattttaggtctctctggtgatgcctccctctactcaagctgtctcctttcagccagagactgacaatcgtgccaacttctccagtgaccgagcctttcatacttttaagaaacagaggtgataagaaaagggactttttggggagggaatgagatgacatttttctggaataggcagctgtttggtttcatagaaattaggagtttggcaccaacaggtggtgggttagtccccccaggtccttcctgccggccatcatagggaccacctggcttcattctcatgtgcatctgtgaaccccggcgcttagcaagccatctcacaggtgtatggttttagtctcagggttctcaagcaagagtgtgccaggatgaactgtcactgcccacagaagtacatgaagcctgtaatgtgctgctggtctgtagcactactgtcatcatatagagaactctggagaaatttaaaaatggggctgctggccgggtgtggtggctcacgcctgtaatcctagcacttcaggaggccgaggggcggatcacctgaggtcaggagtttgagaccagccgggccaacatggtgaaactccgtctctactaaaaatacaaaaattagccaggcgtggtggtgggcacttgtaatcccagctactctggaggctgaggcaggagaatcgcttgaacccaggcggggcggaggttgcagtgagctgagatcgcgtcattgcaatccagcctgagtgacaagagcaagactccatctccaaaaaaaaaaaaggtggtgggtgggctacggatagttcttccaggggcaggaaggcactggtgggagtgagtgcctcggctgatcaggcgttcttatgcgtcagggatgtgttttatgaggtgctgcgagagtgggaagatcaccatgaggagcctggctgggattttgagaagggcttgggcagcagaatcaggtgggtgctcagaccttgtctttcttgttcctggcaatgagtagctcagtgcttgctcggtggcaggagggaggaggagggaaggttttccccgctcctaccagccattagctgttttctactatcctccgaaatctctttagttattgataactctgcctctattcgaaa

SEQ ID NO: 13712 - DNA, 2300 bp, Homo sapien
aagtgacactccaaaacctgcactgcaaagaagacacaatcgtggatgctttggaacagtggactttccagggaatctagaaggacagtaccaagctgtcagttaagaacggtcccgtttctagaccccatgtctcaaaaggaggcttgctcactgacctaggacagctggacttagttcagggtcgctgtccttggcagtcaccatcctccgggcagtgaggagctgaaagacgaagaaaagctccaagaagaggtttggtaccaggttctctagatagatacaaaaagaaagcccatggtatgggcaccatttggagccaaggctcagttccaagtgccttaccaattctcttacccataagttctacaagtgtctccactcccgctccctccgctctcactcaccagcaatgcacgaggagtaaacaagggctacaagctccaggcgctggcgggaagacactctggcagggtctgcaggttcatctgtgaggcttcctgtccggctggggaggggcgaccccaattctggggtgggacaggtgggggtaggtgactgctgcagctgcttagagctatggaataaagaaatttcatgagcagtcagcttggcttccctgctacggccacactcaggtcactccagagaagataccaacagcccaggagacaaacccagagtccccaagagggaaatcaatttcagggaaaacccctgaagatcccccacagcgaggaaaccgatatccccaggagcggccaggccataccgctccttcctgagcatctctcgctcctcttgcagacttctgcaccctgggggaaggccaaggccccaagggctagtgtccagggctgagggttgggaactggggacacagctgattgggggtgaggtgaagcaggtcttgggcttggagagtgaccgctcttcgctcaccggagttgggttgatcctgcgagaaggcttcgtcctgctgagagtagccacaggtttttctcaaattcctatcttcaaacatctcccctccaccaccgcaacagctagacctcttgccaaaaaaccccacaaaaaccctcaccatcacccccagccttctacccatcctggcgctccactgcggagcgccgagctcgaatgactgactccccagagccttcgtggtacccatctcctgcatgagagctgagtctcaccctgtagggccggggggaaccgagcctacgggagggaactcctccaggttgctgaggtttggcggatcagacagcgtgaggctggggcggctggggctgccagagcccctaagcctccggcccccggctccgggcaggctctccccgctgaccccctcctccaggccgcggcctccacgctcgcgggccggccccgggccccgcctcctgcccccgcggcgggccagaggggcctcggcagcggtgctctgggcctcggtcggagggaaaagctggctgcgcgccccgcggctaccccgcggcgggcctcccggcctccctggcaaggctgccgaggcgcccggggtcttggcgggggtcgggggcccctgcgggaggacgcggctgctctgctccctcaggaagttcaacaggaacggtacgaattctttccgcagggcccggagtgagctcagcgcggccgcctccccagcgttatcctagggcagaagcacaggtggaggggcgagagggtcagccgccggcccgcgggccgtgagcagccggggccgtagggcgcgcctcgggtgggcggcccgggcagcggcgcccagttggagtgcactcggcccggctggcagccaggcgccctagaggaaggggactggagggctggactccactgcgggaaccggcttcgagtcagacctgggggcgtgtcaccgctgttacctccgaaccctgggtgctgcgcgcgatccaccgcacgacggctgcgaccgacacctcttctcgcagcagcgactccaaaacggccgccatcccggtcggggcgctctggggcgactgcgcaggcgccggcgcgccgcgggcggccagggaggggcggggccggcggcggggaacgaccgttgggtcgcgggatggggagggacccggctggcggggcggggcggagccggctgttgcccagacccacggagtcaaggcctcgctgagtcctcaaccccggccgagaggccggttgttaggaggtgaaatgtggatcacagcgcctggggaggcccaccttggctgcccgccctggagcgacctgaagggagggattcgagctgggagtgg

SEQ ID NO: 13713 - DNA, 2300 bp, Homo sapien
gatgactttaataattccacttttctctccctctcttctcctcttcctgaaatcagagagatgagaaactactctttgaaatacctccagaggcgttttattgtgttcctttcccctccaagcagctccctttatacaattttgctcaggcaaccaaggacagagtatcggcagaaacatggagtgcttttgtataggccacctgtacataaaagtgtaattatttatttaattttcccatttgtatcatattaaagctttgtacagtgttttaagttctgttttaaaattattttgtattttatttttataacctagtaataaaatattcattccgcatgcaaaatctagttctgtttgtgtgatggtctggatttcaaaagtggaaaatatttttctaatttaataaagttattgaatacaccagatgttacaagatcaacggggagcagatagtgttactgtaaatgcagtaccacatctagaagttccctagaaaaagcagcccaggactgaatagaagctaggtgttaagtgtccctgcagttaggagatgttttcctgtaataaaattaaaatattaaaagctcctttttagtccattattctgtctggctggaggtactttttccttctccataggaaataccccttctgccactagagagattcctgcacccccaccctcatccttccgcccgtaaccttcctttgaaccagagcaactctcaggaggcattcacaagggcactgcctcacccctcctggtttggtttgacatggaatgttcgtgccatctgtttttctccgcttggattcccttgcttgatttgtcactgagcagcaaccttcaaaatcctctctcaggtttttttgttttgttttgtttttgagatggagtctcgctctgtcacccaggctggagtgcagtggcgtgatcttggatcactgcaacctccgcctcccaggttcaagcgattctcctgcctcagcctccccagtagctaggactacaggcgcgtgccaccacgcccagttaatttttgtatttttattagagacacggtttcaccatgttggccaggatggtctccatctctcgacctcgtgatccgcccacctctgcctcccactgcattccagccccgggggtgacagagcgagactccatctcaaaataaaattaaataaaggagattaagaaattactcaggccgggcgtggtggcccacgcctataatcccagcactttggatctgctgccctctcccggccaaaacattagctgggctatagccctagggaggctgagtcgggaggattgcttgagcccaggaggccaaggctgcagtgagccgtgctcacgccactgcactccagcctgggcaacagagcaagaccctgtctcaaaaaaaacaaaacaaaaacaaaaaacaccaaacccaaaaatacaaacctcaagctcccagaagctaatcatgatatgcttactgacatctaaactgcaaagtagttgaaatattaacctcatgtaaacccacttaagtaaataaagctacatacaagcaattctgtgtgcagggtggcccgaggcactttaagggttgtggcttggggattattaagaacctcctagaaataattctttcctaaatggtcagttgatggtgagcgctgaaaagccgatgggtactgctcggccaagggattgaaaaatcggcctttgagaagaacaaagtcaaaatgaaagattagattataatttctctggggtggtgccagttggatctaggaaacttaaactcgtgaaagaatgtgcttagagcagaagatagaagctggtggctgtctctgctcccctctacctctctcccgggtcctgggtctccctagaggggcgtccgacccgcggcagccccactcccagctcgaatccctcccttcaggtcgctccagggcgggcagccaaggtgggcctccccaggcgctgtgatccacatttcacctcctaacaaccggcctctcggccggggttgaggactcagcgaggccttgactccgtgggtctgggcaacagccggctccgccccgccccgccagccgggtccctccccatcccgcgacccaacggtcgttccccgccgccggccccgcccctccctggccgcccgcggcgcgccggcgcctgcgcagtcgccccagagcgccccgaccgggatggcggccgttttggagtcgctgctgcgagaagaggtgtcggtcgcagccgtcgtgcggtggatcgcgcgcagcacccaggg

SEQ ID NO: 13714 - DNA, 2300 bp, Homo sapien
gaatctctctagtggcagaaggggtatttcctatggagaaggaaaaagtacctccagccagacagaataatggactaaaaaggagcttttaatattttaattttattacaggaaaacatctcctaactgcagggacacttaacacctagcttctattcagtcctgggctgctttttctagggaacttctagatgtggtactgcatttacagtaacactatctgctccccgttgatcttgtaacatctggtgtattcaataactttattaaattagaaaaatattttccacttttgaaatccagaccatcacacaaacagaactagattttgcatgcggaatgaatattttattactaggttataaaaataaaatacaaaataattttaaaacagaacttaaaacactgtacaaagctttaatatgatacaaatgggaaaattaaataaataattacacttttatgtacaggtggcctatacaaaagcactccatgtttctgccgatactctgtccttggttgcctgagcaaaattgtataaagggagctgcttggaggggaaaggaacacaataaaacgcctctggaggtatttcaaagagtagtttctcatctctctgatttcaggaagaggagaagagagggagagaaaagtggaattattaaagtcatctaactcattggtcttgttcaacaagaaagaattctggtttgtggctgaatctgatttaacagctgccaatagctcattacttctaagatgtatatctaattcaaaactagatgctcccccctccctcttttttccctaaaagctgggaacttgtaagtaaatggcctagtgaaatagacactggctattttagaaaaagggtcagaaggtagaccaggaactatgtatcaaggagaagtaagtgaggctcaagcccaggccacctaggctgtgtttattcagtccacccaatccaatgtcaaagccccaagtgggccagtgttacctttatcttcccatctttgtatttctgaaagctttgtcacctcagtggactactttggctgatgaacagttcaaatagaagattgttttggaaaaagtcccaagggctttccccttcctgggtagctccctataagtcaaattcaagttctggtagccttgtttaccccttgtaggcgagtgaagaatgcccacacagagttcagatgtggtgaaatgctgggcattgattcctcaggatttaaactgcatattattagagaaaaagagcatcatatggcaagggtagtctatataaaaacttggtttactcaatgtttttaattaggcgagtgaacacttatgtacataatattaaataatattaaactaataaaaagagaggtaaaattcctatccattgttattgtaaaattatatcatcagcaaattctatagtcacatgggctcaaagatctgcctcatccaatcttgttccctaggtcaaggaacccagagccagggtacctgggaggcatggtcagcatcgccagtgtacatatattctgtgcccatactaccactaacgcttccagctgaagaggaggcagaaaaccgttacattgcacagggccatgaaaggaaaggcttcactacttttacatgttaccttaagaccaaagatccagcaaagtctaaggaaatatcctaatcattactgtgtaatgttacttttttgctattcagtgtcttgagattgtgtggaaattcaaggtgacctgatcttgtcacatactttaattttctgatccaaatttgctgaaagggaataattaaacatcaagcttaaatatttttttaagtaggagcagacaatcacaactgaattagaagacgtcttaatgggcatagactttatttttgttttacttttttttttttttttttttgagacggagtctcactctgtcgcccaggctggagtgcagtggggcgatcttggcttactgtaatcttctgcctcccaggttcaagcgattctcctgcctcagcctcctgagcatctgggactacaggcgcccgccaccatgcccagctaattttttgtattttcagtagagacggggtttcaccctgttagccaggatggtctcgatctcctcacctcgtgatctgcccgcctcagcctcccaaagagctgggattacaggcatgagccactgcgcctggccttgttttactttttaaaatttctgtgagctgctctagaaaactaaaggacgaaaactttactgtcataattccaagttcagtcagggatttct

SEQ ID NO: 13715 - DNA, 2300 bp, Homo sapien
ccagggtcatacaactagtatatgacagagtaaccctgtatcctgttagtctattttctgatttctacacattcacattatgattttgggacattgtgactttttaggcacacttgaaatgaattaaaattaaaatatattttctctgttcttttaaggctacgcagatataaagtcctagggagtagtaactccgactcagaccttttctcccgcctggcccaaattcttcaaaatggatctcagaaaccccggagcactactcagtgcaagagtccaggatctcctcacaatccaaaaacaccacccaagagtccagttgtccctcgcaggagtcccagtgcctctcctcgaagctcatccttgcctcgcacgtctagttcctcaccatctagggctggacggccccaccatgaccagaggagttcgtccccacatctggggagaagcaagtcacctcccagccactcaggatcttcctcctccaggaggtcctgccaacaggagcattgcaaacccagcaagaatggcctgaaaggatccggcagcctccaccaccactcagccagcactaaaaccccccaagggaagagtaagccagccagtaaactcagcagataggagccaggctgcatctctttgaaaggtgtgagatcttcctcctaaacctgatgcatgtgtgtccctgtactttctatgtaaaaaaatcagtgttgatcttctcttgcaaaagaaagtaacatgatcaattatttataagaagacataatacatgataaggaattacctaaggcaggcagcaagtagattaggaatcaatgtctttgtacaagaaggaaaaatagagcaaaaatccaagggggagaaactcattaaaatgagctctcattttttaagctgcctttgaaacaaaagagttgaggataggagatagaatggaattttaggggggttgcctaatttttttaagcctcaattcaaagattatatagcaaaagtgaaacttcttgtttgatattttcattcaaaactttcccaccctgaagagtcattgatcagatattagattatataagaagtctgttgccagggagccagtattcatgtatatttggcttgtgtgtttatttcgtgtattgagaatgaacacctttactttgcctcattcctagtaccctccctggagttcagatttttttttaaaattttgtatgtctcgtctgattcaatctctctgcttttattttatggtcctagttgtactatcaaatccaattacttttttttaggtccccctgattttttttttttagagcaagagttcttaacatattacatttttattatgaaaaataagaaagttaggtaaaggaaagaaaagtctaactagagctattttgcaggctttagtgtttagggagagaaagaaagtgtgggttaatagccttcaagatagaagatgccctttcatctctgttaagtgtcctcctttagaaacttgagtagaaggaaaactgaccagagtagactgcttccttaagtcttctgggttccaactgtttgtaatatcagcatccaagatgatacgagggaagcacaatgctttggactgtgatttgagatttagaaataaattagatatattattgaggcttagaatcctcaaactttgtattttatacatttagccaataaggaattaatatctggggaaataaatttaggcaaatatttcttttttaatgttttattacctgcttctcctgtgttttagttcaacatttgggcttcttggcctgattttcatacaatctcaatttacgaagctgtaaagaggaagatatttgttctaatctcactcttctaataggaatcaggcaaatgaaagtctaccagacttttaaaatgggctgtttttatactctctaggtgttttgtgttgtaaagaccttattaaggtcaggtaaattggtctgcttgctgttgaaatttgccttctagcaaacatatgtgctttctgtttgaccttgtgtttgctgccaaacctaatacagttgaattgggaaacaaaaaaaaaagaaaggaatacatttcctccccaagtgaacatcttctaatgctgcatcaaagctgccctgaagctgcactgaacttctcttgttctctttatctgtgttgagctttttaaaaaaacaaactcaaaacactattgaggcatataacgtctcttataagaaatgtagcatagtgtggaatcttaatttctctccagtttcaaacactccagaggaatgcaatag

SEQ ID NO: 13716 - DNA, 2300 bp, Homo sapien
acagggtatctctgttgcccagactggagtgcagtgatgcgataatagctcactgcagccttgacatccagggctcaagcaatcctcctgcctcagcctcccaagtggctgggactacaggtgcatgccaccacacctggctaatttttgtatttttagtagagacagggctggctaactaaaaattttttgtgtgtagagacaaggtcttgttatgttgcccaggctggtcttgaactcctgggctcaaccgatcctcctgcctcagcctcccgaatagctgagactacaggggcatgccaccatgcccggctaattaaaaaaaattttaaatccatgcttccgtgatcattttgtgtgtgtgtgtgtgtgtgtgcagaaggagtctccttatgtctccttacattgcccagtttggtcttgaactcctggactgaagtgatcctcccacatcagcctctcaaagtgctgggattgcaggcattagccactgtgcctggcccctataaacttctttaattttaaagaaaaatatttacagaaaccctaatgttttcttattcaaattatgtgattggtcaatactctgaaatgaatgaagtactctattagacatagtaatagaaaaagtaacgtgtggttttaatcagtagaaataaaaaacaatttggcaacatctttatgtttgcatagaacaagatgagctgcatcatcacttgcctttaatgtacattttgtcctgctttcaatccaaggatctggacatgacagagagtagagatgcctgctgtttttaaaaagaatggcaagaggctgtggcacttcctgagcaagaagaaacagattctataggaacagttccaagattgaatataggattagtcatttacctttctatattcttaatcagctttaatgacaatgtcacttgagtgaagaaaaggatttaaagtaaaaatgaagttcataattcattacattctttccattcatggcagaaccctggggatcattgtgattcttaagtagaaaggacattagatgtggggcgtatgagagacctgagttttggttttgccactgattagtttatagccttaggaaagctgtttagcgtttttcatgtgttttctctactgtacactggtgggcaaagatgggagaggtgcttaatcttaaggttttccttcgccaaagcgactgacacaacactaaatagaaacgcatcctgcacagcgtccttgctccgccctcctcgcttttctttgaaagtctttgagcacctcccgcatacacttgctcagcatcgcatactggtgtgcaccggggctggccattgagtctttagctggtggtgtttcacaaagggaatgaaatcttgttcttgggttgtgaaaccgtaaggacactccggtctccaagttgacattcgtttatggaagtgcccatctcctttcctcgtcacacctaaggcccttccccagtcccccaaagatgattagcttcacgttaggcggttctggggacggcgccaatttgcgggatgctgtcagcgctgatgctgaggaagaggatggatccttaaggcttgcagggcctcacgatttgggcccttcatcgcgactgcctcagtgtgtaatttcgtatcgtgacaaagcatttccgattttattccgaaaagcccaaccatggggtcccaaccatccctctataaccaatttaactgtcacgctaggagaacacctatgtgcgcaaactacttgtctcggaagccctacttctctcctcgggacaggcggggagttgcggctatggctggaactacgaggcccagaattcctaggcgcatgcgcgctgccattgtgatgctcctttcccggtaactcgccctctcaggcaaacctgaagatagcggcaattctccggtggggggcggagacggtttctgcccgactctccgcccccttcgtgataggcaatgggactagccaaccgacgctgcgagttcggaacgcactctccaatcagcacctgtagcggagaggtgggcgtgcgcgctggcagggcaggtgggctaggctgtgtcgggttacgaggggggagaataacgtcgggtcgggtcagcgggctctgcagtagtcgccgcagcggcgatgggagcggtggggacgaggcggcggcggcggcaggagggggagcaggtgctggcacaagagcagcggcttgggggagccggcagcagcagtaacagcagcagcagccgccgccgccgccgccagtaaacgcggacggtaccccag

SEQ ID NO: 13717 - DNA, 2300 bp, Homo sapien
acaacaaaacacaaatctgtgattttggtattttaattttctctttttctttctctttttttttttttttttttttttgagacagggtctcactttgttgtccaggctggagtgcagtggtgcagttatggctcactgcagccttagcctccccaggctcaggtgatcctcccacctcagcctcctgagcagttgggaccataggcatgtgccaccacgcccagctaatttttgtgttttttgtagagacagggtttcaccatgttgtccaggctggtcttgaacttctgagctcaagcagtcctcctgcctcacccacccaaagtccagggattacaggcatgaaccactgcacccggtctcattttctttttttcctattgatcttttctaattcttttaaaattgtacccgaggtcgggcgcagtggctcacgcctgtaatcccagcactttggaaggctgaggtgggcggatcacctaaggtcagaagtgcgagaccagcctggctaacatgctgaaaccctgtttctactaaaaatacaaaaatttagctggcgtagtggtgcacgcctgtaatcccagctactgaggaggctgaggcaggagaatcgcttgagcccaggaggtggaggttgcagtgagccgagatcgcgccattgcactccagcttgggcaacaagagcgaaagtctgtctcaaaaaaaaaattgtacccaaaagagcaatgaagttgtttgtatctgccttacatattatttttaaacaaaataggctataattacatatataaattacttattttagaaaattttgcataaaaaagatgctgaaatgagaagaagcagtccaggctgctttgtttttcccaagcattcttataagattgctgcaggtgctttattttttatgctagtaatttgtaaatgatatacatttgattctctaattttctctcactcaaaaattggaaaattttggcatagacttaaaacacaagactttgaaggggaaaaatgcaaatcatctcatcaaaaatattattaaagaacatttgataaaaagtacagtatatgattatagcactattcaggatttattatttttatttttttttattctttgagaaaatctattgggagatgaaggaaaacctctgtttggagcacttcaaaataggcaggtatgtatattccaacaaggtacatgtaactcatggcatgccttttttcccccccacagtttattattaaaaacaaaaaatctttactcattttctgtaaaaattagcagaattctatagtggggaaaaaaggaactgcatcagtcttataggaaactgaatagcatgtgcactttacagcgcttactcaatctcagaggttaagtgtaattcatacagagatttcatgtgatgattactttttctccctttgtttgttacatttcaaaatcctgatgtttcctatatttttccttctcactaattttacaccattatataacattgagtattaatgctggcttagctctggatgaatcatcatactgaattcaaaaataaaattaagacatgactccttgatgggcagatactgacactactgtaggactctactcctgccccaggcctaaacctctttacatagtgatccctggaaaacagtactaaagaaatatgcagagtagccctgtgaagacaaaaggggtaattgaggttgccattccttccctgccatttccctcttatttttctgacagctggcacagaagactagaagacttgtggtacacagtgtgctcagctctggggaaaacactttttatgtgaaaattaaaataattatagctttaataccacttttttataagaaaatctattagaaatttagcaaggccataaaaccttgtacaggtattaagaatattgtaatttatttgcaatgatataaggtatataatgagtctgcagctaattccgacaaactagagttggtttttaccaactcttaagtggatgacttaggtctctcatcttccctcatctttttatcttccttctctcttacaatctagcataatggtctgaaagcattaatgcagtttgcagttgcacagaggattacctgtcctcaggtcctgatacagaaacatctggttcgtcttctatcaggtagagtcttctctgaactattattatgtattatattatttatatatctttttctattgcatttctggcagtgtatttcattaggaaacaacatacactgcactaattttgagcactcactaatgaaat

SEQ ID NO: 13718 - DNA, 2300 bp, Homo sapien
ccccacttcccagtaggggcggccgggcagaagcgcccctcacctcccggatggggcggctggccgggcggggggctgacccccccaccaccctccccgacggggcggctggccaggcagaggggctcctcacttcccagtaggggcggccgggcagaggcgcccctcacctcctggatagggcggctggccgggcggggggctgacccccccacctccctcccggacggggcggctggccgggcagaggggtcctcacttcccagtaggggcggccgggcagaggcgcccctcacctcccggacggggcggctggccgggcggggggctgaccccctcccacctccctcccggacgcggtggctgccaggcggagacgctcctcacttcccagacggggtggctgccggacggaggggctcctcacttctcagacggggcggttgccaggcagagggtttcctcacttctcagacggggcggccgggcagagaggctcctcacctcccagacagggttgcggcccagcagaggcgctcctcacatcccagacagggcggcggggcagaggcgctccccacatctcagacgatgggcggccgggcagagacgctcctcacttcccagatgggatggcggcggggaagaggcgctcctcgcttcctagatgggatggcggccgggcagagacgctcctcacttcccagacggggtggcggccgtgcagaggctgcaatctcggcactttgggaggccaaggcaggcggctgggaggtggaggttgtagcgagctgagatcacgccactgcactccagcctgggcaccattgagcactgagtgaacgagactccgtctgcaatcccggcgcctcgggaggccgaggctggcggatcactcgcggttaggggctggagactggcccggccaacacagcaaaaccccgtctccaccaaaaaaaaaaaaaacgaaaaccagtcaggcgtggcggcgcgcgcctgcaatcgcaggcactctgcaggctgaggcaggagaatcaggcggggaggttgcagtgagccgagatggcagcagtaccgtccagctttggctcggcatcagagggagaccatggaaggagaccgtggagagagggagagggagagggagagggagagggcatgagtttttttaagtttgtttaattaaaaaaatcttatcaggttgggcatggtggcttatgcctataatcccagcactttggcaggctgaggcgggcggatcacctgaggtcgggagtttgagaccagcctgaccaacgtagagaaaccccgtctctactaaaaatacaaaattagccaggcgtggtggtgcatgcctgtagtcccagctacttgggaggctgaggcaggagaatcgcttgaacccgggaggcagaggttgcggtgagccaagatcacgccattgcactccagcctgggcaacaaaagcgaaactccatctcaaaaaaaaaaaaaaatcttatcactcaaaaattctaggggggagtggggagggatagcattgggagatatacctaatgctagatgacgagttagtgggtgcagcacaccagcatggcacatgtatacgtatgtaactaacctgcacaatgtgcacatgtaccctaaaacttaaagtataacaattaaaaaaaaaattctaggtgttgtatagattattttcgcacactttgcaatctattcttctccattagtcaaaatttaaacaactgttatttaaaaattagagttatgtttcaaaagcttatcaattttggcagttcatttttgttatgatgaagtattcagaatttggaagttttggtttgttggtttgttttttaggtaactaatcgaaaatggtttttgttacatccagttaatattacattgaactcaattaaggttggagtattggtgagcatttattatttgagtcatctttatcattcttcatgcttagtaaaatgtttgaaatcaagacaaactcatttttcctttatcagatgcatacttctactggaggagggttctgtgactgtggagacacagaggcatggaaaactggccctttttgtgtaaatcatgaacctggaagagcaggtactataaaagaggtaagaatgctattttgttaaaaattgttaactattttaagtttgctgagattagataagaataaatgttatgtgtatagattccagttagaaccctgctgtttttattctcatatttaggtgtaaggaggctttttttctagctccaaagaaactaaggatttg

SEQ ID NO: 13719 - DNA, 2300 bp, Homo sapien
atggataagaatagggccttgtgagtcatttgaactggattttatttattattattttttggtagaggtgggagtcttgctatgttgcccatctcaaactcctgggctcaagtaatcctcccgccttggcctcccaaagtgctaacattacaggggtgagccattgtgctggctgaatatctgctgtgtcacttggaagctgcatgtccctaaccaaattatgtaacttctctaaacttcagttttctcagtttctcatgacagtaaaatagaagtagtaacatctacctaaaggattgttattaatatatagctagtgttattaatatactagtgctttgattacattaagatgttgataagtggctattatttctttttattttctgttttttctttttctttttttttttttttgagacagagttttgctcttgtagcccaggctggagtgccagtggcatgatcttggctcactgcaaactctacctcctgggttcaagcaattttcctgcctcagcctcctgagtagctgggattacaggcacctgccaccacacccagctaatttttgtatctttaatagacatggggtttcactgtgttgtccaggctggtctcgaactcctgacctcaggtgatccactcaccttggcctcccaaagtgctgggattacaggcgtgagccactgccccgacctatttctgaacgttctagtctatttcatttatctaggaatgaaagaagaaaaagagaagagcgtggggtagcataagagaactacagaagtaaaagcatagagacaggaagggacaaggtaacttttagggcaatttttatcaaaatgtgggacaatacctattgtgggttatagtatcactttaataactacaaccagtattttggcttaaatgcataaacatattgcaattgaatagaaaatatgacatattggaagtattgtttcagaaaatttaagtttcagtatatatatacatattctatatatacccatttaattttgtataggtgtaccgtgataagatgtaaaatgtatttattgtggttgttgggcaaaaaaggctggaaaaacagtattttagcacccaggaagtagttcatttgagcagaaacattgtttaggcaggaaagttctataaatcaaggtggaccacagcatttggaaagcctcctctacttttcacattgtttggagctttattttcttccctttgttaaaaatatactttaaaattatttgttttgtaaaaaatttaaaatacaaatgaaggtaaagtagctcttgaccaccttcttcctccaatccgaatcctggccctcagagttactactttgccctttcccctttcagacttactccttcacatttaaatgcctatgtgtgcaaatatatagtttgcagcaacttggcttttttttctctcaatttatcttgatcttttcacgcagatttatcttgctcaagagctgcacagtatttcaaaatgcgaatgtaccatagtatatcttgtctttcctctatcgatgaatgactaggtttccaattttttgttatttccccccgtgtcccccaataaagctggatcccgagctttttttgtacacatgtgcaagtgcccacggggtagaatcctaaaaatagaagatgtgtgagtactttctttttcattttgtaggctctggggaactactgcagggaggttgggatacaaaacatccccaggccaacaaccggccagctaggacaggttcttgctttagcccccgacaagttttcttcctttcataatggacgctgactttgttttttttacctcgtagatgcaacagttcccagcaccaaacccagatatacaaccattcagctaccaagagctacgcctgataaattagaggggaaaaaaaaaatctccagtcccttcacgtcgtgacgcttgcttccgggaagcgggccggaagccactcctcgagtctgcgtcaaacccgacttcaggggccgtcgtaaaagtgtcgtccctgtctctccgaccggccacaggtttccgcttgcctctggccgggggtcggcaactgcaggcgtcagtttccctcaagatggcggacgaggaggctggaggtactgagaggatggaaatcagcgcggagttaccccagacccctcagcgtctggcatctgtaagtccctataggcaagtctcttttgtcctccccccggtccctccctactgcgcttaggaggatgtggggcttcaccccttatggcggctctggggagggg

SEQ ID NO: 13720 - DNA, 2300 bp, Homo sapien
atctttcttgtggcccacaggaaagatcctataggaatggatcctgatgatatttggcaactgtcctccagtcttaaaaggtttgatgacaaatacacctctaagctgaccttcatcagtgggagaacaaagcagcagcgggaagccgaattcaccaagtccattgctaagttttttgaccacagtgggacactggtcatggatgcacatgagcctgaaatatccaagctccatgacagtctcgccgtagaaagaaaaataaggccgggtgcggtagttcacgcctataatcccagcactttgggaggccgaggcgggcagatcacaaggtcaggagatcaagaccatcctggctaacacggtgaaaccccgtctctactaaaaaatacaaaaaattatccaggtatggtggcacgtgcctatagtcccagctactggggaggctgaggcaggagaatggcctgaacctgggaggtggagcttgcagtgagtcgagatcgtgccactgcgctccagcctgggcgacagagcgagactccgtctcaaaaaaaaaaaaaaaaaaaaagaaaaataaaatagccaattctaaaagtagccctctttctgttggatcttgctgaattactggtttgtggggtgggggagataaaaagaatttaaaatggataaagtaaaaaaagtttaaaaatccctgttttgtcctgaaattttagtctgttctggataaataggattttctgagagagatatgagaagttgtagctctgatgtctagctgtagtctcctgggtctgctgattgcattattttaatttgcttttctgggaaagcagttttgctaaaagctgtacagactttcctttgtacctagtagtactttatatagtatagctttgggctatgtagcattttaagactcaattaataaaaaattaatctgttgctgactctgttaattcctatttccacatgtatttccttgaagaattcaggatacgacttcttgtgtatgacagttttccttcacacactatttttgtgggtgtgtatatatctgatttggggagaatttaaaaaacacatagctttttaatttgtttgaaacagaccttttgcctgttacattttgtgctcttaaccaattaaagaagccaatgacatgttagttttatattgtgttttccactagtatatccctgttgatttgtttgtgccttttattaactgccattttctaaaatttttttcaataaagggaagacgtgaaaaaaattactcagaacagcaatatataataaacaattaaaaaatcaacaataagggagttgttagataaattaaggtagggctgaatctaattctcctgggtctggcccataggaagtatttaatacttattaaatgaatggtatactaccgtgttgcaatattatttactcaggtgcatgtgaaatcagtttaagggaaaaataactttcacaaaacataggaattacatctatagaaaacctatgctgccgggcgcggtggctcagcctgtagtcccagcactttgggaggcggaggcgggaggatcgcttgaacctaggagttccgaggccagcccgggcaacacagacagatcccagtctctacaaaaactatatttaaaaaattagctgggcgtggtggtgcgagcctgtaattccagctacttaaggtcagggaggtcgaggctgcagtgagccatgatcgcgccactgcattcctgcctgggggatagagaccctgtctgagaagtgaaggaaaggggaatggtagagggaaggggaagagaaagaaaagaaaacctatggaggtacgttaataatcagaaggggccagaggaagccacctgacacatttgtgagacaatttaaaaggcgttctcatacattctcactttgatacaacaaccctgcaaagtgcgcacggaaggtgttattaactccgttttacaggtaaggagatcgacccactgaggtcaggagtgactgaccaaggcggagccaggactctagcccccgcctcccggccactggtcccggtctccttccccgccaccactcggccaccgtcattggtgttcagagtttcggttctcttttctgtgatcgtattacttatgcaaaacgagcccagtcacttgcgcggccagagaggggcaggtgctgggcggcggctgacgggcgcagcaccctaggcccagtgtctggctccagccccgcatccggcgccggccccgcatccagctctggccctgcgacaatagagtccggaag

SEQ ID NO: 13721 - DNA, 2300 bp, Homo sapien
ttcggttctcttttctgtgatcgtattacttatgcaaaacgagcccagtcacttgcgcggccagagaggggcaggtgctgggcggcggctgacgggcgcagcaccctaggcccagtgtctggctccagccccgcatccggcgccggccccgcatccagctctggccctgcgacaatagagtccggaagtgcaggcaaagcggctcccgggagcgccgcgcggtcctgcgcgggatcagcgagggccgcgccccggcgggcgggcggcatggctgcagtgctggctctcagggtggtcgcggggttggcggccgcagcgctggtggccatgctcttggagcactacggcctggcgggccagccctcgccgctgccgcgccccgcgccccccaggaggccgcaccctgcgccagggcccggagacagcaacatcttctggggcctgcaggtgacgcggcgggaagccgggccgggaggcaggtgcagatcgggcaccgtgcggtgggacccttgcgggtgttgggccccacgctccaggctggggacctcagtcagattgtaactcgaggctctgtctagtgctggccctgtccttacctggggggttcgttatgcattgcctctttgccttttccttctgcccgagagagccgctgagccgcccctccccatgctgcctcttcctggctcagatctctctgttcaatacctgttttcggcagatatccgacattcacctgagcaggtttcgagatccaggcagagcggtagacttagagaaattctgttctgaaactattgacatcattcaaccagctctcgtcctagcaacaggtagggaggcttgccgtgctgtggtggtggtctgtggtccgcatggtagaactctagccagggctgtggcttttcattttggggacgttgggagcagtatagccacagccccaggtgagctctgtgaggtggaagagattggacattctaacccctttgcctatggataactgaatgagtcaagatccaggcaaaatgatttgacgtagcaaggttttgtcaaagcagtagaagcaaggctcctggttctcatgtcagtctgttgtctgatatatttgtatctggtttttgttcttgttgttgttacagttctggttgtgagaattagggaaaagcctgtaaccacgaatcagaagttctcttcttttgctaacttttctattttctttacattattaatcttatattttcagttgtttgaggcttccggtgacccagggcactttttcttcatcctttgatagttttatgacttaagttttctagactcttcaaacactttatttgctttcaaactgtaatggggagaagaagctaaaggagcatctatctatcttgcttactggggaattcatcactcatccaccttattgaagcatctctgctgacatgaaagggtatcagttctgatttaatggatgagcctccataaaaagttttctgtttagttctctataaattttggtattttgttgtccaattccacctgccacattgcttcttgctgtaaaaataatacttggtcaaatcacatattctgattttgtggtttggaaaatatggttgccatagatattaggcagccactcagagtactggaatttcttataaatcattttcattttatcagagtctattgatgcattttgtactgttctctttaaagatttttttaacaacccatttcgaatatcacaggagattgaacaggcatttgctaacctataagaaacaaagtccttgctgagaaaatcttgttagtttagatggctcgatttggacattggtggtctcgtgagcagttatgcttatacacgttgagtgctttaagtatccttgttccttcagtgtacatatctaaaaaaaatggaacccccagtagtttattttgcattgtgattcaattcttgtgtaaacctacaggagacctgacagatgccaaaacaaaggaacagttgggatccaggcagcatgaggtagaatggcaaacctaccagggtattctgaagaagacaagagtcatggaaaaaaccaagtggctggatatcaaaggaaatcatggtaagagccaagagccagatacaataaagacaagagtttttttcccccttcaggaacctagattttccaacttagattgtaaaattataaagtgggacatttacatatactaaaggtcacatctctgaaatacaactatataatgtggttttaaaacttcaaatgtcattgttagcctttgagatg

SEQ ID NO: 13722 - DNA, 2300 bp, Homo sapien
gtttacggctgggcgtagtggcttatgcctgtaatctcagcacttttggaggccaaggcaggcagatcacttgaggtcaggagtttgagaccagcctggccaacatggcaaaactctgtctctactaaaaatacaaaaattatccaggcatggtggcacatgcctgtagtcccagctactcaggaggctgagccaggagactcgcttgaaccagggaggtggaggttgcagtgagccaagatggtgccactgcactccagcctgggcaacagagcaagatcctgtctcaaaagaaaaaaaaaaagttatgtttacaccatactatagtctatttagtgtgcaattgcatcatgtctagaaaaacaatgcacataccttaatttataaatacttctactgactgggcatggtggctcacgcctgttaccctagcactttgggaggccgaggtgagtggatcacttgagcccaggagttcaagactagcctgggcaacatttagaaaccctgtctctataaaaaacacagtaattagccaggcatggtggctcacgcctgtggtcccagctacccgagaggctgaggtgggaggatcactttgagcctggaaggtggagattgcagtgagctgagatcgcgccattgcactccagcctgggtgacagagagaccctgtctcaaaaaaaaaaccaaaaaaacaaaaaaaaaccttactgctaaaaatgctaatgatcatctgagccttcagcgagtcaaaatctttttactggtggagggtcttgttttgacgttggtggctgctgactgatcagggtggtggttggggtggctgtggtaatttcttaaaataaggtaaccatgaagtttgctacatcaattgacttttcctttcacaagaatttcttggccgggcgcggtggctcacccctgtaatcccagcactttgggaggccgaggtgggcagatcacgaggtcaggagttcaagaccagcctggccaatatggtgaaaccctgtctctactaaaatataaaaattagcgggtcatggtggcaggcgcctgtagtcccagctacttaggaggctgaggcaggagaattgcttgaacccgggaggcggaggttgcagtgagccaagatcgcaccactgcaccccagcctgggtgacagagcaagcctccatctcaaaaaaaaaaaaaaaaaaagaatttctctatagcatgcaatgctgcttgatagcattttacccaaagaaatccaatcctctccaacactgttattgctttatcaactaagtttatgtataattctaaatcctttgttgtcatttcaaaaatgttcacaccatatttagaaggagtagattccttctcaagaaaccactttttctgctcatccataagaagcaacttgtcatctgttcaagttttatcataagattgcagcaatttagtcacctcttcaggctccacttctaattctagttctcttgctatttccacatttacagttcttcctccactgaagtcttgaacccctcaaagtcatccatgagggttggaatcaacttcttccctcctgttcatgttgttattttaacctcctcccattaattgcaactgttcttaatggcatctagaatggtgaatcctttccataaatttttcaattgactgcccacatccatcagaggaatcataatctaaggcagctatagtcttatgaaatgtgtttcttaaatagtaagagttgaaagttgaaattactccttgatccattggctatagaatgaatactgcgctagcaggcatgaaaataacattcatctccttgtacatcttcctcagagctcttgcgtgaccaggtgcattgtcaatgaccattgatattttgaagggaatatttttttctgagcagtagttctcaatagtggacttaaaatattcagtaaaccatgctgtaaagagatgtgctattattatccaggctttgttgttccatatatagaacacaggcagagtagatttagcataacgcttaagcacccaaggattttcagaatggtaagtgggcattggctccacttaaagtcatcagctatggagcaggaacccacatccaggaacagagccctttgctcctccctcagaatgaatggagaccagaaatcagacatttctgtccaagaaaagcaggatttcattcagtgcttctcccagattgttagggtgctgactgaggatgagatggggcacccagagacaggagatgctatcacccagctcacggaggtcctgtagta

SEQ ID NO: 13723 - DNA, 2300 bp, Homo sapien
ctaccttatttgatctgcttccaatgcatatcttgaatccatccacttctctccatttctgttttcctaatctaagttgtaattatttcttgcctgggtcttctccctgatattcttgcctccttactctcagcttaatacagagcatccagtgtgctcttttaaaaactttacaatcagctcacttacttttcagcttgaaatgctttgaagcagagcagtgatctgggtcctgccgactgccccaatttccacctggctcatgctctgcatgcacttccttaaagaggccaagacctctcccacctctgggcttttcatttgttccttctgcctagaatgcacttccctccgctgattcattcttgtccttctggcctctgagagcctttctcccagttaccttctcatgacccagttctttccttcattgaactaatcacgatctgtaattatattttttggtttttttttttgtctgtcttctccctgttagaatgtaagctctatgacggaccttttctaacttgtttgccattgtgtccccaacttggagcctagctcatgcctgctacataatgggtgctcaataaatatttgttaaatgaatgaatcatacagcagctcaacttggattataatttagatactctaatttatattccagtacttatcatgctacctcaaacaaaaatggaggtaagaaaaaaaatactgatagccaagtcctcccctcactccaccaaaaaagaggggttgttgtatgtgtgtgtatacatttactcagttcaattccagcttaacaccattgggtattaactgtgtatatgatactgtactacaagttgggacttcagcataaattaaatgatacctgcctctaagatgaataaaaggacatgggcaaatacacaactagccacaagtcagctgttgtgttataagcaactgtgcttgaagtaaattagctaacgccaagacagatagcagcatagtcttaggatccactaataatgcattattaagaccaaactcttccaaggacttgggagtaagctatggttctgttcttttccagctggcgttttttaacatccccttgatggcttacatgtgttggagcttgctgcagcggtgctttggtcacaacttcaggtctcatctccatcaaagaaaatacttgaaaattatgcctgttcacctacttatgctactgctgtacatctggcaggtttattcctgctactttctttatgcaacatacggcaccctagcttttttattctcccctttgcggacctggttgacactgctgacacctgttctcattcgttatgtgtggacactgaactccaccaagtttggaatcttcatggtgcagttaaaaagccacctgagctcctgaaggccatgtctcaccactggcagctgggcagaagcccagcctctgtgtctgtagcccaggcctctaccccagtagcaggtggagggccaggattggtgggtgagctttagggagcagctgctcgtttggagtcctggacgttggagggattacccactactgatacctgcagaatggactgcagaaaagtctcaaaaataatgcctttattccttccctccctaaggaggcaaagagttgatttacctttgtgaagagaaaacccttatctaggacatccacagggtagaggttgggtgtgtgtacgggagtgtctgaggcccagtgtgttttttagggttaccccatgtaaagcacttaccgctgtgcttggaattcagcagctgtcaaaggtgcaatttcaggggcagggaacctttgaggatctgggcccgaccctcactacccctgagatattagttcccaggcctgttttcccacaggattgtgggctctctgcttccttagtcggaagtgttttcaactaatcaaataaatgaatgaatgatgaataagaaagacggtgagcctgaggcttgcttgtgtagcctggcctaaggggcaagagaaggcgtggcctgtcctggcctctgagagtgggatggttggtgctgtacctcaggggacagggcggggcgggaggaggcggggccaggcctggtctctgataacgggatgggtggtgctggacctcgggcggggccgggcctcgtggcgggaggaggcagggcagggcctctgggacggggctggacggcttgttgacggaaacgagcccttgacgctgtggcccggaagtggagcggctgtcgcagtgcggctccggcagtggcagcggaggcctgtgtttgcggcc

SEQ ID NO: 13724 - DNA, 2300 bp, Homo sapien
atattccagtacttatcatgctacctcaaacaaaaatggaggtaagaaaaaaaatactgatagccaagtcctcccctcactccaccaaaaaagaggggttgttgtatgtgtgtgtatacatttactcagttcaattccagcttaacaccattgggtattaactgtgtatatgatactgtactacaagttgggacttcagcataaattaaatgatacctgcctctaagatgaataaaaggacatgggcaaatacacaactagccacaagtcagctgttgtgttataagcaactgtgcttgaagtaaattagctaacgccaagacagatagcagcatagtcttaggatccactaataatgcattattaagaccaaactcttccaaggacttgggagtaagctatggttctgttcttttccagctggcgttttttaacatccccttgatggcttacatgtgttggagcttgctgcagcggtgctttggtcacaacttcaggtctcatctccatcaaagaaaatacttgaaaattatgcctgttcacctacttatgctactgctgtacatctggcaggtttattcctgctactttctttatgcaacatacggcaccctagcttttttattctcccctttgcggacctggttgacactgctgacacctgttctcattcgttatgtgtggacactgaactccaccaagtttggaatcttcatggtgcagttaaaaagccacctgagctcctgaaggccatgtctcaccactggcagctgggcagaagcccagcctctgtgtctgtagcccaggcctctaccccagtagcaggtggagggccaggattggtgggtgagctttagggagcagctgctcgtttggagtcctggacgttggagggattacccactactgatacctgcagaatggactgcagaaaagtctcaaaaataatgcctttattccttccctccctaaggaggcaaagagttgatttacctttgtgaagagaaaacccttatctaggacatccacagggtagaggttgggtgtgtgtacgggagtgtctgaggcccagtgtgttttttagggttaccccatgtaaagcacttaccgctgtgcttggaattcagcagctgtcaaaggtgcaatttcaggggcagggaacctttgaggatctgggcccgaccctcactacccctgagatattagttcccaggcctgttttcccacaggattgtgggctctctgcttccttagtcggaagtgttttcaactaatcaaataaatgaatgaatgatgaataagaaagacggtgagcctgaggcttgcttgtgtagcctggcctaaggggcaagagaaggcgtggcctgtcctggcctctgagagtgggatggttggtgctgtacctcaggggacagggcggggcgggaggaggcggggccaggcctggtctctgataacgggatgggtggtgctggacctcgggcggggccgggcctcgtggcgggaggaggcagggcagggcctctgggacggggctggacggcttgttgacggaaacgagcccttgacgctgtggcccggaagtggagcggctgtcgcagtgcggctccggcagtggcagcggaggcctgtgtttgcggccttcggcaagcgactgagatggcgagcgcaactgcacctgcagccgcagtccccaccctggcttcgcctttggagcagctccggcacttggcggaggagctgcggttgctcctgcctcgagtgcggggtgagctgacggagttagaacgggcgacggcaggggcgggctcggggtcggggagaggccgggctcggggtcggggagaggccgggctcggggtcgcggagagggcgggctggggcggcggcggggagccgggcttgggcgagggaggtggctccgcttacctcagcttttccattcgccaccgttcggcccccacacgccacacccacaagtcggcgaagcccaggagaccaccgaggagtttaatcgagagatgttctggagaagactcagtgagtgcgcctccttccgggctccccttgcctcagttcctccagcgtcccgaccccttttcctcccgctgtcccccacggaggggactgctctcccccgctgcatcctttctgtgaggtaccttacccacctcagcacctgagagggtgaaatagaattctaacctcgacattcgggaagtgtttttgagaagtctcggtcggtaagggaagtcttccaagtccgtgcagcactaacgtattggcacctgcctcctctt

SEQ ID NO: 13725 - DNA, 2300 bp, Homo sapien
ggttaccgtttttacttcacaggattgttgtgaagaccgaattgccaagtgcagttcctggcgcggagtaggcaggtcttataaatattggttcagtctgaagtttatcctggttgtttcccttctgataattttttaagcactttttatttgctgggtgttttcacatacttgatggccatctgacagatgagcaaggaggctcagaagctcagcttaagatttaaaaaaaagcaggggggctagaatttaaatcaaggtctatctgatgtctaagctacctattctgttatactgcataataccctttttatattattttttatatttaatcagtaacatatgtagatagtacaaaattcaacagatatcaaagtgtgttaagtttacctttccacccactttctcatttttgtctcccccagttccttttgcattattccacgtatattctgtgcatatatacattcatatacatttatctgtatgtgtcagcttctttttacacaaatgatacataaacactgttctggaccttccaacttagaattactgcaaacagtgtcgtgatgaattacctaattctgtgtatgtgtgtatattggtagaaaaaattcccggaagtagaattgctagaacaaagatttatgcattttaaatattcctttattataaaactaatgaaagtaaacatgttggctatgaccacgtatgctctatgctcagtttttctagagttgtgtatgcttaatataggagtaagattcttttaaaatggcatattcattgccttatttgattttcatagtcaattgttttaatttttcagtctacatatataggtgtttggaaaggatataaatatcttctgctgcatgtacctacagtgataaactctctcctcctacatacctttgagattttttttttttttttgagacagagtctctctctgtcactcaggctggagtgcagtggcacagtctgggctcactgcatcctctgcctaccgggttcaagcagttctcctgcctcagcctctcgagtagctgggattacaggcacctgtcaccacgcctggctaatttttgtatttttagttgagacggggtttcaccatgttgggcaggctagtctcgaactcctgacctcaagtgatccgcctgccttggcctcccacagtgttgggattacaggtgtgagccaccgtgcctggcctacctttgagatttgtgatgaggaaacaagagatgaattgtatgagagcacttcaaaagattcatggaaaatacttatttcaaaaagagtagttaatattaccttatttttcttatctgctaacccctttctttcaaatgcacttaggacttgctgctaaaactcactgcaagtaagataccacaaggaggcagcatagaactgattttctatacatgctcaggacagtagtttcactcatagatgaaaagttagaatttggatttatttgaaatatatacaaatattcaagtatatacatatattcaaataaatacatatatgtatatatgtgtgtatatacacacatacatacacatgaatcatcattgccttcttgagatctcaccactttagtcctactaaaagatgggtggttgttggtttttttttgttgttgttgttgttttttaaattccaatctgtatggaatgatactttaataaaattatgtgctcggatgttgaataaatgtcaaattgccataaaagtttctaaacactctcagtcactgcttatctcatccctgactggtcacaaacagtttgtagactggctccaacctggaccacatttgtatagtattgacttagaatttaacagaaaattgaggacaaggaagatgagaaagccagtgaccacctagaaggaaaatagttaacatggagcattgtcgagtccatgctagttacctttagttacatattctgattctgttaaaaaaagagagagacctggttaatggtttaataaccatggtctgtcagttggtctgtctgtctctctccctccctctcttttctgtaaagggccagttagtaaatattttagattttgtaaccaactacccaactctgcccttatagagcaaacacaactacagacattaaaaccagtgagtatggctgtgtcccaatacacttcatttccaaaaacaggcagtggggcctgacttggcctgaggaccacagtttgccagctcctggtctaagatatcatgaatatcttgggatacagagtatcaggaataagttttttcctgc

SEQ ID NO: 13726 - DNA, 2300 bp, Homo sapien
aattgttttaatttttcagtctacatatataggtgtttggaaaggatataaatatcttctgctgcatgtacctacagtgataaactctctcctcctacatacctttgagattttttttttttttttgagacagagtctctctctgtcactcaggctggagtgcagtggcacagtctgggctcactgcatcctctgcctaccgggttcaagcagttctcctgcctcagcctctcgagtagctgggattacaggcacctgtcaccacgcctggctaatttttgtatttttagttgagacggggtttcaccatgttgggcaggctagtctcgaactcctgacctcaagtgatccgcctgccttggcctcccacagtgttgggattacaggtgtgagccaccgtgcctggcctacctttgagatttgtgatgaggaaacaagagatgaattgtatgagagcacttcaaaagattcatggaaaatacttatttcaaaaagagtagttaatattaccttatttttcttatctgctaacccctttctttcaaatgcacttaggacttgctgctaaaactcactgcaagtaagataccacaaggaggcagcatagaactgattttctatacatgctcaggacagtagtttcactcatagatgaaaagttagaatttggatttatttgaaatatatacaaatattcaagtatatacatatattcaaataaatacatatatgtatatatgtgtgtatatacacacatacatacacatgaatcatcattgccttcttgagatctcaccactttagtcctactaaaagatgggtggttgttggtttttttttgttgttgttgttgttttttaaattccaatctgtatggaatgatactttaataaaattatgtgctcggatgttgaataaatgtcaaattgccataaaagtttctaaacactctcagtcactgcttatctcatccctgactggtcacaaacagtttgtagactggctccaacctggaccacatttgtatagtattgacttagaatttaacagaaaattgaggacaaggaagatgagaaagccagtgaccacctagaaggaaaatagttaacatggagcattgtcgagtccatgctagttacctttagttacatattctgattctgttaaaaaaagagagagacctggttaatggtttaataaccatggtctgtcagttggtctgtctgtctctctccctccctctcttttctgtaaagggccagttagtaaatattttagattttgtaaccaactacccaactctgcccttatagagcaaacacaactacagacattaaaaccagtgagtatggctgtgtcccaatacacttcatttccaaaaacaggcagtggggcctgacttggcctgaggaccacagtttgccagctcctggtctaagatatcatgaatatcttgggatacagagtatcaggaataagttttttcctgctgtttcttaatggtttattgagttgtcagcccaatatctactatatagctaactcctccctggtatgtgatgagtatagtaggcctgccttcataccaggacttcagaaaatgtttgatgatgctgtagaaatatctgccctaggccgggtgcagtggcttacacctgtaatctcagcactttgggaggccaagggaggtggatcacctgaggtcaggagttcgagaccagtgtggccagtgtggcaaaaccccatctctactaaaaatacaaaaaattagctgggtgtggtggcgggtgcctgtaatcccagctacttgggaggctgaggcaggagaactgcttgaacctgggaggtggaggttgcagtgagccaagattgcgccattgcactccagcctgggtgacagagtgagactctgtctcaaaaaaaaaaaaaaaaaaaaaaaaaaagaaaaagaaagaaaagaaaaagaaaagaaatatctgctctattccacagcagaagggttgaccactttgatctaatctgtttcctttttcataggaaacccagaagttctgtgaacaagtccatgctgccatcaaggcatttattgcagtgtactatttgcttccaaaggatcagggtaagccacataagtgttgcatttatcgtgtagatctttgctaatattgtggattatgtcttgtgacttttacctttacccaacttgaacatgtaactttctcccataaaatacagtgaaggataattttgtaatgtaagtgacttatataaacaagccattattctaagatacagatgct

SEQ ID NO: 13727 - DNA, 2300 bp, Homo sapien
gggctgggtcccagtgggggcagtgaaagagggacttcctcctcagtcttcattaggcccagagctgacggggtggcctgcagccaaacctaatctcggcagggaggacagaggcctggatgtggagggtggacctaggacccccacaggccctcatccctacccacctctcaccagaggatgctgtgttcctgaagaatgaggctcagcgcatggagtacttgttgaaccagaatggtctcatctacctgggtacagctgactgcatccaggcagagtcctgggactttggccaggtaccagggccctctaggggaggagtgtgtagagtgactgtcccataaccttgcatgttgaggctagacagagctggtaggtccaaaaacccctggtcatgagaccatttctttagcccatttcagctttgtggtgcctctccttcctctgggccatatcagaacatcctccgggagctcccagaattattttccttaaaactgtggcaaatcaagccccagttacatccccactgtctttgagataaagaccaaatccccctagcctaacatccacggcccttccagccaggaccctgctttcctttccccatgaaccgccccatgttccaactcctcaccatcctcagagcaacaggctgaacgttccctctgccaggaagggcttcccactcttatctcctggcaagctcctacccatctctcaagaccttctcgaagccttccccaatccccgaaggcagggggagcctctccactgtgctgctctgtgccggcatctctacaagagccctggccatgctgctgtgctctgtaatctaaggggctgcactgcgtgtccatctccagtcctaaaccgtgggctcctcaggaacaggagctgcctcggtatcctccactcccggttcagggctggtaggacagtcagggttcactaaatggaaatggaatgcagtgcaatgaaacgaaacagtacagcacgggtccccgagagctcacaccctaccgggagtcagacaacagataggcaaaggactggatgcctgggaaaaggaacccaggtcccattgagaggttgggggagggagccagagctcctcagagggatgaggcaagggaggcaggtgtggagtgcgggtctgggagaaggacgagatgatgaggctgtcctgcaggatgagtgcctgacctggggacccttcctcatggccctgtgtggggacccttcatcatggccctgtgtgatccttaacagttcgagggggatgtcattgacctcagcctgcgcttgctgagcaaggacaagcaggtagagaagtggagccagccggtgcacgtggcccgtgtgttgggtgccttggtaagcgagaggctggggaaccagaatggggcaggggtgagaaaaaagccctctgagagacctgccccaccaccgtggcctcagaaacccccaaatcacaaatggccccctcctcccagggtgtggggacagttcctacagaagcgtccgaggaggacaaaaagacaggcaatagcatccacagcggggagaaaagcaaagaaatgtgtgatccctcaggatgcaagcccgcagaagactaagcctcttttccctccccacacccagtcccatcctggagcttaggcccatgggaaggagtgggtagggcccatcttacccagggcttgctgctgcagtgatcgaagggacttcttttatacttctaaattattcataagaatatgcagaccatgatggtaactcggtgcttttccttgtccctaaaaatcctctcagaggagtcatgtgttcaccattccctctttgccgctgaagtcccctctgaaaagatggtgagagtccaggccagcctgtgagttgaaagaagcttgggataagtggcctccaggacccaggtgcaaagcacctcaaacgagtcagggtggaggactaagaaccggtgaaaccagcccccaaggaagggcagctctaatgctcctctttgtggctggagccagagaacttgttaagaaggagggtcctgggctccagccctagagctatgacccaggggcctaggatggagcccagaagcatgcaggtttaaccagtaccaggtggctctaatgctggggatctgttcaccatggttggagtactgtgatgagccctccttacccatgccctggaagctgtcctgcccaagggactcatactgacatccacacatttccccaaacagctgcattttctcaaggagcagagggtcctgcccaccccgc

SEQ ID NO: 13728 - DNA, 2300 bp, Homo sapien
tccttcgtgatatgagtttcaaatattttacccaacttgttgcatatcttgttttgttttgtttttgagacggattctcactctgtggcccaggctggagcacagtggcccagtttcagctcaccgcaacctccaacctcccgggttcaagctattctcctgcctcagcctcccaagtagctgggattacaggcacatgccaccacgctcagctaattttttgtatttttagtagacatggggtttcaccaagttggccaggctggtctcaaactcctgacctcgtgatccacccgcctcggcctcccaaagttctgggattacaggtgtgagccaccgtgccccatctgcatatcttttaacattgtgaatatttccatttaaaaatttttaaggaatcaaatttctcagtattttctttttgtcttctgagttttgcataatatttttaaaggttttcccaagttaacttaagaagaagtgtctcattttttcttctattactttaagaatttaataagagttttgatccatctgaaatttattttgatgtgtggcataagataggaagccaactgtattttgacaagctagttgtcccaaaatcatttactgataaatccttcatttccccatggatttgaagtgccacatttagcatacatttaatacatgtattttgatctatggacttttcaattacagtaatatcatattatgtgttcatatctaggaaggctggtcacactttattattatcttagaaatttccttttgaaccttagaatcagtttacctagtttcaaaaaacaatcttggtgtttttattgggaatgaattaaacttaagatcaacttgggaagaaatgaccgctttataaagttgagttgtcctacacaggatggtgatcttcctttttatctgctcaagtcttatttggtgtccctccataccgtttccaagtgttttactgacagcacttcacatttcttaagtttatttctagaaatttcaccttttgttgttgttgctattataggttgggtctttaattacagtttctgacttgttattgattgcaggtatgaaaactattggcttctatacttttggtattagccagctcactaaattaccttttataatcattgttagtagattcaagttttccaggtaaaaaatgacatcttcaaataatgaaaaattaacttcttcatttcttatgaaggatttttttttttttttctgagatggagtcttgctccatgctggctgtgcagtggcacgatcttggctcactgcaacctcagcctcccaggttcaagcaattcttctgccttagcctcctgagtagctgggagtacaggcgcctgccaccacgcccagctaatttttgtatttttagtagagagagggtttcaccatattggccaggctggtctcgaactcctgacctcaggtgatccgcctgacttggcttcccaaagtgctgggattacaggcatgagccactgcgctagtgaaaggcagaagtttcattttttttttttttttttttttttacataataagatccttcaaatgagttcaaaagttcaaagttttaaaagtataaaagagtaaacagcagaaagataacctttctaccccactgcccagatcccctccccacaggcaaccaatatttttggcagtgtgttttatatcattctatagacgtctcatgtatatgcagcaagtacagctgccctgaaagtgcttctggtaacacagtttcacaagcccaggtagggccaaatatgagatccttctcttgtctcttcaggaactaaagaaagaaaaattgaaaagacatagggcctgagtcccaagatagttcccaaccttctctggtagagggtcccagaccaggtaggcttggaagagttggggccccagcttctacttttaatacatttatttttcaccaacaaattctacttccttatctttttcacacagataaattgcagatgcacgtgttctctctattatcaaaacagcccatgaacatcttgcaacttgcagcccctgtcacgtttagggcctgagatttggagttggatatgggactcctgtttgtggcctcctctcttccagagtcttccagtgcagtccagataacatctctgagagtctcttgagaccactgaagcaagaggcttcaaggtttgttctaggcttctctagttggcaggtcttccccatcccaccccctcccccagggctgccaggcgtattcctgcctgggcctcctggca

SEQ ID NO: 13729 - DNA, 2300 bp, Homo sapien
acatggtaaaaccccgtctctactaaaaatacaaaaaaaaaaattagccgggtgtggtgttgtgtgcctgtaatcccagctactcagggggctgaggcaggagaattgcttgaacccgggaggaggaggaggctggagtgcgatttttttgacttcaaaaaaaataaaaagcacagaatggaaatacagcagaggataaagaaaggaagttggctggcaaacagaatgcatggcccccaggaataaagacaacactctaccttctttcaagaatttctctaccaggtagaaactctcacttttctaagctcttgttacatggttttctttcctcttggcttaatctatgatgcttttctagagaggcttccaagatcatatacccaggaaaagggggaatcaaagccacagaatattttgcttgagaatctgatggtctgaagcaataatcctaactacagaaaggaatggaattccagctttggcttgaagatggagatttagggccagaagagaaatgcagttgagtcaggcctctgagttttgccaaaggaaaggcttgccagtcccaccctcctggcgtaagcagagctcacagcttgctagactttactggctcaggcagtgcttgtctgagcagtcagcatccccacctttgcctagaatctctcccatgagctccagaagtggggaaggaagttggaaatatcactattccagtgttccagacagctccagcatgttcctgcagatggcaaatggaagatttccccaggtccaggccccaaagtccaggaatatacgggtccggaatctacagctcacaggtgatttttttgtgccctttttgcagtgatgaggtgtctggggatccctacccgtgtgatcaccaacttcgactctggccacgatacagatggaaacctgatcatagatgagtattatgacaacacaggcaggattttggggaataagaagaaggatactatctggtgagaaacaacctctcaacctatttctagggccacacatcagagccaagccccatggcaggaggaagggcagaacgaggtccatgagcctggtccctccccttcacctcctccacaccccctcaccctcccccacccaccccccaccaaggctgtccccacacctcttgccaatcttcagctgggagacatctgaacaaagcccatttggggtttagaagtctcatatcataagagtgttctgccctgggttgaggttttcatctttgtcacctccatcacagaacctcctggctctatggggcctggagaaaatttccccactgccctttgaaggtttgtttaaaaaaaaaaaatcaactcacaaaatcagatcaataggagaaaaggcatacacattaattaacgtatatacaggagccttcagaatgaagacccaaagatacaggggaaattgtccatttttatgcttagtctaacagagtatggacagccatgtagaaatctgcttggacaaatggtatgacctaatggtaatagactgagtggggaaacccagccctgtttgtctacattctgcttggcctctctgagcatgagttccttccttcccaatatggggcagaaccctctctagaatgagggttttttgacctacagtcaaacaaggtaggtcagataaattttttatggccagtttttatacaaaaaggcagaaggaaagctagggtaatatttttaggttttaagactgcctttggggaaaaggggttctggtttccatgaccttcccaccttggggaggcgagattttaatttctatgcctagccatgggggtaaatgagactgagagacaggaagacaggaaaaggtccaaaaaaacacttctgcttctgagaccttcattttggagtattgtttcctgagtcccaacagttctgaccacaggacggccttacctccgaatacaaagaccacgagtgcctctgtgagtcatcaacgcacacaaaggggccacaaagactgtttcatgagacagtgaaggatttttaacttcagtggactctggaagccttcactttctgttcacaagctgagtccgcagagggagactcttttctgggaggcaaagagaggtccacaagaggaagacctgtcactaattaattacttttttgagacaaggtctggctttgctgcccaggctggagcacagtggtatgatcaaggtcaagccttgatctcccaggctcaagtgatcctccacctcagcctcccaagtaggtgggactataggcatgtgccat

SEQ ID NO: 13730 - DNA, 2300 bp, Homo sapien
cccagaggagctgtccagcagagggtgccgcagtacacagttctgggggtccccagtgtcacgcgggagccagtggagtgagaagagaggagatggggacaaatccctgggaggcaccagttcaagaagggaaagtctgtgatggggactgagaggaagaggacagtggggataaggaggcagctagacaaccaagagagagaagtcacctaagcccaggaggagtggacagtacccgcagggctgcaggaggccttgcagggtaagagcaggaaaggcgcccagagcccagccctcagagctgggaggtgagcgtggcgtcgaggcagccgtgggacagaaggcagtctgcagcaggtgaggggtggtgggaggcaaagcagtgggcaaggagcttggctgagaagtggagttgagagaaagggcaggggctgctagggaagctggggatgagagttgaaggtggatgtgctgtgttaaaatagtgaactgcatttgtgcacatataccctataagaggtgagtggggtgtgggccatgggctgccatggtcagtgaagtataccaagatggctgggtgaaaacttgctctaaaaaccattgactgggtagcttttgcagagatgataccccaaaaccaaaaggccattgctaattatctgaaatcctggaatgagaccctcacctccaggctggctactttacctgagaatccaccagctattgactggacttactacaaggccaatgtggccaaggcaggcttggtggatgactttgagaagaagtttaatgtcctgaagcttcctgtaccagaggataaatatactgcccaggtggatgctgaagaaaaagaagatgggaaaacttgtgctgagtgggtgtctctctcaaaggccaggttggagaatatgagaaacagctggagaagatgaggaacttaataccatttgatcagatgaccattgacgacttgaacgaagctttcccggaaaccaaattagacaagaaaaagtatcgctattggtctcaccaaccaatcaagaatttataaaattaagtccaggaagaagccctggcccttatagtacacattctggacattaaaaataaaaataattacataggttttaaaaaagagctgagtggggacagagagaattgaaaatacaggagggaggacaatgctggtgaaagaggttccccagggagaaggacccagaaagcaggggatgtggggagaagtgccccagagcacagaaagacagggtaggcatgggggtcccacccactccacaggcagagcccttccccctcctgccctctctctccttccacctgcgcttttctccctatgaaagggcttgtgcctttcttactaggatcaaggcccttgctcaccggcattcccaccctctcacctatttccacacctcctccacaaatcttcccaatttttcttcctctattttatttgtgattatttgcttttatttgtgatttgtcttggacctgccaggtctcatgcaagacaatgccactgccaaagctaaatacagtgaaatcataccgaaggagatccagacagagagggttctgtttgcatttaatgttcaggaagtgacttttcaggataaaagagaggccttggttacctagcagggttctcggctcaatgaggtgctttaagctgtgagcagagtcttgggaccctgatgctccttccagcagccccctgcatccctctggcgggcccatcagctcgcttctccctcctgacttctccaccacagcacagcacctccctgggaatgccctattgctcaagagctatcaaaggcccacacggcataaggctgtgacagttcatcagcctccacacctcctttcaattcagcaacactgccaagaaaaacctgagggcaagtgagcaaaccagttgtgatctgctcggtaatcaggtggcagtgcagcagtccagccccgccttcggttctcctggaggcttccaatggaaggggaagtagacactctggcaccagtttgctgaagctccagaccgcccagctgttctgtggggagcatcccaggaaccggaggcagctaccatggcccaaggtagggaaagcccctgtggccactggagttcagggataagaaggacagagagagactgtaggaagtcaaggggtggagggtggattcagagaaataaagaagtaaatacagaactgaggcaggaaaagcaagaatcccagaaacctcagtattcattggtggcttgagaaccaggagacagc

SEQ ID NO: 13731 - DNA, 2300 bp, Homo sapien
ggcggtggctcacgcctgtaaccccagcactttgggaagctgaggtggacagatcacttgaggtcaggagttcaagaccagcctggtcaacatggtgaaaccccgtctctactaaaaatagaaaaattagctgggtgtggtggcgcatgcctgtggtcccagctactcgagaggctgaggcaggagagtcagttgaacctgggaggtggaggtacagtgagcagagatcgtaccactgcactccagcctgggtgacagagcaagactctgtttcaaaaacaaaaacaaaaacaaaaccaattcaaaatatctttaatttatgaattagaactctaaatttaaaaaaaaagttattttaaaaacatctgccttcctcaaaagagcatatatttctattacaaaagattcttggcaccagtaatcaggtatttttctgagccaaggtacagcaattttaacaaaataaagcccatagggtgcccactgaacaccgggtaatgagtgagttcaatgtgttcgcctgaccatcattttgtgaatacactcaacgtattaaaagaggcagaggatgtgactgaaagctttggttacaataggtgcaggaatttgtgacgaatgaatcacacagattaactcagggaattacgaaggtcttctatatgtttgacaataattagtaaacatgtaaatagctttaaagtttttctgtctgcagcacttattctttgaccaaactaagttcctcctccaggagtgctgaatggacacttctctccttaaactttgaatctgggaaacacatacacacatgtctggatctcctgccatgatcttcctattctttttctttctttctctttaaaaaaaagtgtttttttctccctaattaaaaacatcttacactcccactgtggaatttttaaaaaattcagtaaaatataaaaaagaaagcacattcacaatctcactgctcttagccacagtttgttatattttcttctatcttttaaaaatgggtctatctgcataaataatattttttacactgttaaactacactgttttttaaaaaattattttatttttaattaacatgtaatagtgtacatatttatgaggtacagagtgacattctgatgtattttgatacatgtatacaatgtataatgatcaaatcagggtaatcagaatatccatcatctcaaacattgatcatttctttgtgttgggaacactcaaaaacctctcttccagttattcgaaaatatgcaataaattcgtattaaatatagtcacgctgcagtgttatagaacactagaacctagttttcctatctagctgtaattttgtatcccttaaccaacctctatccctgctcccacccacccttcccagcctctaagcaccacgactctgctctctgcttctctgatctcaacttcttcaggtcccacatatgagtgagaacaactgcactgttttcctattctactttttccttccagttaatatcacattatgggcatttttccttgtcactggaaactttgtcaacttcatttttaatcagcagcattaataattcagtatttcagtgtgctttatttttcttcaagatgcaaagctccctgggtcctgatgggctgtgcaaatctttcttcatgactctttctatgaccttcctcatagctctttcttacccaacacccatatggtcaggggaagccagaccgaactggcttagatcgaatcgggtcccaggccttgaagtgacagaggcacaagggaacagcttcaagccaagctttgccattcacatcacttgtgagtcttctcagctcaaaaaggaggccacagaaacaaatccctcagcacatttttacaaggcttaagtcagaagctcccttccttaagccaagatgtacctggaacaacgggaaatttaagaggaggagtgggaggaggaggaagtggcagccccgcccgactcagggatggaagggaaggttctagtagggtgactgtaaatgctcaagaggcaattaggtctcgaatcgtactggtgactagttgaagggccttgaccgacaggagaaggagggagatggatcagggtgagtactgggaatcgacttaccttttcggaggtgctaagtcaagagaggggagaagtttggagagggtagaggatgtagggaagcgacaggagagcctggattgatgattggtagttcattgtgcaatacggctccttcttcttacttctccatctgcatttggaccttggggcacaaatcct

SEQ ID NO: 13732 - DNA, 2300 bp, Homo sapien
tgtagtcaaattgatcacagtcactccaggaaatgaggaggaatgaatccagatccctccaaccagtaacagctttccattgagcacatgagctgtgtgggagtaccttggggtaatgggaggctggatgtctactgactcccagaggaatccacaagagattggtctcagaaagagcacagagttcaatggctcctcagaagccccgagacctccagcaataagggctcccccttgccaagtgcaggcactgtgagaatgccgggcttcaggtacttctccctccactgggatcctgacccaagccattgtccctacatggaggaaatgccagtcacttagtacaggttccaccacgcttcgacccccatacacaaacaaatattcctgattctgacaggacacttctgttgttgaatgccgccaacaacacaaagtggaatcatcctttcggccagcctttgttattgtcactttcaggtcctcagtgttattatcctcactcttaaaaaaatgaagctggagaacccccaaggctggacttactggggacagtctccctcccagaaccagaacccgactctctgagagtcttgtcatggtgtgataaaggcgtccatcccactgaactccagtcccacaactgcctatttggctgcctttccattcagagtcacaatctcttgagagcaagtgaaactggctcactcggcagtgccgcccctcctgctctccaaatcctcctgcactgagaataacgtctgggctcaagaagacagaggcgtggccatatctcttcaggtttgggacctggccctcgctactgactacgctggcagggaatacccctgaaggcgaagcaggatttacgcgaggaaatgcctctgaggatggaaacactagggtgtgggagagggtgtctcccctagaagctgccagaatgaaataatgggcgcacttcagatgccactcctcaaattcgtcaaagggttcaatattttccacccgccggcgttcttctgcgggaagaaagcagtgatagaattcattcatgtccacggcaccgcaggcggtccagccagcttgaaggaagcggcgccgctgcgcctccacgtcaggaaaacgctccaggccatgcaggggggagtttagctgccgaaaatgttgcagcatgaactggccaaaggcgtcttgaggcctcatctgctcatagaccacgaaaagggcattaggaaaacgctgggctgcccaggcgatgagggccgcggcactctccggctcgaggtaggtcagcaccgcctcggccaggagcagagtgggtgaggctgcgtcgagccccgcggcgcccagggcctcctccactcgctggagctgccgcaagtccagacccaggatgcagtagtctgcgctctcaaagcacagcgcggacgcgggctcccccctctcgaaaggcccggttaacgcgcacagctctggcgtctctccaatcctttctgctttgcgccgcgccacgtccggaaaatccacctcccagactgcagcccgggccaggcggcccgcggtttttaagcgaaaatagagcgagtcgaagccagcgccgagagacaagatctgcgcgcgaagcgcggcctggggcgcgccaatctgctccaaaaaagcgcgcacgcagtgcctcacggcgcgtgcgcggacgtagtagcctcggtgaatgagcggtgcgcggcgcgccgcgcccggaaccagcaacgcggcaaaggggtcctgcacgtacccgcgcgcggccagggaacgcttgctgagggcgctgctgtcgttggtgttctgtaccgcgcctgcccgacgctcacggctccgggggcccatggccagaagagactcaggaatggcagtctgtcacggttgtgagccgccccttggttagcacacacctcacggacctcggtagggggaaaaaaaccacccatgctcctggacttccccttccgccggcacttgtgcgtcacttccgggaagagcgcatctcgccaaccagaattgaggagggtgtagccagtgctaagttcgcttgcggctgacctttctttggaatgtcgtgagttccatttgtcccagaatacggtccgctaccgctgtgacatgagtgttagggaaggcgggttgtcacgtttctacaagccttccagtcaaaagggaaaccttgcctaagtccttgtagttgagaaatctctaagaggtgagtctgtggggactgacgacttggcttccttggaccgccaaggaagggtctggtaggagccaag

SEQ ID NO: 13733 - DNA, 2300 bp, Homo sapien
gggaacttttttcatgctcccacctactcccccaaaagggaactcagaataaaaaaaaatttgttactgtttattatgcacttaccatgagccaggcactgtggtgtcttagatagttattttgtttaaatcctcacaacaacccctgagatattattatccccattttatataagaataaactgagatttaaacaatggcccctcctcccccggcctaaatcataaggcatcgaaatcagaaattttactccattctctttcttctttaattacttttcttgatctggtctttgcaaaacaagtagtatttttgacataacacctacattttaggaacctgtcattaaataaatttgtttctatggtgctacgtatttttcaaagtccttcaactttttttttttttctatttgcccctcaatcaaccctgagatacctcacgaagcagtacttaatctcattttagaggtgaggatccactgacccagcaggcataggtgagcccttcttctaatcccttcagaagcaattctcaaactgctcaaatgttccatcagatctgaatgccttacactaaactgacaactctgtcaccaactttacagagaaaacagaagccatcaggtgcaaattccttctttttctctctgccctacctcacacctgagcttatgattatccataatcttttttttaccccatcaggagtcacagataaaggattcattctcctatccccacaactaatacgtgcccaggatcccatttctatctattccaagttactctaccagtgagttgtcttctcatttttctgttccttcaacctctccctctccactagctggtttccctcacaggaccaacacgcatgtgcagtatttgcttccacctgaaaacaaaacaaaagactcttttatcccacaatattctttagccactgccctgacccttttttccttctgagttaagctcctcgaaagtataataatttagactggatacctcctttaactcacctcctattcactgaaacatggattctgcccttattgctccacagaaactgctctccctaaggccattaatgagcttttaaacaccaaatctaaatgtcacttttcaattaccgaatctttatcctgatccaaaccttttctttcttatttcattttgttccacaagaaaacattggaaaatacgaaactttttcttgactccagtatccaaatctgctggactccaaaactcacactcttaaccattatgcagtaccacctgtagttaaccataaagttatctgatttccttttctatttcagccagtcagtcaccaaatcccagtgaacaaatgataaatttcctaaatgtctctggaagtggtttcctatggatgactcccagacacccaatttagaaactttatgattattctgaagtctaacctggatttactccttaaaaacaaagctcagaacatatcacagggaacaatcacctctcttcagtgactcccctttctggggacatattcaacactactttaaaatccacagaattctccaaggcggtgtgatgagaaagagaggctgagtggtttattcaccgtcagtctaacatagggctgggaatacaagggaatcaacagtctactatctgtggggaaacgtcttcttgttaggtgtctataaattatttgtaaaggtcggtttcttcagtttgcaccctggccttagtgacttgttttcaagttttaaatggggttctcttttgcaactgtgagagcattaaataaatcagcaactattagcacccaaggaagctaactaatccttgcctactgaaggtccgtggtgccgacccttcttggctcctaccagacccttccttggcggtccaaggaagccaagtcgtcagtccccacagactcacctcttagagatttctcaactacaaggacttaggcaaggtttcccttttgactggaaggcttgtagaaacgtgacaacccgccttccctaacactcatgtcacagcggtagcggaccgtattctgggacaaatggaactcacgacattccaaagaaaggtcagccgcaagcgaacttagcactggctacaccctcctcaattctggttggcgagatgcgctcttcccggaagtgacgcacaagtgccggcggaaggggaagtccaggagcatgggtggtttttttccccctaccgaggtccgtgaggtgtgtgctaaccaaggggcggctcacaaccgtgacagactgccattcctgagtctcttct

SEQ ID NO: 13734 - DNA, 2300 bp, Homo sapien
attctgtgcatttgacctagtgctactaggtggttcagagggtgacaatggggtgccccatatgataaatgaaacgtctatgaggataaactaagagattgtaaatgtagaactgagtgtgagggagatcacttaaaactctagtcaaggtgacctgggtataatctcaaagagaggattggagtgtggctgaaaaaatgatacttgttattacatgtaccagacattattcttaggactactttcagaagtaggtatttttattgttccctttttgtagatgaaaaaataggcttaaagaggttaagtgtaacttgcttaagatcacacacacagagtaagtggcagtactatctggttgcagagctcatgctctttcccattcaagcttatacagtcttagagaggtttgagtaagtaggaacttaactaattgtgatgtactttgtctggaaaaagaatttgaatagatattctcagtccagcgcataggagaggaaagcccaaagagctgttctcagtacctaccgcactacctgctgcacatcacagaaagggctaaatctggcaaacacagatgtagaccccagggaaatgttcttggatgtgggttagggatggttctgtaggcttcactgtggcctagataaatcttcctccctttgttcttgctccatacttgttagtttttcattgttcatttggttttacaggtacctagccactcagaaagagggagccttggatagtagtcactgaaaaggactactatttcaaaccctcacttcaaccgtattcctcgttgtcaaacagctttctgcattagtctcatgtgagctggggtagctgagtgtgggtctgttctgttctggggcagtgacaagatccagattcctcaacctattaatacaaaggtgaggccacaatttcatggtgtcagtgacagcaagagggagttcctggagtagcagtgccgtggggccaatgccattcatgatggcatggaggctgcagtatcatgctccttggaggaggcagcagtggtatcttgcttggtcctggagtttcatgtgatttagaatgcagatgtattatctttggctgtgtattctcagaatctgggtctttagacctcttgatgaaactgagctacccattccacttacattataataagttcatttttgtctttagtggaaaaagaaaaaagaagaggcctacaacttggattgctatgaattcaccaaggtagtgccatactgttaggcactgtatgtatgaacagccagcccctcttgctttgccaggacactgcactcacatgcttgtgtgtgtgtagtcaaagcagattaagattaggataccaactgtaaggactaattacggcagtttgtcacagcttcgccaacctagcctttttttcttctagattttttaggattgaaggcagaaaggaaaaacatccttcaggaaatccttcaggaacttttggattattgagatttgcactaaattggatacagttttactcatatttatcacctactttctttgccctaagtacttctcgagaaaatttaaccctgccagaatttattgaaaaatgtaacttattcctaaataacttgaataaaaaccttaagccatgacttcaaatagcacatcagtaatacctaatcattttagctgtttatttctgtatgtgcatttcctagcagtctacacatacagatggttccagctggttttagttttgcaccatttctctattttatcaatctgctattataaatactaggaaataaatgtttaaaagggggaaaagaagcaaagggtgtagctgatgtgcagattgggattgaatgtgggaatgaggggtgatgggagtgattggaaatattgcagccctgcatagtctccatcagggatgtgacaaagtggataatctctaccacgtgagaaacttccaacattacttgcaaatcagatttaatgaataaaataaagctgtagcacttggcacattcattgggacccttacccaaacattatcaatattgtgtacgttatctttattatcaggtcacaaaagatgtcataaaagaatttgcagatgacggcgtcaagtacctggaactaaggagcacacccagaagagaaaatgctactggtagaatttatacttctcagcaaatgtactgtccttttcctatgtgctttgatcactcacatgtttgtgagtgggaatatgaagcactaacttttatactattgtgttgttctgtatttcattgaacctt

SEQ ID NO: 13735 - DNA, 2300 bp, Homo sapien
atcttcaaattaaactatatttgttaccttaagctttcccccagaagatccattctttttttttttttttttttttttttttttttttgagacggagtctcgctctgtcgcccaggctggagtgcagtggcgggatctcggctcactgcaagctccgcctcccgggttcacgccattctcctgcctcagcctcccaagtagctgggactacaggcgcccgccactacgcccggctaatttttttgtatttttagtagagacggggtttcaccgttttagccgggatggtctcgatctcttgacctcgtgatccgcccgcctcggcctcccaaagtgctgggattacaggcgtgagccaccgcgcccggccaagatccattctttaaacctaagtttctgttgctctctattggaacctttaagttctccaaatatcatgttaattgtggggaactaaattatgtttattattttcctgaaagtctgttagaagctaagtaagaattttacttcagaatcttgcaatgtcttgtatcagtatagcccaacctgttatatttttttgttcacctggtaacttccaggactctgatagctttccccaatgcctttatacctagttgattattcttgtacttgatttttgtagaacttgtttttcttctttgtagtctattgatctccatgttgtatgcttttttctgttaccatttcacttaaaatttgttgaggttgttttgaattctgatcttatcatccaagacaatagccttctcagccagtttggtaatggtctgtttagtcacccagatgaaatccctgaatctcacacacagacttgcagagttcatcagtttttgaacacctgtcaaggtgctcaacatcttgcagggtactctgcaataagaaaatgtgcctatcctcaaagaacttaaaaacatgattgagaacactatagctaactcttaagtatgtgccgaactgaactgaactgaaacagtgccagacaatgacttgcccaattgtgtgagtaccgtatgggtttgtcagagtgggagatgagggagggctgacggtaaggcttcttgagggcactggcaaatacagcctcttgaaggatgggctaaaattggataggagggaattaaaagtaaaggcacagagtggtgaacaacagtgtgctgtgttctgaagggaagagtctgacaggaatgggtatggtaggcactaaggttaaggttcaccagggtagcatgtgcactggcaagcaagagcctgcggttaggtagaacagtgactgctgcaattatctgggtgtgagaggataagtagtctggacttggatggtggcagtaggaatagagaggaaggactactaaggtgaacacctttagaacctggtgactgactgtgaaggaaacggataaggtaaagacaatcttctctcgcttcccccttgaaatcacgccgagtttaattctgtagccccaagtgaagaacaattattcccagcagtactaggacctgcctacaaataggagagcttggaatagaattatctgctctgaacacacaacagaatcctttcctctcttgtcaccctgctctggaaaataaaacatttctcatcttttgaggtttcctgtattttccccacctttttcagcccactgaactttctgaaaacatttccctagacactttgtttataatcctcttggatgaaaaaggcaggactgaatttcaagatttttgtgataatcagtccaaactatgacaacttttgtttgtttccctgcaagcaggattgccatttcctaaatccggtgtggtctccaggttggagcaaggagagccatggatcccagatctgctgggctctaaggagaaagaacttccaagtggcagccacataggagacagacgagtgcatgctgatctgttaccatccaagaaagatagaagaagctgggtggaacaggatcactggagctttgaagatgagaaggtggcaggtgtgcactggggctatgaagagaccagaacgctcctcgcaattctcagccagactgagttttatgaggctctcagaaactgccataggaacagccaagtgtatggggctgtggctgagcggctcagggaatatggcttcctccggaccctggaacagtgtcggaccaagttcaaaggtctccagaagagctatcggaaagtcaagagcggccacccacctgagacctgccccttctttgaagagatggaagccctgatgagtgctcaggtcattgccctgccca

SEQ ID NO: 13736 - DNA, 2300 bp, Homo sapien
tttgtgccgaatcaacccaccgagacaatcgctgcggcggagcggacgggaagctgggaaggggtcgcgggggagtcccggaagttcggcagctcaacggggtccaccagctactcccgcccgggctctgcggagactgagtcgcggtcgctgccctcgcgcatgcgccctcggtgccccgagccgcccgctcggacttccggtttgggagctgtacttgggaggctggagagccggggccggggccggggccggggccggggtcagggtcggaccccgagtgggtgaggctggcccggaggcaaggatgcgagggggttgaggggcagctcgagagggagacgctcccaggggtgggctggagggcgccctcagggcgccttagccgggtcagaggcctctggagggaccgcacgacggctccgggttacccggccggagggagcggagacaaaagaggccagaatcccgcagccgctgctccttgggctgagagctctgcgtccgcgaaccggcagcacctggagcctctggccgacacccgagcccgtcctcaggaagcccgttactactgctcctcggattccgtctctcctgcccaatgtgactctccccaagcccccatggtcctcgctttggagccaaaaccagcttctctccttgcgcgaggttttccgacaggtagctccctaatccttgctgagcggctactactacgcggggaaaacaaagacccgagattctggacgtgatttttgcctggggtgggctttgggagttgtgcagcccgagggggcggggcggacgcagaaggcctcgggaaggactgcggagatactgggggagatcagctgcgaccagctggacagaggctttttgttgccttcaagcaggatggtgacttgtctttagatcctctcgaactccagctctcctatatggttcggactcactgtgcaacattggccagggaagttaaatgggatcggatttggaggaggtgggagaggggcagacagtacttttattctctgctgcttcctggggctgccctggaagtcaaccagaaaagcagtttttgcaaagtctatttactgaagattgtgctaccttagaaggccactcggagcacatggaaaggcaggccagctctggcaagactttagacatatgaatgtattccttctgatagtgccatctttctctgccctaggaagaaacacctcttacagtcatctgcaggggattctccaaggacatgggaagatagatgtaagccctggaacccagactcctaagcgaagggaagctgcattctgctattaatgatggccaaatcagctctaagagagaatggcactaactctgagaccttccgacagcgtttcaggagattccattaccaggaggtggctgggccgcgggaggctttcagccaactctgggaactttgctgtcggtggctaaggccggaggtgcgcaccaaggagcagattgtagaactgttggtgctagagcagttcctgaccgtcttacctggggagatccagaattgggtacaggaacaatgtccagaaaatggagaggaggcagtgactctcgtggaagatttagaaagagagcctggaagacctagatcttcggtgagaagggagggggaattcaaattcaaaagtgtgatactgggtggagggctaaattaagatatagacaggcttaaagagggacacagtctcccttggtgaggcttatacttctggtctggtataggtaactttttcagatagtgcttgtctggagatgcttcctgggtgtaccttcacctaccctgtcataatgagtttttcctatagtttcttaatagggaagaaaggggatttttttttttcagcctgaaggtgggtttactattttgatcgtttccttctggagtttcaactgctttaagctaatggcaatggaataagacccttgttcgcgttaacctccctcacccctacaaccctggccatggctctgaaagatgatctcttttggggtattaaatactctcctctgggaatgcccctcattatgatcttgcagtgacaattaacgggggttgtttctaggtcacagtctctgtgaaggggcaggaagtgcgcttggagaagatgacacccccgaaatcatcacaagagttattaagtgttcggcaggagtcagtggaaccccagcccaggggtgtacccaagaaagagagggcaagaagcccagacctgggaccacaggagcagatgaacccaaaggagaagctcaaa

SEQ ID NO: 13737 - DNA, 2300 bp, Homo sapien
ctttcttgggtacacccctgggctggggttccactgactcctgccgaacacttaataactcttgtgatgatttcgggggtgtcatcttctccaagcgcacttcctgccccttcacagagactgtgacctagaaacaacccccgttaattgtcactgcaagatcataatgaggggcattcccagaggagagtatttaataccccaaaagagatcatctttcagagccatggccagggttgtaggggtgagggaggttaacgcgaacaagggtcttattccattgccattagcttaaagcagttgaaactccagaaggaaacgatcaaaatagtaaacccaccttcaggctgaaaaaaaaaaatcccctttcttccctattaagaaactataggaaaaactcattatgacagggtaggtgaaggtacacccaggaagcatctccagacaagcactatctgaaaaagttacctataccagaccagaagtataagcctcaccaagggagactgtgtccctctttaagcctgtctatatcttaatttagccctccacccagtatcacacttttgaatttgaattccccctcccttctcaccgaagatctaggtcttccaggctctctttctaaatcttccacgagagtcactgcctcctctccattttctggacattgttcctgtacccaattctggatctccccaggtaagacggtcaggaactgctctagcaccaacagttctacaatctgctccttggtgcgcacctccggccttagccaccgacagcaaagttcccagagttggctgaaagcctcccgcggcccagccacctcctggtaatggaatctcctgaaacgctgtcggaaggtctcagagttagtgccattctctcttagagctgatttggccatcattaatagcagaatgcagcttcccttcgcttaggagtctgggttccagggcttacatctatcttcccatgtccttggagaatcccctgcagatgactgtaagaggtgtttcttcctagggcagagaaagatggcactatcagaaggaatacattcatatgtctaaagtcttgccagagctggcctgcctttccatgtgctccgagtggccttctaaggtagcacaatcttcagtaaatagactttgcaaaaactgcttttctggttgacttccagggcagccccaggaagcagcagagaataaaagtactgtctgcccctctcccacctcctccaaatccgatcccatttaacttccctggccaatgttgcacagtgagtccgaaccatataggagagctggagttcgagaggatctaaagacaagtcaccatcctgcttgaaggcaacaaaaagcctctgtccagctggtcgcagctgatctcccccagtatctccgcagtccttcccgaggccttctgcgtccgccccgccccctcgggctgcacaactcccaaagcccaccccaggcaaaaatcacgtccagaatctcgggtctttgttttccccgcgtagtagtagccgctcagcaaggattagggagctacctgtcggaaaacctcgcgcaaggagagaagctggttttggctccaaagcgaggaccatgggggcttggggagagtcacattgggcaggagagacggaatccgaggagcagtagtaacgggcttcctgaggacgggctcgggtgtcggccagaggctccaggtgctgccggttcgcggacgcagagctctcagcccaaggagcagcggctgcgggattctggcctcttttgtctccgctccctccggccgggtaacccggagccgtcgtgcggtccctccagaggcctctgacccggctaaggcgccctgagggcgccctccagcccacccctgggagcgtctccctctcgagctgcccctcaaccccctcgcatccttgcctccgggccagcctcacccactcggggtccgaccctgaccccggccccggccccggccccggccccggctctccagcctcccaagtacagctcccaaaccggaagtccgagcgggcggctcggggcaccgagggcgcatgcgcgagggcagcgaccgcgactcagtctccgcagagcccgggcgggagtagctggtggaccccgttgagctgccgaacttccgggactcccccgcgaccccttcccagcttcccgtccgctccgccgcagcgattgtctcggtgggttgattcggcacaaaccgcccgacccaggggccggtgcgcgtgtggaaggggaagcactcccctcgtggtcgcctgg

SEQ ID NO: 13738 - DNA, 2300 bp, Homo sapien
attattgagagcattagataacattactggaagcagaagcaggtaaaagtagttcaaatactgaagccagacagacctggcttcaaaactaagctctgttaattactagctatgaccccgatagttatttaactattctaaacctagcttaatctgtaaaatggataaggtggttgtgaggattaaataagataatgcatacggaacatcatacattcctggttacacaaaggccccctaccaagtgctttacctagtgcagaaattttctggtaaaggagtaatgagggaaacaccacacgctctcgatttcatttatttccttcaacaaactttactgagcgcttaccatgtgtttgggagctgtgtatttggcccagtacttcaaaactcaaacaatgcacgtgtgaaaataaataggagaaagtgcctcccacacttctatatcattccccagcaactgtcagacacctggacctcaggccctttcctcgccccgccacaggtggggctcttcgaggtctgccctccgttttctagcctaggcccggcctctctaggtgtcgcatcagccttgaccctaaggggctgccctccagtcacctgtccagggatacgcccccagccctggaagccccgctcgctaggtccctcagcctactcccccaggcgctggctcaggtcccccctcctgcgctccctggttcccgcgctctgcgccggacagtacctgcaggccactccgcttgttccaggtgaaaatggacccagggtacccgctcagagccaagagcagttcgtggatcattcccacggcggacctcgagtccctggttatgtcaccccctcctccagcgcacctccaggcgaccacgaggggagtgcttccccttccacacgcgcaccggcccctgggtcgggcggtttgtgccgaatcaacccaccgagacaatcgctgcggcggagcggacgggaagctgggaaggggtcgcgggggagtcccggaagttcggcagctcaacggggtccaccagctactcccgcccgggctctgcggagactgagtcgcggtcgctgccctcgcgcatgcgccctcggtgccccgagccgcccgctcggacttccggtttgggagctgtacttgggaggctggagagccggggccggggccggggccggggccggggtcagggtcggaccccgagtgggtgaggctggcccggaggcaaggatgcgagggggttgaggggcagctcgagagggagacgctcccaggggtgggctggagggcgccctcagggcgccttagccgggtcagaggcctctggagggaccgcacgacggctccgggttacccggccggagggagcggagacaaaagaggccagaatcccgcagccgctgctccttgggctgagagctctgcgtccgcgaaccggcagcacctggagcctctggccgacacccgagcccgtcctcaggaagcccgttactactgctcctcggattccgtctctcctgcccaatgtgactctccccaagcccccatggtcctcgctttggagccaaaaccagcttctctccttgcgcgaggttttccgacaggtagctccctaatccttgctgagcggctactactacgcggggaaaacaaagacccgagattctggacgtgatttttgcctggggtgggctttgggagttgtgcagcccgagggggcggggcggacgcagaaggcctcgggaaggactgcggagatactgggggagatcagctgcgaccagctggacagaggctttttgttgccttcaagcaggatggtgacttgtctttagatcctctcgaactccagctctcctatatggttcggactcactgtgcaacattggccagggaagttaaatgggatcggatttggaggaggtgggagaggggcagacagtacttttattctctgctgcttcctggggctgccctggaagtcaaccagaaaagcagtttttgcaaagtctatttactgaagattgtgctaccttagaaggccactcggagcacatggaaaggcaggccagctctggcaagactttagacatatgaatgtattccttctgatagtgccatctttctctgccctaggaagaaacacctcttacagtcatctgcaggggattctccaaggacatgggaagatagatgtaagccctggaacccagactcctaagcgaagggaagctgcattctgctattaatgatggccaaatcagctctaagagagaatggcactaactctgagaccttc

SEQ ID NO: 13739 - DNA, 2300 bp, Homo sapien
ctctacaaaaaaaaaatttttaattagctgggcatggtgacacatgcctgtagtcctagctactctggtggctgaggtgggagaattggttgaacctaggggttcaaggttacagtgagctatgaacccaccactgtattccagtctgggtgacagagtgaaaccttgtctctaaaaaaaaaaattaaatataaaattcccatacaatctagcagttctacttcagggtatatcccaaaagaagtgaaagcaggaacccaacagatatttgtacacccgtgttcaccaagcattattcacaatcgctgagaggtggaagcaagtgtcagtgcagggacgaataggtaattgagatgtggtatatacacacaagggaatattgttcagccttaaaaaggaaggaaattctggcatgtgctacaacatggatgagctgaaataagccagtcacaaaaggacaaataatgattccactttttttgagacagagtctcgctctgttgcccaggctggagggcagtggtgcaatctcagctcgctgcaaccgccgcctcccgggtttaagcagttctcatgcctcagcctcccaagtagctggcattacaggcgcccaccaccacgcctggctaattttcgtatttttagtagagacagggtttcatcatgttggccaggctggtcttgaactcctgacctcaggtgatccacctgcctcggcctcccgaaatgctgggattacaggcgtgagcaattgtacccgacctgagtgattccacttatatgaggtagctagagtagtcaaagtcagaggcagtagagtggtgtttggcaggggctggatacggagtttcatttggggcaaacaaaaaagttctggagatggatggtggtgctggttgcacaacagtgtgaatgttcttcataccactgaactatatacttaaaatagctaaaatggtagattttattatacgtattttaccacagtatttttaaaaagttggttgaaggaatatattttcccactacttttttctacctgaactgctgtgaaacctttgtatatagcatattaggctatcatttggctttcatttaaattaaaaatacaaatgtaaatatggacactaaatatatatggccagttataaggtgcatttacagataataggtatgcttaattttagatttttactggaatgaaaacaatgaaaacttctatagggaatttgtaaatcctaagaatatgtctgagaaacccatggagtctgcagacccccatttgagcaatattgctaaagagactttgttgcaaccaggtcaaaacccccatatccttagagaccatccctagaagattgcttaagaagcaggtaatagcggctgcttctggggtggttgacttatttttaatgtacaccattttatattgtttaaattatttagcatgtgttacctattttaagaagcaaataattgggtcagggatagggaacccctttgaagtgctttggaaatacattgttatccagaacttaacacctttaagtggacatcttgagaaagaaaacgataaatgtgtagtatgaagcgtttgaagcacctgaaagttggggcagcgactggcggtgttttcggcagtgttcctcttcctgcaggtatcgcaggacttccctttcctccaccccagtgagaccagtgtcctgaatcgactctgccggctcggcacagactatattcgcttcactgagttcattgaacagtacacgggccatgtgcaacagcaggtgggtcctgttctctgtgggtgtacacctctagagggcaggagctatgtcaagctttcacctctagagggcaggagctatgtcaagctttcagtgaatttatcggtaattcatgtgaaataagttatggatttctcatcactagaaatattcaagtgaaggcaaggcctctaattggtttgtttgtataacttttaaaagaaacaagcctgataatgtctttctcaggtttcagggcctgagctgagaagttggcttctgtttgtttgatttcaggatcaccatccatctcaacagggccaaggtgggttacatggaatctacctgcgggccttctgcacagggctggattctgttttgcagccttatcgccaagcactgcttgatttggaacaagaggtaagaaggaggagatataggaaacacctctgggacagtagattagggcatgttcttgaatctgaaatgccctttgataagatcaggtagttaagagtgagcagttgcctgcat

SEQ ID NO: 13740 - DNA, 2300 bp, Homo sapien
caggtcaaaacccccatatccttagagaccatccctagaagattgcttaagaagcaggtaatagcggctgcttctggggtggttgacttatttttaatgtacaccattttatattgtttaaattatttagcatgtgttacctattttaagaagcaaataattgggtcagggatagggaacccctttgaagtgctttggaaatacattgttatccagaacttaacacctttaagtggacatcttgagaaagaaaacgataaatgtgtagtatgaagcgtttgaagcacctgaaagttggggcagcgactggcggtgttttcggcagtgttcctcttcctgcaggtatcgcaggacttccctttcctccaccccagtgagaccagtgtcctgaatcgactctgccggctcggcacagactatattcgcttcactgagttcattgaacagtacacgggccatgtgcaacagcaggtgggtcctgttctctgtgggtgtacacctctagagggcaggagctatgtcaagctttcacctctagagggcaggagctatgtcaagctttcagtgaatttatcggtaattcatgtgaaataagttatggatttctcatcactagaaatattcaagtgaaggcaaggcctctaattggtttgtttgtataacttttaaaagaaacaagcctgataatgtctttctcaggtttcagggcctgagctgagaagttggcttctgtttgtttgatttcaggatcaccatccatctcaacagggccaaggtgggttacatggaatctacctgcgggccttctgcacagggctggattctgttttgcagccttatcgccaagcactgcttgatttggaacaagaggtaagaaggaggagatataggaaacacctctgggacagtagattagggcatgttcttgaatctgaaatgccctttgataagatcaggtagttaagagtgagcagttgcctgcatggctggaaggtacagtgttctctcagtgattgcccaacctgtgatcagagtggcttacagatcatggcaaagactctttagtgagtttataagagccctggcttggtttctttatggcccgaaaatcaggattaataacctgattaaattatcagttctcgatagcctaaaattaacacttaagcccatcatgagattctcttctcattttcatagatcaaatagatttgagatattttgtgtggagctctaatcacaaagttttttattgcagttcctgggtgatccccatctctccatatcacatgtcaactacttcctagaccaggtatgctgcccaaataaccaaatgccttgcaatctgttgatagtgttagaataatctaatttatggtactgtttttgagaactttttttcttctggattcagagcctaacattttatattttgtgcattttgtatgttttactagatcaaaactgtttaaagatttccaaatatagttaaaacttaatgtctgatattaacgctaatgttactgctctatatggacatcagtattaacaagtatgccagcctcagaaatagaaactgcttcccgactgggcatggtggtacacacctctaatcccagcactttgggaggccgaggtggttggatcacttgaggtcaggtgttggagaccagcctggccaaaatggtgaaaccctgtctctactaaacatacaaaaattagtcggttgtggtggcgtgcacctgtagtcccagctacttgggaggctaacgttctgaatccaggggtggaggttgcagtgagctgggatcctaccactatactccagcctgggtgacagagtgagaccctgtctcaaaaaaaaaaaaaaaaagaaaaaagaaaaaaaagaaactgcctctctctgccatcctcttcctatctgcagcgaacctccacatcaaattgccttaggatgctggatcttgactgttctgtggtattgccattttatcttaagttgaactatttagaaacaaaagcatttcccaagttgattttttttcccttacatttgattacatacccttctaattattctctactttgcagttccagcttctttttccctctgtgatggttgtagtagaacaaattaaaagtcaaaaggtgagaactttccttattccttttgctttgctaagcactgagggaatattactaattaattttgctttacattatttttcgaagaccctagtttttagtagtttttatttattcattcatttaacaatatctgcttggttatcatgttaagt

SEQ ID NO: 13741 - DNA, 2300 bp, Homo sapien
ggcagaggttgcagcaagctgagatggtgccactgcattccagcctggacaatagagtaagactccgtctcaaaataaaataaaatagagatacacacacacacacacacacacacacacacacacacacacacacatatttttttttgtttgaattctgtgtttcattgatatctgcctttttctttattagtttcttccttcgtgtttttttttttactctttcccaggttgaaagcttgactcctttatttttaacctgtgttttctgagaaatatatataaaactttacatattgttttgactgtgtctcacaagtttttggcatgtagtgttttcattatattctatataattctaattaattttgtttatgattttttaaccaaggaatttgttttaattttattgcattatagttggagaacatagtctgaattatattgtttctttggaatctattgcaggtttctttatggactaatacaggtctggtttttgtttgtttgtttgttttgttttgttttgttttgagacggagttttgctctgtcacccaggctggagtgcagtggcgtgatctcggctcactgcaacctctgcctcccgggttcaagcgattctcctgcctcagcctcctgagtagctggggttacaggcatgtgccactacgcccggctaatttttgtatttttagttgagatggggtttcgccatgttgtgctggctgatcccgaactgctgagctcaagtgatctgcccgcttcggccttccaaagtgctgggattacaggcatgagccactacacctggcctaatatattctttacttagattctattttgttagttactaagatcactatccagcttcctttcaaatcatatttacctgatacactcttccatcctttatctgcaacctttctgtgtgctttcatcccactcttcctaccctgacagtccccaagcagccactgatctgatctactccctgtcactctaggttagtctgcactttctagagttgataaaaatgaaatcatacagtatgcactcttttggaggaggagaccaggcttcttttactcagcataattattttgagatgaacccatgttgcatttatcaatggtttattcctttatattacttactagtattctattgtttataccagtgtgtttatccattcatccttgataaatatttgggtggcttcccaatgtcttttttttttttttttaagacggagtcttgctctgtctccaggttggagtgcagtggcgcggtctctgcttactgcaacctccgtctcccgggttcaagcgattcccctgcctcagcctcccgagcagctgggattacaggcacccgccaccacgcccagccagttttttgtatttttagtagagatggggtttcaccatgttggccaggatggtttcgatctcttttttttttaattttattattattatactttaagttttagggtacatgtgcacaatgtgcaggtttgttacatatgtatacatgtgccatgttggtgtgctgcacccattaactcgttatttagcattaggtatatctcctaatgctatccctccccggtccccccaccctacaacagtccccggtgtgtgatgttccccttcctgtgtccgtgtgttctcattgttcaattcccacctatgagtgagaacatgcggtgtttggttttttgtccttgtgagagtttgctgagaatgatggtttccagtttcatccatgtccctacaaaggacatgaactcaccattttttatggctgcatagtattccatggtgtatatgtgccacatttacgattaacaaaatgtggtttcgatctcttgaccttgtgctctgcccaccttggcctcccaaaatgctgggattccccactgtctttttcatttgcatgcctgtaatgactaatgaggttgaacattttttcatgtgcctctttgcctattttatactgggtttttgttttcttgttgtcgaattttgagagtcctttatgtattctgaatttaagttctttaacagatatgtgacttacaaatattttctcactattttttttttttttttttgagacagagtcttgccctgttgcccaggctggagtgcagtggtgcaatctcggctcactgcaagctctgcctcctgggttcaagtgattcttctgtgtctgcctcccaagtagctgggactacaggcgcctgccaccatgcctggctaatttttgtacttttagtagaaatggggtttcagc

SEQ ID NO: 13742 - DNA, 2300 bp, Homo sapien
aggtttgtgatgtatccacatgacatcactgatgcaggatgttaatcttcatcactggttaaggttgtatttgccagatttcttcacttttttttgaaacagtctcactcactctgtttcccaggctagagtgcagtggcgcaatctaggctcactgcaacctctagcttccgggtacaagtgagtctcctgcctcagtctcctgagtagctaggattacaggtgtgccccaccagacccggctaatttttgtatttttagtggggatggcatttcgccatattggccaggctggtctcaaactcctgagctcaggtgatctacctgccttggcctcccaaaatgctgggtttgcaggcgtgagccactgcaagagagggacaggtggccttctctaaagttagtgtttttccctttccatactctcttcttttttaaagcttagctacctgctttgattggaacccagtaggtgatattgagatatttttgcttagggagaagtttttagtgctgtgtctgtatgactgcacatctaccacttattctctggtttgaagaacagtgcctttttatttttgaagtaggtaatattggtgatagtgagaggtttatgcttgtggttatgcttgttgttattgtttcatgtgctagttctttgaatatattgtctcctttctatggaaataatttgaagatacctatttgtgttgagtttgtcatttaaaaacatctttctgaggactttttgaacatggattggcatataatgggggaaaatggctttctttctatctttttttttttttttgagacacagtttcactctgcctcctagactggagtgcagtgagtggcgtgatcttggctcactgcaacctctgcctcctgggttcaagtgtttctcgtgcctcagcctcccgagtagctgggtttacaggcacgcaccaccacacctggctaatttttttttgtgtttttcgtagagatggggtttcgccacattggccaggctggtctcgaactcccaacctcaacttatctgcctgcctcagcctcccaaagtgctgggattacagacgtgagccaccatgcccagccaaaaaatggatttttttttttttttttttttttttaaaaacagagccttgctctgtcgcccaggctggagtgcaatggcacgatcttggctcactgcaacctccgcctctggtgttcaagtgattctcttgcctcagcctcccaagtagctgggattacaggtgcatgccacaacacctggttaatctttgtatttttagtagagacagggctttgccatcttggtcaggctggtcttgaattcctgacctcaagccatccacccgccccagcctcccaaagtgctgggattacagtagtgagccactgctcccggctggaaaaatggctttctgttggagtccatccaggcttctcttgtatttggaatcctctgagtaattgttgtttgccctttgttcattattaaatgggccacttcaccttctagttctggataacattgttagctatatatgggatcagttgggagtagcacatggattggggtcttttattgtgactcatagtttgtatgtatcaaatgcattcgttcttctttcaggtgtaaagctactcttaggggttcatatttggccttttaaagacggagttctgtaacaagagtgaactgtggcatcaaggtgtggggattctgtgtcccatttcttgaggctgtttgctcatgtcaacactagactacttctagttctagtagctcttcattagtgtgaagtatattgttggccttgggcttctttgtgtttttgagggagtctttgtgacttagtttggggatagagatttaagctaggagatgaacaagtaagggaaaagggagtgattccacaggatagatagagaaccaaggcttgctttctctgtgttattttccttgggtggggtaggctctgggtttcttttagctcttcattcaagcataggctaatgggtgagaagaaattggacccttctgtttataggaatgaaaaaatattcatagtaatgccttgtttttgtattgtatatgtgtgtgggggtgggggggtgtgtatctatagctatagtatgtgtgtgtgttgtaaattgtttattcattgataggaagaagtgttctttttcacaggcttagtaatgggtcctgcccaagatcacacagcttggtggcagcagaattaggcctaggctcagttctcctgaattatagcttagtttccttt

SEQ ID NO: 13743 - DNA, 2300 bp, Homo sapien
cgcctcgtcctcccaaagtgctgggattacaggtgtgagccactgcgcctggcggtttttaggtttttattgttgttgtttcagacagggtctcactctcttgcccaggctggagcacagtgttgcaatcttggctcattgcaacctgtgcctcctagttcaggagatgctctcacctcagcctcctgagtagctgggactacaggcacatgccaccacacccagctaatttttttcgtatattttttagagatgggcttttgccatgttgcccaggctggtctcaaattcctgggctcaagtaatccacctgcctctgcctcccaaagtgctgggattacaggtgtaagccactgcgcccagccattttatgtttcgacaaacacacttgtcaagtaatcaaacagatctgtttatttgtgcctcacttggggaggaagcagaagcaggctggagaagaaaagcaaaaaaatggtaacttttgggggatttttatgggactcaaggtcatgatttactcataacaggacctggttggttgtgccctctcaaatagagcagatgaactcactttgtccagctagtgtagttagtattgctctaacctggtctttaagtattagatttgtttagtcactggtgttctgcagctttaggagtggagtatgaaaagagtcaattataaatgattttaagattaagaagtgagatgcatctctgtgtggtccatttcattttagctccactaataaaacatactggcgaccataattatattccagttatagcagtaatagattctagatttttcaggacagtttcaaggagtcagtccttttgttcccataagtaacgtgtattcagacaacatgctttgaatttggtttggaaaataggatcactgtaatttatagcagcagtgagaagactggtaggaagctccacttcagctttgcctatatcacgtgctgaattgggcatttacagaaatggagaatcatggttgggctgtgccgaaataaatctgagcctggggtagaaagagaaaactgcctcatattgaatgcctactatgtatatgtttggcactgtgctaggtgctttccctattgacagctgctctggctagaattctatcctggatccaactgccacttaaataatatacccccacccctcaacaacaacaacaacaaaacaaacacatatgccacatggggcttagttcattaagactcgtcacagctgccacaccctctttaagaccctggcaccataattaggataatagaatctctgggtttggaagtatctttgaggtcatctagttagaaggggtggcagctgttctctttaccatggagtttgagaatgacagtgctcaattctctcaatgggaggtgcaaaatatgtctggggctgtagtctctgcaggcaatcccataaaagataaggcaacgataaacaagtgtgaagcttgaaatacgtcctaggcggaaaagggcaatgggaagaaatatggcttactggagcccttatacaatgtaaaaacaaacaaatactaaaaacgccctggcagagatgtaatgtcaggcccttggattcagggtagaggcccacaaaagggatcctgattgacacaggttaaccctgtgtcaaagaagaaagagtctcttctgttgggttcaccagctctgaagtacctagccatcctcaagccgcttcttctttgccctgttatgagaaagctgggaaactctctccttttccaggaaagagggtgagggacggggattaaggggcgtgaacgagaaaaagcaggtagaggtactgaaatgtctgagtagtggtaaatgcaatcgtcctggaagcaggggaaggtatttcacgccctctcaaggtcccttcggttcaaggataccgtcattctccggctctactaaaggggagggcctgcaacgtccatgctgccatggaaacgcgccgccgtgttcctttttcttacgtggggcagggcactctgccgcagctacctatcatccacgggatttcttgagtggcgggcggcggcagcgaatggacgatccgatattgtgtgacgtgacgggaaagggggagttcgcggccggtggcggcggtggcgacagcggcgacctagggatcgatctggagggacttggggagcgtgcagagacctctagctcgagcgcgagggacctcccgccgggatgcctggtactgtttggagagaaatgggagtgcagtgggctctgaaggcctggatttcgggtctgaaggga

SEQ ID NO: 13744 - DNA, 2300 bp, Homo sapien
gggtatgcagaaaggggaacacaaatgaagagagtgaatttttgcgtgagagatgattgatcactaagaggagtccctcatttctttagtgcatgtcaacagctatccacaaacaaccctcttctcaaggagaagttatgttctccagtctccctccagtatcaaaccatgtctgcaaagtatatttggtatgtggggacagctatggaattccatgattttcctcctctataaagttcctcccttctcctccactcaaacctcccgcaaggccacttctcccagggagactggacctctgtgaccagctcttacccaaaggactgaaataaaacattagtcctaacctttgacctctgaggagaagtgagctaggtgccgggtaatgaagagtctcaactgttggttcaagtcaaaggatgacaggtcaatgttccaggagagaatccctgtgggagaaaaacaaagaaggttctggataaggttgcaggttgtagggtggtgagactgcaggaacactttcaagttcacagaacaggtaaggagagggagggtatatggatagttgccatgatcagcctcagtgatgtctcaaagaaaggtggctagtaatggtgtctttctcccagtttacagcttttctaggctttgcctgagccagagggagaaggacagagtttagactaaactcggtcattaatgagtctataggtaggaattttcttgtaaggttccccagttgtggtggaagtgacacctaagggcctattcccagatactgagggctaccttccccacatttacagctaagtaggattctaggttcgccttctgtgttcccttccttgtccccagccctccacagcttgcttccacccgcaggtggctccgcagcactgcaccacagccacaggcacagcactggggaaggaggtgaggacttaggagctggtagccacgaaggtcacttagtggttggctactggcattcagagatttgagatttgtacggggcgttcagaaagctccccgtgctggttcagggaccataaagaagatacagcaagatagggacgtggattctccagggatggtgaggactttcaggacacctggtccaaaacactgcggtggagggtgtgaccagaggggccccaggggctgcatagagctccgctgcctcagggagactgcggaacgccatggagtgtgcagtaaggatgggcaagcgagatgttagtagagcgagaggatacggacacatggcatggaagatgcaggtgacaagggcgcagatctcaggaagtgcacactagggatggagatgcagacgtatgcattggtagttgaatgcagaaggcggagaagcacagggtagagatgcctgaagcacagccagaacagtggctcaccttgttcaaggtgggcccgcacggccctcagctgactctctgtaccgatatcgccgatcacaattagcaaagagtgcttctgcaggtcccagcgtgcagccgccaccgcggctccggcctcgcacagcagctccgcggggttctgagccagcggtgcgccgggacttcggagccccagccccggagttgtctccatggcaacgccgtgaggccgcgcaggctcggcctcggtctccatggaaacacccgcggagtgttagtccggcagcttccgctgcaggcagagtgcgcgcggctcttaaaggccggcggcaggtgcagttcattggctgctgcctgtcagggggcgtggcacaggcgccgcaggggcgggccggagctggaagctcgtgctctgcggtctcgccaggctagagggtggtggccgcccccttcctcccaccacgccctccccagtaccagcgggagcttccacttagacttgagcgggggtggggtctctgggggacccattggtggggcgaggcggttgcctcggcgccggaagaagcttctagttaagatgtatccctgataagtactgtctggcaattccgcagcctcgcccgaactgaggggagccatcttgtccctctctgcctccgagtttgtatcgttgcctccatctgtgtctgtgtgtctgtattatcgttgtttggcgtgtttttttttttttttgttttttgtcactgcctgcctgggtcctgcccgaggtctccatcctcggtttccctgtccttgccccgggccctgggagtgctctggaaggctgcgcagtattggaggggacagaatgaccttccggccttgagtccctggtgagttgttattctgaagatagcagttggc

SEQ ID NO: 13745 - DNA, 2300 bp, Homo sapien
cctagatgacctctcagaaatcttccacaaaagggagaaagacttccagtggcatttgtacattgcagatttggaagtctaggaatgaagaagcttttttttcatcttttatacaattcaaacctcacagcattatcggaggatggtactaatattatactcatttcatagtttatgaagtaggctctgagagaggttaagtctcttgtttagcagcatgattagtaaaatggtggatcaagtctcaaatccagggtttcatatcttactttgtagctcagctcaagcctctctttcttctttggcatctcaccatttcattgcagcagagcctaggaatacagcaggtggagagttggttgtggtgggtagctgttcagagggtgaaggctgaaggaaaactccactgtgagttggcaccatgcccagggtgtggcccttgggggtggcagctgagaatatgggtgggctctgtattggtctgggaaatgttattttgttcgtaaactaaatgtctacttaagtttccctcctaacacactccagaaagccctagaaagcagggaggagatagaaggcttgaggtgggaggaaataagaacgatgaagttgcagaagaggggtatttcccttttgtgatgctcagaactcagcctggttttccctgtgtatctctgcagatggccgcttctacccaaacggggttgttgccattgtcgcagatttgcatccccggatctaagcaaggattgctccccttttgtcccctcaacccccaagagtactagtgactcagctcctcctctcctctggctgcaattaaggggggatgggggatgctgagagcacagactattttggcttctctgaccttcaaaagtaactcttggcagcctggggcaagggtggggctagtgtttgggtgtgagtgggtggctgtgattgtgaggaaggccttaggagctggccaaactggggagggtggatgggaagagggcagggaaggactatgtaagagcatgagcatcctcgggttggaaggaagtgctaccactctccagattcttcctttgagtcctagagcgctttactaaatctgagatggaggtagagactaagggaaacaggatcaacattagaaagatccaaataatataatatagaaacagcaaagagacaaggagagagcaagaacccaatcaccctacaaagtcattatagggtttttttaatctaaagagtacttctgttacatttaataattggcctacaaccttgcttgggccggaggccctggtgatccttcttggtccttgttaactccttcactgtaaggcagaaagctccctgtcccttcagggacttgtctcttcatatccaatgactcaagaatcccaagaatcagtgcctgtgtggttactgtgttatgctgcattcccatgaaacttcatgtagctctcagggtccctgtgccccaccccaacaggctagggaccatgtgtccactccggaatttcaaactaccctctaaccctaaaataagacttatttctgccctccttggtttctgtagtgctgaggttcagaagaaggcagcacatctctgcatccccaacctttgtcttaagcagttccccacacctaccccatgcttttgggcccccagcctttgtctcctgctcctccagggactgaaggtcactccctggatccatctgaggagagaggcagcagatggtttctaagagaagggggagagcccacgcagcccatgcctcctatagcctcgctctgtgccctagcatggggctttggtcttttggctgatgccaaaagaatatttcctaactaagcagggttgggagagaaaggtcctatgggccataggacattgcagaggctccttgagctgctagacaatccctcagccccacagagccaagcaaaagcactggagctcagacgtcgtgaaggcaaagaaacagttaagtctccagtgcctcgtcacggaccagcccctcttccccgccctggcgccgccctcctcatcaagcacccccctcccccccccaccgcccgccccactcccaccctaagtgctgcagactcttccctgaagctgccggctgaggccggagctgccgcctccatgagaggcttcctcctacaccccagggtaagaaccgaaccaaagggcttggcatgtgggggtacactgtgatagggaggtgggatgggggtcatggaaagggtgctggtacctaatctggcacatctagaactagcccagtggcagtagg

SEQ ID NO: 13746 - DNA, 2300 bp, Homo sapien
tatgttcttttaaaaaaatgtttaaaactttaaaattgtggtaccattttaaccatttttaagtttacagttcagtagcattacatgtatttacattgttgtgtaacatttctgattggttcttaaatgagttaagtagctaagcacattgctgtgagcccataggattttctgtgttctctgagtaggacttgataaggaacaggaccttgctcctttatttcccaatccattgctcactgtcaaactcaaaaaagctaaggcagctttcctttctgccttgccttcttttgcgagcaagaatgaaacttgtgaggacctaaacagaattgtgcattttcagccacagtcttgattctgcctccacatttctcattgactgttactgtcctacaagcctgagtcagaacccagttttgaggcagcatttctactctaggctcaggctagcatcttgtttagaggaagaagataatgttatctgtgatctctactcatgaaaacattctgtggagattttgagggattttggttcaatctttattctccagtattttccatgtgtattctagagccctcaagaaaagaacttaggtctgttttattttctctggactcttaaaatcaatccctcttagacgactatatgctagagcagtgcccttacctgaaggcctagaactgctagtatgcccagtaacctaagaatgctcactggagtgaaccaacatacagagctgtattgtgagtagtctctgtgtaataaactcacaggaatctgggcaattagtgccgagcctgtcttgcttttcttctctctattcttcatagctggctcccaccagaagtacttccctgctcaactccatgactatcatccagaatcctgtgaaggtctgtgatcaggtatttgccctgatcgaaaacctcacccaccagatccgggaacgaatgcaggaccccaggtctgtaggtgggtatgaatactactatcttcccttcaaggtctcaggtatggatgggtttctcaggcattctggtgtcctctcctaaatgtcagagaccaggcctcctcctccctctggctgtacttcagagttgtcagggtcttttgttggaggtaaaatctttgattcttatctgattcctgcctttcttccagacctgcagctctaccacagtgagacactagagctaatgctacagcgttggagcaagctggagcgtgactttcgacagaagagtgggcgctatgatatcagtaagatccctgacatctatgactgtgtcaagtatgatgtgcagcacaatgggagtctgggacttcaaggcacagcagagttgctccgtctctctaaggcactggctgatgtggtcattccccaggtgtgtcttgtataagggacctagcctggggatgagggtgttgggaaggaaagagagaaaaggtggaaaggaagggtgatttgagactagaggaaagcaactcagagaaggaataggttgagttgctacatttctcagggtccactctggctcttggtaagtacaggaggctaattcaggagacacctggaagagggggaatgtagtggatatgaaagaagccctagacgtgaggtgaagacaggcatgatcttggtcctgggaatatgaggcatgagaaaacaagatttattgaggtatttattcctggcctgtggcccctaggagtacgggatcagtcgggaggagaaactggaaattgctgtgggcttctgtcttccactgttgcggaagatactacttgacctgcagagaacccacgaggatgagtctgtcaacaagctgcatcccctgtgagggagggctgggaggggtgttggatggagggaggggcatgtcagggagccttgggggaatcaaagctgggacagcctggggaaccaagaatagacaagattttgggatggaaaggagagaagtctttgaggtgggaggagggagtttgcagaagggtgggaacagggttaactgactgtgtgagtgatttagctgttatctcaggtactcccgaggcgtgctctccccaggtcgccacgttcgaacgcgtctctatttcaccagtgagagccatgtccactccctgctcagtgtcttccgttatggaggacttcttgatgtaaggatcctccttcttctttagcctgtgaacagctttttcccagcattcttttactcttctcaaatgaaagctttctccattctcattggctccctgctcattctctgactcccatttccttaagcaatggcttacc

SEQ ID NO: 13747 - DNA, 2300 bp, Homo sapien
gatattcttactggtacagttttaggcaggatttttttttttttcactgtagctcctggtgtgagggaccttggcctagactagcactggttctatagtaccaggggacactagagagaacattgagatttcagtttgagagtgggctggagactactgtatggatgcctgtattctcaacctcccaaccacactagacctctttccctgaacaggttttctgaacttgggcatttgtcttctattattattattattattattattattattattattattattatcatcattatttgaggcagggttttgctctcacccaggctggagtgcagtggcacgatcacagctcactgcagccttgacctcttgggcttaaacaaaccttccacctcagtctattgagtagctgggaccacaggcttgtgccactcactatgcctggctaatttttaaaaactttttggccgggtatggcggttcacgcctgtaatcccagcactttgggaggccgaggcaggtggatcatgaggtcaggagttcgagactagcctggaccgcatggtgaaaccccgtctctactaaaaaaaaaaaatacaaaaattggccaggcatggtggggtgtgcctgtggtcccagctactcgggaggctgaggcagaattgcttgaacccgggaggtggaggttgcagtgagctgaggtcatgccactgctctccagcctgggcaagagagcgagactccatctcaagaaaagaaattttttttttttccttttgaaacggtattttttttttttttgagacggagtcttgctcttttgcccaggctggagtgcagtgacatgatctccactcactgcaagctccgcctcccgggttcacaccattttcctgcctcagcctccccagtagctaggactacaggagccggccaccatgcccggctaattttttttgtgtatttttagtagagacggggtttcaccgtgttagccaggatggtctcgatctcctgacctcgtgatcacccgcctcggcgtcccaaagtgctgggattacaggcgtgagccaccgtgcctggccgaaacagggtatttttgtgtcgcccaggctggagtgcagtggtacaatcacgggtcattgcagtcccgacctcttgggcttaaacagtcctcccagcttaacctcccaagtagctgggaccacaggcaacgtgccaccatgcatggctaatttaagaaaaagcttttgtaaaggtcaggtctacctatattgcccaggctggtctcaaactccgaggctcaagcagtcatcctggttcagcctccgaaagtgctgggattacacgcatgaaccactgcacccagccttaaaatttttttgtagagatgaggtcttgctatgttgccctggccggtcttaaacccctaagcccgagcgatcctcttgcctcagcctcccaaaatgctggaattacagggatgaaccatggtatctggctgtgcaactgtcttttaaggtggagtagatgaaggagagagagagcatgggggttttattattttttaaatttttggtttgagagagggtctcactctgtcacccaggctggagtgcaatggcgtgatctcagctcactgcaacgtctgcatcctgggctcaaatgatcctcttgcctcagcctcccaagtagttgggactacaggcatgcaccaccatgcctgcctaatttttgaatgtttttgtagaaactgggttttgacatgttgcctggctggtcttgaactcctggactcaagtgatccaccctcctcagcctcccaaagcgccgagattataggtgtaagccagtgtgcctggccttaatgttctgatataatgcttagaatgtagggtgccctcaataaatattttttgagttaatctttgggaagaatgaagaagaggtttaaggggaaaggcagctgagctctctcattcctctgcctttgaattaaattactgaattcaacactactgtgaggaggtggaaaagggctaggaacattgtgaaatgagtccaaagtttgaaatgtcactctaaccttctcttctggtaggactcaagagtagccttcctcgaggacctgcctttcccatttgctgcctgaagttaatgtttcttgctggccaaatcagggacatgccggcattgtaagggctgattatctgatcctcttactaatttattggttggggtggggtgagcagggaggaaaagggataccttgcttttcttttatggctcttttagcatct

SEQ ID NO: 13748 - DNA, 2300 bp, Homo sapien
cagtagggttgctatttgattgagagggtgttactaaggaataggaagtgggaagagataattaccgaaggagaaataagacagccagaggagtagagaaattacccaagtttagagagtagcttcccaaatgtgaacaataattccactgagaaaacacatgtacttatgcacttttcttatcccttgtgtgccttttacaagcacataatatattaatgctcatttaaaaaattattttgcagcatatggaagtaatcaatatatggtattgttatatggtatttcatttatttaataagaattattgttgtcaatagtatttaatatttttaaagcactttacaattacaaggaacttttatatgtattatttcattgagttgaattggattgttccaatgattactggggacagagtctacattttcatggggatagtaaggggagttaaatacctggaagatgctgtaatagctagtttgaagggctagagtggtggagggggtatgagcctgagcatgaactagggaggcatctattcctcttagaataatctattcaagccattagaatcatttctatgtccattcaggaggccttgtggggtcagtacaatgaggcacgactggaaaagtggcaagacccctaatattgcagagaaggaaaagggaacaactgtcttgaccagggaaacccaagtgaagatgcgaggataataagagcaataacatatacaatacaaaatgctttcatattatcagtacctttaagtgaggtgttttgttgttgttgttttttgagacagggcctcgctctgtcacccaggttggaatgtagtgaggtgatcttggctcactgcaaactccatctcccaggctcaagtgatcctcccgcctcagcctcctaagtagctgggagcacaggcatacgccaccacacctggctagcttttgcatttcttgtagagacagagtttcatcatgttgaccaggctggtcttgaactccttgcactccagcgatctgcccgcctcggccacccaacgtactgggattgtaggcgcgagccactacaattggccttaattaggtttttggggggtttttttgggttctttttttttttttgagaaggagtctggctttctcaccaggctggggtgcagtggcgccatttcggctcactgcagtctccacctcccgggttcaaacgattctcctgcctcagcctcccgagtagctgggattacaggtgcgcaccaccacactcggctaatttctgtatattcagtagagacggggtttcaccatgttggccaggatgatctcgacctcctgacctagtgatccgcctaacttggcctccgaaagtgctgggattacaggcgtgagccaccgagcccagccctaggtttttaatcctatttttatggatgagaaaaataaaggctcagagaaattaagtgagtcgctcaaggctgcacagctattagaggtaaggccaggattcaaatccagctttgtctggagcatagagaaaaagcaggctgtggagataggaatcaatttgtctagagttccaggtccatccactttcttgcctcctctgtaaatgtctctctgttccttcccttaactttcttatctgcttctctccttgtctcttttttgtctccagtctccctatcagtcctctttacatctgttaaaattttcaacctttatttattggatctgtacatatatgagaccctgttttgtctcataagacaaagggaagacctggtttttgctctgaaggaacagcaatggcacaaactctgcctcttcctctttctcagcatgaggcttcccacccaccccgtcgtctcatgaaacgtctctgtctagaccacgcttctggactttggcgacacactaagaaatcaaaggaagggagcatcaagttgcattccctcccagagccactaggggtcacgctcctccgcgcagaagcgccggccaacgcagcctgactctgttaccggtgcgcgcccttcgctgattggtggaaccgcaaagaagtcgcgctttgattgggccgctgtcaggtgtcgctgcctgcaggttcggctgcgcgagcggagggaggcgggtgagtgaaggccgggggcggtgggggagtggctggggctgggggcggtatcggaccgggtgggcgcggtagagtgggcttggtgggttcccagggctggggttcgttccgggtgggctccgctttgggaagaggcccagcggaggggccttagtgtcagcgta

SEQ ID NO: 13749 - DNA, 2300 bp, Homo sapien
gcggatcactaggtcaggaggtcgagatcatcctggccaacatggtgaaaccccgtctctactgaatatacagaaattagccgagtgtggtggtgcgcacctgtaatcccagctactcgggaggctgaggcaggagaatcgtttgaacccgggaggtggagactgcagtgagccgaaatggcgccactgcaccccagcctggtgagaaagccagactccttctcaaaaaaaaaaaaagaacccaaaaaaaccccccaaaaacctaattaaggccaattgtagtggctcgcgcctacaatcccagtacgttgggtggccgaggcgggcagatcgctggagtgcaaggagttcaagaccagcctggtcaacatgatgaaactctgtctctacaagaaatgcaaaagctagccaggtgtggtggcgtatgcctgtgctcccagctacttaggaggctgaggcgggaggatcacttgagcctgggagatggagtttgcagtgagccaagatcacctcactacattccaacctgggtgacagagcgaggccctgtctcaaaaaacaacaacaacaaaacacctcacttaaaggtactgataatatgaaagcattttgtattgtatatgttattgctcttattatcctcgcatcttcacttgggtttccctggtcaagacagttgttcccttttccttctctgcaatattaggggtcttgccacttttccagtcgtgcctcattgtactgaccccacaaggcctcctgaatggacatagaaatgattctaatggcttgaatagattattctaagaggaatagatgcctccctagttcatgctcaggctcataccccctccaccactctagcccttcaaactagctattacagcatcttccaggtatttaactccccttactatccccatgaaaatgtagactctgtccccagtaatcattggaacaatccaattcaactcaatgaaataatacatataaaagttccttgtaattgtaaagtgctttaaaaatattaaatactattgacaacaataattcttattaaataaatgaaataccatataacaataccatatattgattacttccatatgctgcaaaataattttttaaatgagcattaatatattatgtgcttgtaaaaggcacacaagggataagaaaagtgcataagtacatgtgttttctcagtggaattattgttcacatttgggaagctactctctaaacttgggtaatttctctactcctctggctgtcttatttctccttcggtaattatctcttcccacttcctattccttagtaacaccctctcaatcaaatagcaaccctactgctctggaagattatctccctatttatctggataaatacacgctattctaagaaattatatttatttactcatggctacttttcaacctaggtaaagaggccccacaacacaggtaacattttccacactacagctgcataactctgttctctaataattgatgtcttaccagaagaagaagggatggacccaagagagaagtggacacttctaagaatacccacaaatgacaaaggtagaataaaaggacacaaggaaggcctaaggagaatgaagggaatgagagtaatatgggggaattttctatgtaaagggaattctctttcccaaatactctctgttaagatttccaagtatctgtcttgtgggtacaccaggatagcagagggaagggactaatgccacggtgctactccaccttaactgaccctccacgctgaagcccctcatctctatttcaactctagcattcattctccttgctaccaggacaaaggtcaaatcatacctggagctgggaaacaaagccctctcaaatctgaatatgtgtttcacgaggagagagagagcagcagaggggaccacgaggaaggcagagattccctgacgacctcatgcctttgtacaccactcgcctttactctctggattaaacagcattagggagacaagagaggaaacacatgtggtgtctggagacctgtgcctgcctgttccagtcccacacccagtcatctcaccacacccttcacctcactttaccttctcctccagcacaggaactaggaactacggagagagaagccaagggagaggaggaggaggaaactaacgattccctgcccacccccacacccagcaccaccaacaggtgggcaagcttgccgagaaaacgcagagggcatcctgtgagcagcaaacacatctgagcctggaaaagacgcag

SEQ ID NO: 13750 - DNA, 2300 bp, Homo sapien
caatgaaataatacatataaaagttccttgtaattgtaaagtgctttaaaaatattaaatactattgacaacaataattcttattaaataaatgaaataccatataacaataccatatattgattacttccatatgctgcaaaataattttttaaatgagcattaatatattatgtgcttgtaaaaggcacacaagggataagaaaagtgcataagtacatgtgttttctcagtggaattattgttcacatttgggaagctactctctaaacttgggtaatttctctactcctctggctgtcttatttctccttcggtaattatctcttcccacttcctattccttagtaacaccctctcaatcaaatagcaaccctactgctctggaagattatctccctatttatctggataaatacacgctattctaagaaattatatttatttactcatggctacttttcaacctaggtaaagaggccccacaacacaggtaacattttccacactacagctgcataactctgttctctaataattgatgtcttaccagaagaagaagggatggacccaagagagaagtggacacttctaagaatacccacaaatgacaaaggtagaataaaaggacacaaggaaggcctaaggagaatgaagggaatgagagtaatatgggggaattttctatgtaaagggaattctctttcccaaatactctctgttaagatttccaagtatctgtcttgtgggtacaccaggatagcagagggaagggactaatgccacggtgctactccaccttaactgaccctccacgctgaagcccctcatctctatttcaactctagcattcattctccttgctaccaggacaaaggtcaaatcatacctggagctgggaaacaaagccctctcaaatctgaatatgtgtttcacgaggagagagagagcagcagaggggaccacgaggaaggcagagattccctgacgacctcatgcctttgtacaccactcgcctttactctctggattaaacagcattagggagacaagagaggaaacacatgtggtgtctggagacctgtgcctgcctgttccagtcccacacccagtcatctcaccacacccttcacctcactttaccttctcctccagcacaggaactaggaactacggagagagaagccaagggagaggaggaggaggaaactaacgattccctgcccacccccacacccagcaccaccaacaggtgggcaagcttgccgagaaaacgcagagggcatcctgtgagcagcaaacacatctgagcctggaaaagacgcagagaagtaaaagatcaaaggtgaggtaggggacgtggaggaaagtgggagagacaaaaggaaaacaaaaagtgggggatcatgagaagcagaggcaggaaataacagggcttcagacttgggtgcagaatggaggtggaggacacagcacagatggcataagaattaatatttccttggttcctcccagggagtcctttctcaactttgtaaggcgtgcacagaggtggcaaggaagcaccttgctcctcttcctggttctaaggaaaaggtgaccttgagccagtgggtgtctttcccagtgcctgcctctaaccctgtgctttctccatatcctcctctggtatctgtgtttattccgcggtttccccgcggctgcccccgggagaccgaagaggtggctggggcaggccgaaagcagaggaaaggttgggcagtgtcacccttgcacacccacagggtagacggatcgagtttcagcttaaaccgaggggtgtgggggaagggtgttgggttcagctagtccacgtgggtgctgtcctccacttggtgctgaaatctgggcggccacatccccggggcgggagggggctacatccccggctttagacgcgcgagtctcaggtcccgctaattacctggcgggtgctgcccacccctgccctcgcgcacctagcgcggtggcaggcgggaaggcggggcctgggggagccccacccctggagactgcggctggggcctccctctcctccgcccgcccgcctgccactagctcattgcgcctctcctgcagtctgattggcaccggctcccattccggctccagcctccaatccgacccccatttcggctgcagcctcggacctagctccggccctcggtctatccggttgcatcctccctccctgttccggatcttatcttgcgccagcgcctactccaggatcccgtagccagacctcaagccatggctgg

SEQ ID NO: 13751 - DNA, 2300 bp, Homo sapien
tatatgagataatacatgctgtgggcttagcacagtgcatgatacacaaacatgcaataaatattaccttgttattcttttgggctctttgactctctcactttctgcaccagaaagaaaaaggatcaagttagaggactctaaatttttcccctagagagtgagaattggaggctggcagaatacaggaagataaggtaggaatgagaaagattcagggacactaccaatcagaagactttggttctaggttcaactgtgccacaaattagtgtgatcttaggcaagcaatttcatttagtttttctgggcttcagtttttagtctgtagaatggaggggtgagaatatgttaaacaccataattaattcactgagtgcctattatatgcaaggcactttgctaggttctgtaggatatataaagatttcttactccatgttggggccacctttttcaaaccctgggcccagtaaaatggaattagatagtctcatagtatttggttcaggtctacaagtattaattgagccaactatggacctggcatgggagagggtacaagagaaattagagatatgatcccggacctaaaagagcttaatatctgaagaatcacacttgagatgatggacaagcatcccagcaagtggagctggaatgcctgggggagctgcaggagagacagagaagacagctctgttggcatattgtctttcttcccaccagcctgtgctgtgggatctgctccagagggaaaagagtgtttgggccctgcagattctagtgcaggtaacaggtggagggcacatgggtgggctgggtgacagccatggctggaggtccctgccccgtgaggtgaggccatacccaccatgacctcctattcgcaggcgtacctgcatatgcccccagaaaacctccagcagctggtgctttcagcagagagggaggctgcacagggcttcctgacactcatgctgcaggggaagctgcaggggaagctgcaggtgagcactgagaaaggggagcaagggcacctggagcctagtgttcagagggcttgctttagtgggaggaggaactccagagaggaaatggcagggatactgagcatctccagaggcagaatccattcctgtgcccctacaggtaccaccatccgaggagcaggccctgggtcgcctgacagccctgctgctccagcggtacccacgcctcacctcccagctcttcattgacctgtcaccactcatccctttcttggctgtctctgacctgatgcgcttcccaccatccctgttagccaacgacagtgtgtaaggttcttgcactactcctcctgctcctgtcacggtcaggccaaccgcatccacctggagcagccccttccggagctcctctctgtttttttctttcatgccagataggcaatgtgccaacatcgtagcaaggtttgagagaggcacatctcacgcctgagtgtgaaaacccaatcattatgctaatgaactacaaaaggatcagagagctcctctctattaaaaccagggagaggatgggcgtggtggctcatgcctgtaatcccagcacgttgggagcccgaggcaggtggatcactaggtccgcctagtgagttcgagaccagcctggccaatatggtgaaaccccgtctctattaaactacaaaaattagccaggcatggtggtgggcgcttgtagtcccagttactctggaggctgaggcaggaggatagcttgaacctgggaggcagaggttgcagtgaaccaagatcgtgccactgcactccagcctgggtgacagagcgagactccgtcttaaaaaaaacaaaaaacaaaacaaaacaaaaaaacagggagagtctccttcctatctagacagcagggctacagagggtcagaggaaaacagtttggaggaagacaaagggttaagacccatgactcctcgcagcctggctgccatccgggattacagcccaggaatgaggcctgaacagaaggaggctctggcaaagcgactgctggcccctgaactgtttggggaagtgcctgcctggccccaggagctgctgtgggcagtgctgcccctgctcccccacctccctctggagaactttttgcagctcagccctcaccaggtatgagaatcatcttctttacttgactggcccatcttctgctagtggggacaaagagtcaatggcatgtctctcagtggcccctccctgcaagaaccctatagtgaccccagtgcgagctaaccttccccatctcaga

SEQ ID NO: 13752 - DNA, 2300 bp, Homo sapien
aagaaggacagaataaaagtttgggtatagcttcagtgttgaattactatttagagttggtataaagtgaaggcctttggggagatatagatggagaatggaaaagacttctaatcctggactggggcagtagctcaagcctgtaatctcagcactttgggagactgaggtggataaatcacttgaggtcaggagttcaagaccagcttgggcaacatagtgaaaccccgtctccaccaaaaaatacaaaaattagccgtgcgcggtggcgcatgcctgtagtcctcagctacttgggaggctgagacaggataatcgcttgaatgaaggaggcagaaattgcagtgagccaagatagtgccactgcactccagcctgggtaacagagtgagactccatctcaaaaaaaaaaaaaaaaatgccgcggtggctcacacctgtaaccccagcactttgggaggctgaggtgggcagatcacttgaggtcaggagttcaagacctgcctggccaacatggtgaaaccccatctctactaaaaatacaaaaattagctgggtgtggtggcacgtgcctgtaatcccagctacttgggaggctgaggcaggaaaatcgcttgaacccaggaggcaggggttgcagtggtcagatagccccactgaactccagcctgggcaacagagagagattccatctcaaaaaaaccaaaaccaaaaaaccaataaaacaaaaaacaaaaatgacgaaaaaagacttctaaccctgaccagaccagattattttgaatgaaatctctttctctgttccatgagcagttctgtgtgtagggagatcagtccctgtgcatagtgatttaatctggtttctgtcttctcagctcagagtttttgatagggctttcacctaggccacagagaaagaaccaaatgataggggatcccggagggggaaggaaagacccaaacatttgaatggcctaatgagcaaatcacatttctctgggtctgtttccttatccataagtgaaaaagtttggtgtatgtgatctctggggtactgctcagctcttgacactctgtggttctgggtagtagttgaaagcagctctcctcttcctgaattctccatccttggactggacctctcgtctgtttataccttgctgtgcagtttgtttctcctgggcgtcatttcttcttcaatttcctcaaatcctacttgcttcttagctccttcatatcctctttgttttctttgcttctgcagaaccccagattacacccctggtctccagttctccatctccatgtctgcctgttcctttctgcatcactggctcctaactcaagcaatctccttgggtttctctgaggggcccctgggatcccctatcattagtccctctcacagaagcatacccttctccagagctaaaggatcagatattcagcggctcaggtaacaaacctgctgtcaggttacacatattgtttcctgaaagaccacactacagtgtcagtggagcctcaggttgcctgcagtgccctgccctcacctggctatcccacacaggtgagaataaccagaactcacctccggtaccagtgttcacttggaaacatggctctcagcctctggcccctgctgctgctgctgctgctgctgctgctgctgtcctttgcaggtaagaagaacagtgagcagaactggggatgaggaggagggtggctggaaaaagactttaagaatatggaggtgaacctgttagatagaaggacaaaggagagaggcagagacttgtgcaaaagggaaaaatgagggttaagaaaagcaggccaagacttactgtaggccagtgaaaggggttcagctcaccatcccctcacctcatctttagatccaggtagggaactgtgctcaggggcagggttgagtttgggctctgtgttcctctccttcagtgacctctggtttctctccttacagtgactctggcccctactgggcctcattccctggaccctggtctctccttcctgaagtcattgctctccactctggaccaggctccccagggctccctgagccgctcacggttctttacattcctggccaacatttcttcttcctttgagcctgggagaatgggggaaggaccagtaggagagcccccacctctccagccgcctgctctgcggctccatgattttctagtgacactgagaggtagccccgactgggagccaatgctagggctgctaggggatatgctggcactgctgggacaggagcagactccccg

SEQ ID NO: 13753 - DNA, 2300 bp, Homo sapien
agaatgaagggcagaaattcagaaggattacaggatgggctggaaccacaaagctgttgggaactcaggtcgtattctccctcagattcaactgtctgctttttagactaggtgtggtatccttgatgggcaaagggaatattggtaaaattacacaacagatcatttcactgatctcaacttttgatttgccttggaaaatcccatcattgctcccagctgtctttgtgacctgggttaagtcattccatttctctgggcttcaattcccctgtctataaaatgagaagttcttaccagaggattcctcaggtctcttctgtgatcctgggaggccgaagcaggaggattgcttgagtccaggagtttgagggtgcagtgagctaggatcataccacagtattccagcctgggccatggaccaagaccctgtctctaagtaaataaatacacaaaaataaaactctatgatcctaagtgaatcttctagatcagaagcacattaataatgaagttccatgtgtggatttgagggagagaatggggaagggttctagggaaagaaggacagaataaaagtttgggtatagcttcagtgttgaattactatttagagttggtataaagtgaaggcctttggggagatatagatggagaatggaaaagacttctaatcctggactggggcagtagctcaagcctgtaatctcagcactttgggagactgaggtggataaatcacttgaggtcaggagttcaagaccagcttgggcaacatagtgaaaccccgtctccaccaaaaaatacaaaaattagccgtgcgcggtggcgcatgcctgtagtcctcagctacttgggaggctgagacaggataatcgcttgaatgaaggaggcagaaattgcagtgagccaagatagtgccactgcactccagcctgggtaacagagtgagactccatctcaaaaaaaaaaaaaaaaatgccgcggtggctcacacctgtaaccccagcactttgggaggctgaggtgggcagatcacttgaggtcaggagttcaagacctgcctggccaacatggtgaaaccccatctctactaaaaatacaaaaattagctgggtgtggtggcacgtgcctgtaatcccagctacttgggaggctgaggcaggaaaatcgcttgaacccaggaggcaggggttgcagtggtcagatagccccactgaactccagcctgggcaacagagagagattccatctcaaaaaaaccaaaaccaaaaaaccaataaaacaaaaaacaaaaatgacgaaaaaagacttctaaccctgaccagaccagattattttgaatgaaatctctttctctgttccatgagcagttctgtgtgtagggagatcagtccctgtgcatagtgatttaatctggtttctgtcttctcagctcagagtttttgatagggctttcacctaggccacagagaaagaaccaaatgataggggatcccggagggggaaggaaagacccaaacatttgaatggcctaatgagcaaatcacatttctctgggtctgtttccttatccataagtgaaaaagtttggtgtatgtgatctctggggtactgctcagctcttgacactctgtggttctgggtagtagttgaaagcagctctcctcttcctgaattctccatccttggactggacctctcgtctgtttataccttgctgtgcagtttgtttctcctgggcgtcatttcttcttcaatttcctcaaatcctacttgcttcttagctccttcatatcctctttgttttctttgcttctgcagaaccccagattacacccctggtctccagttctccatctccatgtctgcctgttcctttctgcatcactggctcctaactcaagcaatctccttgggtttctctgaggggcccctgggatcccctatcattagtccctctcacagaagcatacccttctccagagctaaaggatcagatattcagcggctcaggtaacaaacctgctgtcaggttacacatattgtttcctgaaagaccacactacagtgtcagtggagcctcaggttgcctgcagtgccctgccctcacctggctatcccacacaggtgagaataaccagaactcacctccggtaccagtgttcacttggaaacatggctctcagcctctggcccctgctgctgctgctgctgctgctgctgctgctgtcctttgcaggtaagaagaacagtgagcagaactggggatgaggaggagggtggctggaaaaagactt

SEQ ID NO: 13754 - DNA, 2300 bp, Homo sapien
aaccttgtctctactaaaaatatgaaaattagctgggcatggtggcgcatgcctgtaatcccaactactcgggaggctgaggtgagagaagtgcttgagcctggagtgcagaggttgaagtgagctgagatcacgcaactccagcgtggatgatagagtgagactctgtctcaaaaaaaaaaagaaaaaaaaatagaaaaactatctagttggtgattcattcatctttaaaaaattcagtcaatacctgtttattatttattatacccaagaactaatggaatagtgagagttagtcatagattattcatgataaaggagaatttaggctgggtgcggtggctcacacctataatcctagcactttgggaggctgagactggcagatcaccttaggtcaggagttcgagaccagcctggccaacatgacaaaaccccatctctactaaaaatacacaaattagctgggcgtggtggtgcatgcctataatcccagctactcgggaggctgaggcaggagaatctcttgaacccaggaggtggaggttgcagtgagcctagatcgcgccactgcactccagcctgggcaacagagtgagactgcatctaataaaaacaacaacaaaaaaaaacttcaaactatagaatgattagctaaaaactgagtatggtagaaaaggagccaaaatcagaacaaactacaaagaaatgctttatgtttctttaaaagtaagaatggtaccatttttgaaaggtttaggtctctgcttctgtctattcacatgtctttttctttagggacctcccgaattccctggtaacagtgttcattctcttcaccttggatcattggtatgcactgcttcaggacgtctggaaggtgcctgaagtcagtcgcatcttcagcagcatctatttcatcctttggttgttgcttggctccattatctttcgaagtatcatagtagccatgatgggtaagcatagaggaggtgaaacttgtttgggaagtgtggttgggaaaaagttattctgaaagctgggattggtggcttatgggtataaagaacctagtgtagcaggaaggcttgggttctggattggatatttcacttggattctccccacccaagccctcttcccaagtctagtcattaccatctcccagctcctaatggccctttggggcagttactaactttcagaatatcaggaaagagctgaatgaggagatggcgcgtcgggaggttcagctcaaagctgacatgttcaagcggcagatcatccagaggtctgcttctcccttttcaaccccaactttccttctcaagggtttcctgagctcatttcttgtttctacttctcgaccccacttttccctttgtgacagtagatttgcccccaaggataagaattctccagctctagaatattgcctgattcttcatccactgtggggtgtcctccatttttttcaccccttgactacaatttgttctccccaattagttttcttcactttctgatatgaactttttttttcttaccacacttttgcttgaatataactgtctttgctcttttttttttttgctctgcaggagaaaaaacatgtcacatgaagcactgacgtcaagccatagcaaaatagaggacaggttaggagtatgtatgtgaactgggatagaaacacatgaaggaggagagggtggaaaactaaagatgaagattggctttgagagataattcattcatttaataactgcatattgtagtaggttgactagtggcacccgaaataatatgtccatgtctttgctccctggaacctgtgaatgtgaccttatttggaaaaaaaaaaagatcctaagttaaggatcttgagatgagatcatcctagattatccaggtaggtcctaaatccaatggcaagggtccttataaaagatgaaagaggagaagacacagagaataggagaaggcgatgtgaagacggagatagaggttggggctaatgccaccgcaagccaagggaagctgaggaatgccaggcagctgccagaaggtagaagaggcaaggaacttctcccctaaagcctccagagggaatatggccctgccaacaccttcatttcagactctagcctctagaattgtgacggaatatatttctgtcattttaagctaccaagtttatagtaatttgttatggcagccacaggacactaatacaaataccttccatgaaacagatatgattctagaccccaagtgtttagcagtggacaaaaaaagcagaa

SEQ ID NO: 13755 - DNA, 2300 bp, Homo sapien
gtcattctccgtccagctttgttccgttgctggtgaggaactgtgttcctttggaggaggagaggtgctctgctttttagagtttgcagtttttctgctctgttttttccccatctttgtggttctatctacttttggttttcgatgatggtgatgtacagatgggtttttggtgtggacgtcctttctgtttgttagttttccttctaacagacaggaccctcagctgcaggtctgttggagtacctggccgtgtgaggtgtcagtctgcccctgctgggggttgcctcccagttaggctgcttgggggtcaggggtcagggacccacttgaggaggcagtctggccgttctcagatctccagctgcgtgctaggagaaccactgctctcttcaaagctgtcagacagggacatttaagtctgcagaggttactgctgtctttttgtttgtctgtgccctgcccccagaggtggagcctacagaggcaggcaggcctccttgagctgtggtgggctccacccagttcgagcttcccggctgctttgtttacctaagcaagcctgggcaatggcaggcacccctcccccagcctcgctgccgccttgcagtttgatctcagactgctgtgctagcaatcagcgagactccgtgggtgtaggaccctccgagccaggtgcgggatataatctcctggtgcgctgttttttaagcccgtcggaaaagcgaagttttcgggtgggagtgacccgattttccaggtgctgtctgtcaccactttctttgactaggaaagggaactccctgaccccttgcgcttcccgagtgaggcaatgcctcgccctgcttcggctcgtgcacagtgcgcgcacccactgacctgcgcccactgtctggcactccctattgagatgaaccgggtacctcagatggaaatgcagaaatcacccgtcttctgcgtcactcatgctgggagctgtcgactggagctgttcctattcggagtattgacattttaaagaaatcctaattaaaatggacaatatggacagattatgatggaattattcttgttcaggtactcttttcgtttggacagaggtatctgccggtactgagatgtaagtgatcagctgaagggagaaactgtacaccatgtgacggacaaattgcctgcctcaagaaagcacttaggaccattctgcagccactcagtgaccttggctagaaaccaatggctgtgcggcgtgaggtaagatgaaaggaaataccctagggatccaggacttctgcatttggtgaaacgtccgcttccactacaaggctttgggatgtctagtctgtagactggagtaacattaatactgactcatgcagaaacaatatagctacatattgaactgggggaaggggtggcaaaaccctctgcaaataggaagtgccacaagagcaccgagataaggatgaggccctgcgtgagcgcagccttcgggttttccttgggccgatcagcaccgactccaccgctctcggcgaggcacctccagctcccgggaatgagaaatgtgcccgccacagcaggggcccacaggaatgaagggcgccggcgctgcgtaggcccaacagttccccgcgccctcgcccccggccccggcccagcccggcccttcttcccccgccttggcagagtggcgtcatcagggggcgaaaaacccgacgagcatgaggcccgcagatcccgtgtaggagatgcgactctcgaagttgtcgtccgtgagttcggaggcagcggcgaggcgggccgcggcaagaagcagcgccacacccgggaacagcgctaggcggcggaggcgcatggcggcgaggtggggtggggacggccggaagggtcgcggctcggctgggactgcggaggtcgggcgcgcgaccacaaaccggctgcctgcgctggcgcgtctggcccaggggacctgcagccggaggtcccaacccccaaacccggctcgggccgctgtgtggcagccgctgattggctgcgcgtcgccttcgtccggcgggcgggaccagctggttaccgctgagtggccggagagcggggcggggcggggcctaggcggcgagtggctgggcgagcgttgctccgcatggtcctgggctgtgggtaggggctagggccgggtcccggggtgagccgaaacctgggggtcgagcggggcggggaatggggcgcagtgaggctgggagccggccctgagctcgtcttgcataggggtagccaggctcggggcacctgagctggag

SEQ ID NO: 13756 - DNA, 2300 bp, Homo sapien
gattgagagggtgttactaaggaataggaagtgggaagagataattaccgaaggagaaataagacagccagaggagtagagaaattacccaagtttagagagtagcttcccaaatgtgaacaataattccactgagaaaacacatgtacttatgcacttttcttatcccttgtgtgccttttacaagcacataatatattaatgctcatttaaaaaattattttgcagcatatggaagtaatcaatatatggtattgttatatggtatttcatttatttaataagaattattgttgtcaatagtatttaatatttttaaagcactttacaattacaaggaacttttatatgtattatttcattgagttgaattggattgttccaatgattactggggacagagtctacattttcatggggatagtaaggggagttaaatacctggaagatgctgtaatagctagtttgaagggctagagtggtggagggggtatgagcctgagcatgaactagggaggcatctattcctcttagaataatctattcaagccattagaatcatttctatgtccattcaggaggccttgtggggtcagtacaatgaggcacgactggaaaagtggcaagacccctaatattgcagagaaggaaaagggaacaactgtcttgaccagggaaacccaagtgaagatgcgaggataataagagcaataacatatacaatacaaaatgctttcatattatcagtacctttaagtgaggtgttttgttgttgttgttttttgagacagggcctcgctctgtcacccaggttggaatgtagtgaggtgatcttggctcactgcaaactccatctcccaggctcaagtgatcctcccgcctcagcctcctaagtagctgggagcacaggcatacgccaccacacctggctagcttttgcatttcttgtagagacagagtttcatcatgttgaccaggctggtcttgaactccttgcactccagcgatctgcccgcctcggcctcccaacgtactgggattgtaggcgcgagccactacaattggccttaattaggtttttggggggtttttttgggttctttttttttttttgagaaggagtctggctttctcaccaggctggggtgcagtggcgccatttcggctcactgcagtctccacctcccgggttcaaacgattctcctgcctcagcctcccgagtagctgggattacaggtgcgcaccaccacactcggctaatttctgtatattcagtagagacggggtttcaccatgttggccaggatgatctcgacctcctgacctagtgatccgcctaacttggcctccgaaagtgctgggattacaggcgtgagccaccgagcccagccctaggtttttaatcctatttttatggatgagaaaaataaaggctcagagaaattaagtgagtcgctcaaggctgcacagctattagaggtaaggccaggattcaaatccagctttgtctggagcatagagaaaaagcaggctgtggagataggaatcaatttgtctagagttccaggtccatccactttcttgcctcctctgtaaatgtctctctgttccttcccttaactttcttatctgcttctctccttgtctcttttttgtctccagtctccctatcagtcctctttacatctgttaaaattttcaacctttatttattggatctgtacatatatgagaccctgttttgtctcataagacaaagggaagacctggtttttgctctgaaggaacagcaatggcacaaactctgcctcttcctctttctcagcatgaggcttcccacccaccccgtcgtctcatgaaacgtctctgtctagaccacgcttctggactttggcgacacactaagaaatcaaaggaagggagcatcaagttgcattccctcccagagccactaggggtcacgctcctccgcgcagaagcgccggccaacgcagcctgactctgttaccggtgcgcgcccttcgctgattggtggaaccgcaaagaagtcgcgctttgattgggccgctgtcaggtgtcgctgcctgcaggttcggctgcgcgagcggagggaggcgggtgagtgaaggccgggggcggtgggggagtggctggggctgggggcggtatcggaccgggtgggcgcggtagagtgggcttggtgggttcccagggctggggttcgttccgggtgggctccgctttgggaagaggcccagcggaggggccttagtgtcagcgtagggagagtgaggcggcg

SEQ ID NO: 13757 - DNA, 2300 bp, Homo sapien
gcggatcactaggtcaggaggtcgagatcatcctggccaacatggtgaaaccccgtctctactgaatatacagaaattagccgagtgtggtggtgcgcacctgtaatcccagctactcgggaggctgaggcaggagaatcgtttgaacccgggaggtggagactgcagtgagccgaaatggcgccactgcaccccagcctggtgagaaagccagactccttctcaaaaaaaaaaaaagaacccaaaaaaaccccccaaaaacctaattaaggccaattgtagtggctcgcgcctacaatcccagtacgttgggaggccgaggcgggcagatcgctggagtgcaaggagttcaagaccagcctggtcaacatgatgaaactctgtctctacaagaaatgcaaaagctagccaggtgtggtggcgtatgcctgtgctcccagctacttaggaggctgaggcgggaggatcacttgagcctgggagatggagtttgcagtgagccaagatcacctcactacattccaacctgggtgacagagcgaggccctgtctcaaaaaacaacaacaacaaaacacctcacttaaaggtactgataatatgaaagcattttgtattgtatatgttattgctcttattatcctcgcatcttcacttgggtttccctggtcaagacagttgttcccttttccttctctgcaatattaggggtcttgccacttttccagtcgtgcctcattgtactgaccccacaaggcctcctgaatggacatagaaatgattctaatggcttgaatagattattctaagaggaatagatgcctccctagttcatgctcaggctcataccccctccaccactctagcccttcaaactagctattacagcatcttccaggtatttaactccccttactatccccatgaaaatgtagactctgtccccagtaatcattggaacaatccaattcaactcaatgaaataatacatataaaagttccttgtaattgtaaagtgctttaaaaatattaaatactattgacaacaataattcttattaaataaatgaaataccatataacaataccatatattgattacttccatatgctgcaaaataattttttaaatgagcattaatatattatgtgcttgtaaaaggcacacaagggataagaaaagtgcataagtacatgtgttttctcagtggaattattgttcacatttgggaagctactctctaaacttgggtaatttctctactcctctggctgtcttatttctccttcggtaattatctcttcccacttcctattccttagtaacaccctctcaatcaaatagcaaccctactgctctggaagattatctccctatttatctggataaatacacgctattctaagaaattatatttatttactcatggctacttttcaacctaggtaaagaggccccacaacacaggtaacattttccacactacagctgcataactctgttctctaataattgatgtcttaccagaagaagaagggatggacccaagagagaagtggacacttctaagaatacccacaaatgacaaaggtagaataaaaggacacaaggaaggcctaaggagaatgaagggaatgagagtaatatgggggaattttctatgtaaagggaattctctttcccaaatactctctgttaagatttccaagtatctgtcttgtgggtacaccaggatagcagagggaagggactaatgccacggtgctactccaccttaactgaccctccacgctgaagcccctcatctctatttcaactctagcattcattctccttgctaccaggacaaaggtcaaatcatacctggagctgggaaacaaagccctctcaaatctgaatatgtgtttcacgaggagagagagagcagcagaggggaccacgaggaaggcagagattccctgaccacctcatgcctttgtacaccactcgcctttactctctggattaaacagcattagggagacaagagaggaaacacatgtggtgtctggagacctgtgcctgcctgttccagtcccacacccagtcatctcaccacacccttcacctcactttaccttctcctccagcacaggaactaggaactacggagagagaagccaagggagaggaggaggaggaaactaacgattccctgcccacccccacacccagcaccaccaacaggtgggcaagcttgccgagaaaacgcagagggcatcctgtgagcagcaaacacatctgagcctggaaaagacgcag

SEQ ID NO: 13758 - DNA, 2300 bp, Homo sapien
tataaaagttccttgtaattgtaaagtgctttaaaaatattaaatactattgacaacaataattcttattaaataaatgaaataccatataacaataccatatattgattacttccatatgctgcaaaataattttttaaatgagcattaatatattatgtgcttgtaaaaggcacacaagggataagaaaagtgcataagtacatgtgttttctcagtggaattattgttcacatttgggaagctactctctaaacttgggtaatttctctactcctctggctgtcttatttctccttcggtaattatctcttcccacttcctattccttagtaacaccctctcaatcaaatagcaaccctactgctctggaagattatctccctatttatctggataaatacacgctattctaagaaattatatttatttactcatggctacttttcaacctaggtaaagaggccccacaacacaggtaacattttccacactacagctgcataactctgttctctaataattgatgtcttaccagaagaagaagggatggacccaagagagaagtggacacttctaagaatacccacaaatgacaaaggtagaataaaaggacacaaggaaggcctaaggagaatgaagggaatgagagtaatatgggggaattttctatgtaaagggaattctctttcccaaatactctctgttaagatttccaagtatctgtcttgtgggtacaccaggatagcagagggaagggactaatgccacggtgctactccaccttaactgaccctccacgctgaagcccctcatctctatttcaactctagcattcattctccttgctaccaggacaaaggtcaaatcatacctggagctgggaaacaaagccctctcaaatctgaatatgtgtttcacgaggagagagagagcagcagaggggaccacgaggaaggcagagattccctgaccacctcatgcctttgtacaccactcgcctttactctctggattaaacagcattagggagacaagagaggaaacacatgtggtgtctggagacctgtgcctgcctgttccagtcccacacccagtcatctcaccacacccttcacctcactttaccttctcctccagcacaggaactaggaactacggagagagaagccaagggagaggaggaggaggaaactaacgattccctgcccacccccacacccagcaccaccaacaggtgggcaagcttgccgagaaaacgcagagggcatcctgtgagcagcaaacacatctgagcctggaaaagacgcagagaagtaaaagatcaaaggtgaggtaggggacgtggaggaaagtgggagagacaaaaggaaaacaaaaagtgggggatcatgagaagcagaggcaggaaataacagggcttcagacttgggtgcagaatggaggtggaggacacagcacagatggcataagaattaatatttccttggttcctcccagggagtcctttctcaactttgtaaggcgtgcacagaggtggcaaggaagcaccttgctcctcttcctggttctaaggaaaaggtgaccttgagccagtgggtgtctttcccagtgcctgcctctaaccctgtgctttctccatatcctcctctggtatctgtgtttattccgcggtttccccgcggctgcccccgggagaccgaagaggtggctggggcaggccgaaagcagaggaaaggttgggcagtgtcacccttgcacacccacagggtagacggatcgagtttcagcttaaaccgaggggtgtgggggaagggtgttgggttcagctagtccacgtgggtgctgtcctccacttggtgctgaaatctgggcggccacatccccggggcgggagggggctacatccccggctttagacgcgcgagtctcaggtcccgctaattacctggcgggtgctgcccacccctgccctcgcgcacctagcgcggtggcaggcgggaaggcggggcctgggggagccccacccctggagactgcggctggggcctccctctcctccgcccgcccgcctgccactagctcattgcgcctctcctgcagtctgattggcaccggctcccattccggctccagcctccaatccgacccccatttcggctgcagcctcggacctagctccggccctcggtctatccggttgcatcctccctccctgttccggatcttatcttgcgccagcgcctactccaggatcccgtagccagacctcaagccatggctggtcccttctcccgtct

SEQ ID NO: 13759 - DNA, 2300 bp, Homo sapien
agacaggcttggattcatatcttggttctgtgaccagccttgaatgagttatttaacttctctgagcaatatttttctcgtctcatttataaactagggatgataatggtatatgagataatacatgctgtgggcttagcacagtgcatgatacacaaacatgcaataaatattaccttgttattcttttgggctctttgactctctcactttctgcaccagaaagaaaaaggatcaagttagaggactctaaatttttcccctagagagtgagaattggaggctggcagaatacaggaagataaggtaggaatgagaaagattcagggacactaccaatcagaagactttggttctaggttcaactgtgccacaaattagtgtgatcttaggcaagcaatttcatttagtttttctgggcttcagtttttagtctgtagaatggaggggtgagaatatgttaaacaccataattaattcactgagtgcctattatatgcaaggcactttgctaggttctgtaggatatataaagatttcttactccatgttggggccacctttttcaaaccctgggcccagtaaaatggaattagatagtctcatagtatttggttcaggtctacaagtattaattgagccaactatggacctggcatgggagagggtacaagagaaattagagatatgatcccggacctaaaagagcttaatatctgaagaatcacacttgagatgatggacaagcatcccagcaagtggagttggaatgcctgggggagctgcaggagagacagagaagacagctctgttggcatattgtctttcttcccaccagcctgtgctgtgggatctgctccagagggaaaagagtgtttgggccctgcagattctagtgcaggtaacaggtggagggcacatgggtgggctgggtgacagccatggctggaggtccctgccccgtgaggtgaggccatacccaccatgacctcctattcgcaggcgtacctgcatatgcccccagaaaacctccagcagctggtgctttcagcagagagggaggctgcacagggcttcctgacactcatgctgcaggggaagctgcaggggaagctgcaggtgagcactgagaaaggggagcaagggcacctggagcctagtgttcagagggcttgctttagtgggaggaggaactccagagaggaaatggcagggatactgagcatctccagaggcagaatccattcctgtgcccctacaggtaccaccatccgaggagcaggccctgggtcgcctgacagccctgctgctccagcggtacccacgcctcacctcccagctcttcattgacctgtcaccactcatccctttcttggctgtctctgacctgatgcgcttcccaccatccctgttagccaacgacagtgtgtaaggttcttgcactactcctcctgctcctgtcacggtcaggccaaccgcatccacctggagcagccccttccggagctcctctctgtttttttctttcatgccagataggcaatgtgccaacatcgtagcaaggtttgagagaggcacatctcacgcctgagtgtgaaaacccaatcattatgctaatgaactacaaaaggatcagagagctcctctctattaaaaccagggagaggatgggcgtggtggctcatgcctgtaatcccagcacgttgggagcccgaggcaggtggatcactaggtccgcctagtgagttcgagaccagcctggccaatatggtgaaaccctgtctctattaaactacaaaaattagccaggcatggtggtgggcgcttgtagtcccagttactctggaggctgaggcaggaggatagcttgaacctgggaggcagaggttgcagtgagccaagatcgtgccactgcactccagcctgggtgacagagcgagactccgtcttaaaaaaaacaaaaaacaaaacaaaacaaaaaaacagggagagtctccttcctatctagacagcagggctacagagggtcagaggaaaacagtttggaggaagacaaagggttaagacccatgactcctcgcagcctggctgccatccgggattacagcccaggaatgaggcctgaacagaaggaggctctggcaaagcgactgctggcccctgaactgtttggggaagtgcctgcctggccccaggagctgctgtgggcagtgctgcccctgctcccccacctccctctggagaactttttgcagctcagccctcaccaggtatgagaatcatcttctttacttgactgg

SEQ ID NO: 13760 - DNA, 2300 bp, Homo sapien
aggacagaataaaagtttgggtatagcttcagtgttgaattgctatttagagttggtgtaaagtgaaggcctttggggagatatagatggagaatggaaaagacttctaaccctggcctggggtagtggctcaagcctgtaatcccaccactttgggaggccaaggtggatgaatcacttgaggtcaggagttcaagaccagcttgggcaacatggtgaaaccccatctccacaaaaaatacaaaaattagccatgcatggtggcgcatgcctgtagtcccccaactacttgggaggctgaggcaggataattgcttgaaccaaggaggcagaaattgcagtgagccgatagtgccactgtactccagcctgcgtaacagagtgagactccatctcaaaaaaaaaaaaaaaaaaaaaaaaaaaggcgctgtggctcacgcctgtaaccccagcactttgggaggctgaggtgggtagatcacttgaggtcagttcaagacaagcctagccaacgtggtgaaaccccatctctactaaaaatacaaaaattagctgggtgtggtggcacgtgcctgtaatcccagctacttgggaggctgaggcaggaaaatcgcttgaacccggaaggaagaggttgcggtggtgagatagccccactgcactccagcctgggcaacagagagagattacatctcaaaccatcccctggaaaaaacaaaaaacaaaaacaacaacaaaaaagacttctaaccctgaccagaccagattattttgaatgacatctctttctctctctgttccatgagcaattctgtgtgtagggagatcagtccctgtgcatagtgatttaaatctggtttctgtcttctcagctcagagtttttgatggggcttttacctactaggccacagagaaagaaccaaatgataggggatcccggagggggaaggaaagacccaaacatttgaatggcctaatgagcaaatcacatttctctgggtctgtttccttatccataagtgaaaaagtttggtgtatgtgatctctggggtactgctcagctcttgacactctgtggttctgggtagtagttgaaagcagctctcctcttcctgaattctccatccttggactggacctctcgtctgtttataccttgctgtgcagtttgtttctcctgggcgtcatttcttcttcaatttcctcaaatcctacttgcttcttagctccttcatatcctctttgttttctttgcttctgcagaaccccagattacacccctggtctccagttctccatctccatgtctgcctgttcctttctgcatcactggctcctaactcaagcaatctccttgggtttctctgaggggcccctgggatcccctatcattagtccctctcacagaagcatacccttctccagagctaaaggatcagatattcagcggctcaggtaacaaacctgctgtcaggttacacatattgtttcctgaaagaccacactacagtgtcagtggagcctcaggttgcctgcagtgccctgccctcacctggctatcccacacaggtgagaataaccagaactcacctccggtaccagtgttcacttggaaacatggctctcagcctctggcccctgctgctgctgctgctgctgctgctgctgctgtcctttgcaggtaagaagaacagtgagcagaactggggatgaggaggagggtggctggaaaaagactttaagaatatggaggtgaacctgttagatagaaggacaaaggagagaggcagagacttgtgcaaaagggaaaaatgagggttaagaaaagcaggccaagacttactgtaggccagtgaaaggggttcagctcaccatcccctcacctcatctttagatccaggtagggaactgtgctcaggggcagggttgagtttgggctctgtgttcctctccttcagtgacctctggtttctctccttacagtgactctggcccctactgggcctcattccctggaccctggtctctccttcctgaagtcattgctctccactctggaccaggctccccagggctccctgagccgctcacggttctttacattcctggccaacatttcttcttcctttgagcctgggagaatgggggaaggaccagtaggagagcccccacctctccagccgcctgctctgcggctccatgattttctagtgacactgagaggtagccccgactgggagccaatgctagggctgctaggggatatgctggcactgctgggacaggagcagactccccg

SEQ ID NO: 13761 - DNA, 2300 bp, Homo sapien
acataagcagtgagaatgagacaatggagtttgggaagcaaaaaataagtcattaggcagatgatcaacagccaggataaaaatgagtgacatgaaaggatacactcaaggacccatccggcccacaaagaaagaggtggcctctgactgcagcgcacatgaagcctgctcaacagcctctgggcatgtgaaatctgttctatacgttgaggctttatagagacgcccactagctggtgttgatctcccaacataagtttcttctggcgggaaggatctacaacaaaaattgaaaaggggtagtggataaatacaaacaaaatagaccaggtagggttgggggcagggatactgttcagataatgggtccccctaatggcttactgctggtccttctcttctcacagcaactaagaattctgtttggagtgagagcaaatgtattgcttatgaccaacactgtccatgcccacaaaagcagcaggttcactctcaaagttttaagagtctttgacagaaactgttccgtatcatccacggctagtggctatcctaggcctaaaagtgaaagacgtggattctatctccttagttttatttacaagcccttgatttatcaagtttggtaaaccagcaactaaaccggcctccccagaattttccactcttaaatgtagaggatgtggataggagtcttaaatttaaattagtgaagaaataggctgctgaccaagtaactcctgatagtgtgtcgcagcacagcttggctcaagccttgcaaatgctcgatgagagagaaagtatcgatgagacgtgaacgaatggcatcagctcggggaagctgcatctgcccttcttgttggtaagcggccatgtctgctaagaaaatgtaagcatcaagtgtcatttcattcttggagctgcaccaaggattacaggttttctgtcccctcctccccaccctctttgcccttaagattccttaatgtacccacatctacgaactaggagcagttgggcagaacaaacattctactaagactcagggttttttgaaacaaaaggggctaagagtggtaaagacattgagcagtcgaccaagtggccaggcatcttcactttgtgacggcactaccaattaaaagctcattaaaaaaaaaaaaaaaaaaaaaaaaagtccgggcgtggtggctcacgcctgtaattccagcactttggaatgccgaggcgagcggatcacgaggtcaggagatagagaccatcctggctaacacggtgaaacccggtctctactaaaaatacaaaaaattagccgggcgtggtggcgggcgcctgtaggcccagctactcgggaagctgaggcaggagaatggcgtgaacccgggaggcagagcttgcagtgagcggagatcgcgccactgcactccagcgtgggggacagagcaagacggcatctcagacaaaacaaaacaaaacaaaacaagaaactcaataaaaaaggagcagccacaagggcaggggcccggggctggacaaagaagaacctgggtcccacctgggcctgagagaatcgggcaatgaggtggagttgggggagggcttggcctgcccacgcaagagaaaccaagtgaagagaaattggacaaaatgccaaagcctgacattttgaaaatgggtcccgtcccaagtgtgtccactccaacactccttcgggggctagctccttctctcctccattctcgcttctgggcctcacctcagcccaggttctcttcgcccactcagtcctgacttcacgcttccacctccagctcaggcgccccctgagcccggctacccctacgcaggacgagctcagggccggctcccagcctcactgcgccccatttcccgccccgcccgacccccaggtttcggctcaccccgggacccggccctagcccctgcccccagcccaggaccgggcccagccacgctcgcccagacactcgccgcctcggccccgccccgcgctccggccactcggcggtaacgagttggtcccgcccgcccgacgaaggcgacgcgcagccaatcagcggctgccacacagcggcccaagccgggtttgggggttgggacctccggctgcaggtccgcctgggccagacgcgcgagcgcaagcagcgggttagtggtcgcgcgcccgacctccgcagtcccagccgagccgcgacccttccggccgtccccaccccacctcgccgccatgcgcctccgccgcctagcgctgttcccgggtgtggcgctgcttcttgccg

SEQ ID NO: 13762 - DNA, 2300 bp, Homo sapien
ttcaagctattctcctgcctcagcttcctgagtagctgggattacaggcatgtgccactatgcccggctaatttcgtatttttagtagagacgggggtttctccatgatggtcagactggtcttgaactcccgacctcaggtgatccgcctgcctcggcctcccaaagtgctgggattacaggcgggagccaccatgcccagccccaaaattccttttttaaactaatattctagtggcccactattctccaacaattcctactttaaattgttgcatgacccctgtagtaaaaagcatcactcagatctgacaaacttagtgacacccccagtttttacaaattattgacaccccctcaaagctaacagcatgattatataattgggaagagttgttcctaagagagaacatgagttccagagatgtataagaactatctatatgtgtaatctgtactgccagttagccccagaaatgccctggacacaaaatctgtccaagctgcaaacaaaatttgccatctctagcacatcattctgattcaggtggtctttactacaggacttttttcgtgtaacccttagcaagttgtttgaggctaagaagggaagacctgagtctgaagcaaataaaagttatacacaacttttactgacatttttgaacacggatagtattaaaccaagggtcactgtgccaggaggggaaaaattaagtactgtaattatatatattgaattatatatagagagctatccccaggataaaggaatcactgtttactctggtaatgatctggaggtttaaaaacacacacacacacaaataaaaaaaaaaaacaaacactcaagttgactgggccagaaatcttatttgctcttccttctccccaacagttttttatttcgagttagttctatctaaggaatttacacccttgatcacttaagtcaccctaaagtggagtatgtaatcaatattggttattttctcattggagtcttttttgacattttaaagaaatgctatttaaaacagacaatatggacagattctgatggaattattcttgttcacgtactcctttcgtttggacagaggtatctgccggtactgagatgtaagtgatcagctgaagggagaaactgtacaccatgtgacggacaaattacctgcctcaagaaagcacttacgaccattctgcagccactcagtgaccttggctagaaaccaatggctgtgcggcgtgaggtaagatgaaaggaaataccctagggatccaggacttctgcatttggtgaaacgtccgcttccactacaaggctttgggatgcctagtctgtagactggaggagcattaatactgactcacgcagaaaagatatagctacatattggactgggggaaggggtggcaaaaccctctgcaaataggaagtgccacaagagcaccgagataaggatgaggccctgcgtgagcgcagccttcgggttttccttgggccgatcagcaccgactcccccgctctcggcgaggcgcctccagctcccgggaatgagaaatgtgcccgccgcagcaggggcccacaggaatgaagggccccggcgctgcgtaggcccaacagttccccgcgctctcgcccccggcccagccccgcctttcttcccccgcctcggcagaatggactcaccagggggcgaagaactcgacgagcatgaggcccgcagagcccgtgtcggagatgcgactctcgaagttgtcgtccgtgagttctagcacgtcggaggcagcggcgaggcgggccgcggcaagaagcagcgccacacccgggaacagcgctaggcggcggaggcgcatggcggcgaggtggggtggggacggccggaagggtcgcggctcggctgggactgcggaggtcgggcgcgcgaccactaacccgctgcttgcgctcgcgcgtctggcccaggcggacctgcagccggaggtcccaacccccaaacccggcttgggccgctgtgtggcagccgctgattggctgcgcgtcgccttcgtcgggcgggcgggaccaactcgttaccgccgagtggccggagcgcggggcggggccgaggcggcgagtgtctgggcgagcgtggctgggcccggtcctgggctgggggcaggggctagggccgggtcccggggtgagccgaaacctgggggtcgggcggggcgggaaatggggcgcagtgaggctgggagccggccctgagctcgtcctgcgtaggggtagccgggctcagggggcgcctgagctg

SEQ ID NO: 13763 - DNA, 2300 bp, Homo sapien
ttgaacacgggaggcggaggttgcagtgagcccagaccatgccactgcactccagcctgggtaacagagcaagactctgtctcaaaaacaaaacaaaacaaaacaaaacaaaaacaaaaaaacaggctgggtgcagtggctcatgccagtaatcccagcattttgggaggccaaggtgggcagatcacctgaagtcaggagttcgagaccagcctggccaacatggtgaaaccctgtctctattaaaaatacaaaaaaattagctgggcattgtggcaggcacctgtaatcccagctactcgggaggctgaggcaggggaatcacttgaacccaagaggcggaggttgcagtgagtcaagatagtgccatggcactctagcctgggcaacaaagcgagactccatctcaaaaaaaaaaaaatacacaaacacacacacaaaaaaaatgtagtggaatgtgaagaaataaagacctcaacaggagacttctttaactccaaattgctcattcagaaaactcatctttcttgctgaaattgtggaggatgactttttcttttaaaccaattaaaagcagacaccacagcagagatccacccaattcttgggacagtcagtgcctgatgggatatgtagtttttagggtagcacgtgtaacaatttaaagtaggaaacacccccttcaattcaaataaaaaattctggtttttttttttgagacagagtttcgctcttgttgcccaggctggagtgcaatggcaggatcgtggctcactgcagcctctgcttcctgggttcaagctattctcctgcctcagcttcctgagtagctgggattacaggcatgtgccactatgcccggctaatttcgtatttttagtagagacgggggtttctccatgatggtcagactggtcttgaactcccgacctcaggtgatccgcctgcctcggcctcccaaagtgctgggattacaggcgggagccaccatgcccagccccaaaattccttttttaaactaatattctagtggcccactattctccaacaattcctactttaaattgttgcatgacccctgtagtaaaaagcatcactcagatctgacaaacttagtgacacccccagtttttacaaattattgacaccccctcaaagctaacagcatgattatataattgggaagagttgttcctaagagagaacatgagttccagagatgtataagaactatctatatgtgtaatctgtactgccagttagccccagaaatgccctggacacaaaatctgtccaagctgcaaacaaaatttgccatctctagcacatcattctgattcaggtggtctttactacaggacttttttcgtgtaacccttagcaagttgtttgaggctaagaagggaagacctgagtctgaagcaaataaaagttatacacaacttttactgacatttttgaacacggatagtattaaaccaagggtcactgtgccaggaggggaaaaattaagtactgtaattatatatattgaattatatatagagagctatccccaggataaaggaatcactgtttactctggtaatgatctggaggtttaaaaacacacacacacacaaataaaaaaaaaaaacaaacactcaagttgactgggccagaaatcttatttgctcttccttctccccaacagttttttatttcgagttagttctatctaaggaatttacacccttgatcacttaagtcaccctaaagtggagtatgtaatcaatattggttattttctcattggagtcttttttgacattttaaagaaatgctatttaaaacagacaatatggacagattctgatggaattattcttgttcacgtactcctttcgtttggacagaggtatctgccggtactgagatgtaagtgatcagctgaagggagaaactgtacaccatgtgacggacaaattacctgcctcaagaaagcacttacgaccattctgcagccactcagtgaccttggctagaaaccaatggctgtgcggcgtgaggtaagatgaaaggaaataccctagggatccaggacttctgcatttggtgaaacgtccgcttccactacaaggctttgggatgcctagtctgtagactggaggagcattaatactgactcacgcagaaaagatatagctacatattggactgggggaaggggtggcaaaaccctctgcaaataggaagtgccacaagagcaccgagataaggatgaggccctgcgtgagcgcagccttcgggttttccttggg

SEQ ID NO: 13764 - DNA, 2300 bp, Homo sapien
aaaagcccccagcttccaggaagtgtatcttaatatatgaacaagtcttgatgaaattggaaaaagcaaggaactcacaggaggtagtctggtatatcttcaggacttggggattcagaatctaggaaggaagcaagaaaacacaagtgattataagtcttttccactggcatttttaccctcctctcattaactcaccttcttgaactgaggaactgtgttctaatctggggtccatgtcctcatcttcttgctcccaatcttctccctcttgtaaatcctgattggtcaggccttgtagggggcttggcactaaaggcagagttctgaacctcttttcttccagttctacagtggctacaggcactgaacgtttctgttgaggaaaatatctgtgtgacataaacagccaagagcttcctaaatatgttcttctctcaagaatttctcctaggctgggcacagtggctcatacctgtaatcctgaccgtttcagaggctcaggtggggggatcgcttgagcccaagatttcaagactagtctgggtaacatagtgagaccctatctctacaaaaaaataaaaaaatgagcctggtgtagtggcacacaccagctgaggagggagaatcgagcctaggagttcaaggctgtggtgagccgtgatcataccacaacactccagcctgaggtgactgagtgagaataagaaaaaaaaaaaggatggcctgagcccaggagtctccagcctggggaacagagagaccttgtctctaaaaaaattcctcccatataacgagcttccaatttctaaattttagcttgactaaaagtgcttttcaaaatagtctttgccactgtttaattatattaatgttacaaaaaaaaagcccttgccattctaacttaccttgtccagacgtttccggctggcagaggaaggcagtgcctgaacaggttctctgtttggaacatgggtctggcttctaggatattttaagggaatgggacagatgaagaccagggtaggaggtggaactggatcttttattacaacatttaagagtggagattagaaaggaagacaatgccaaagcttcccatgttagtcccaccccatccaaagtacctcacttcccactgtgccatgtgctcccttgaggatcctgggagtgactgtccttggttgcttgccagtggatctgacactgacacctggtggggaaagtggcaggagcacttggttccctggagtactgggataccttggacttcaggctttgccccaccttatcacaactccctgcaatttctggcctcacccacctcctctagtgccatctgtggctgtgatactgcatctccttcagaatagcctcctgtgttctgccaactctcaggatgtctggcatcttcagtcaggttgtgtccctgaactgatgatggggctgggatagaatccatggctgcccaaataatgaggcgctccctgagtgagcccaggcagtggaggctgttaggcccagacctggaaaaggatggtggaaaaaaataggagggtggagacctcttaagcacctctccacatttccctcccccactttccacaaaccctttcttgccggctacctgttccccctcacctgaggaagcgttggcacacaaggtccaagctaccaccagcgccctcctgacaacactgggacactatgaaggagaagaggcaggaccaaccagggcctgggagtctcagatactgggggtggaaggagacggtaagccccatgaagtcagcccctccccctcctgccgccgccactcgtccgggagccagtccgtaagtaagactaagacgggtcccacagggcttgttagcacaccaggtgcagctgggcctgagttccccaggaggccgaaacagcacagtcccctcaaaccacagccccctgggacaaccccagcagcctcctcgccccacttggagttcagttatcggaactacctcagaccgtgactactcgcagcctccggccccgaccgcaccttccacctccagcccacgtttatgctccctcgccctcacctcgctcacacaccctgagctcgcacttacccctcggtggccttggaaagcaatcaccggccgtacctgcggggagagcgaagatgtgaccgttgagcgcaggtgaagcagtgtccccaggatccggcgtccggagcccgggatcacctgcctagcgggcttcacttggagaggtggggaggccagagcttgcggaagccgctccctctcccctgcacc

SEQ ID NO: 13765 - DNA, 2300 bp, Homo sapien
ggcacacaccagctgaggagggagaatcgagcctaggagttcaaggctgtggtgagccgtgatcataccacaacactccagcctgaggtgactgagtgagaataagaaaaaaaaaaaggatggcctgagcccaggagtctccagcctggggaacagagagaccttgtctctaaaaaaattcctcccatataacgagcttccaatttctaaattttagcttgactaaaagtgcttttcaaaatagtctttgccactgtttaattatattaatgttacaaaaaaaaagcccttgccattctaacttaccttgtccagacgtttccggctggcagaggaaggcagtgcctgaacaggttctctgtttggaacatgggtctggcttctaggatattttaagggaatgggacagatgaagaccagggtaggaggtggaactggatcttttattacaacatttaagagtggagattagaaaggaagacaatgccaaagcttcccatgttagtcccaccccatccaaagtacctcacttcccactgtgccatgtgctcccttgaggatcctgggagtgactgtccttggttgcttgccagtggatctgacactgacacctggtggggaaagtggcaggagcacttggttccctggagtactgggataccttggacttcaggctttgccccaccttatcacaactccctgcaatttctggcctcacccacctcctctagtgccatctgtggctgtgatactgcatctccttcagaatagcctcctgtgttctgccaactctcaggatgtctggcatcttcagtcaggttgtgtccctgaactgatgatggggctgggatagaatccatggctgcccaaataatgaggcgctccctgagtgagcccaggcagtggaggctgttaggcccagacctggaaaaggatggtggaaaaaaataggagggtggagacctcttaagcacctctccacatttccctcccccactttccacaaaccctttcttgccggctacctgttccccctcacctgaggaagcgttggcacacaaggtccaagctaccaccagcgccctcctgacaacactgggacactatgaaggagaagaggcaggaccaaccagggcctgggagtctcagatactgggggtggaaggagacggtaagccccatgaagtcagcccctccccctcctgccgccgccactcgtccgggagccagtccgtaagtaagactaagacgggtcccacagggcttgttagcacaccaggtgcagctgggcctgagttccccaggaggccgaaacagcacagtcccctcaaaccacagccccctgggacaaccccagcagcctcctcgccccacttggagttcagttatcggaactacctcagaccgtgactactcgcagcctccggccccgaccgcaccttccacctccagcccacgtttatgctccctcgccctcacctcgctcacacaccctgagctcgcacttacccctcggtggccttggaaagcaatcaccggccgtacctgcggggagagcgaagatgtgaccgttgagcgcaggtgaagcagtgtccccaggatccggcgtccggagcccgggatcacctgcctagcgggcttcacttggagaggtggggaggccagagcttgcggaagccgctccctctcccctgcaccttctccagggtcgccggctgaggcccaaggtccctaggggcagtgactagagaagaagggggccggccgtacctgttgccgctgacactcttgcagcgcccgcagggcagcgtcgttgagcctgagcagtaagaggctagtccgggcagcttgcgtgaagcagagccggagctgtcctctcagaggctcctggagctcctccatggcgacgagttcgagtgcaagcagcacgggggccacaggcgagggccaccaccgccacctcctctgttcagggtttggttggcacacccggtaacccacgtctgccccaccctccgccaggaacccgcccccggccccacctcccgccagcgccaccccaagctttcccagccgcgtgggcggcgcttcgctctccccggccaaccgcccggacctcggcgctttcttctaggatccgcatgaatcgctttgggctatcggaagagctatccccagttctcgggagaaagagtccgcgaccagcgtctgacctctcactcagagtccccagtcctgccttagtttccccagcgaccctgaatttggagttgctgtctctaagtgaaagctgaacctgc

SEQ ID NO: 13766 - DNA, 2300 bp, Homo sapien
aagttcagtggcgaaaacatggctcactgcaacctgattcatggattcaagcgatcctcctgcttcagcctcctgagtagctgggactacaggcatgcaccgccatgcccagctaagagaccagctttatccattaccacaactgtttatcagattaggatattgccgcagagaaacagaaatagcacagattttaaagatcaactttattgaagtataatttacatacaaattttatgtgtattagccgggcgcggtggctcatccctgtaatcccagcactttgggaagccgaggcgggtggatcacgaggtcaggagatcaaaaccatcctggctaacacggtgaaaccccatctctactaaaaatacaaaacattagccaggcgtggtggtgggtgcccgtagtcccagttactcgggaggctgaggcaggagaatggcgtgaacccaggaggcggggcttgcagtgagcggagatcgtgccactgcactccagcctgggcgacagagcaagacttcgtctcaaaaaaaaaaaaaaaaatgtattttttttttatgagttttgacaaatgtataggtaattttatttgtagtagaggacgttaaggttcccggggattgtgcaggtccagggatttaacagagggatcctgtttaggaaacaggacaacatcggggctcttgggaaacataatcaaacaggaacaagtggagacaccaagggctggccagaggttggtgctggggtctcagtgcaccaggatctggccctctggaatgcctggcgacttcatggcagctcctggccctcctcagggagcggtctcaccactctgacgcgtgtttaggccacgaggtgagacctaggactgggttctggctctctgccctgcaactttcctgccactacccgcgcccgtatccctgcccaccaactgggggcgctccagtcggtgacagccaactttcactgctgccaccacaaccgcagggccccaattacctctctgttagaaatcggtttcagagcggtggaaccgcgggcgggaaaaagcccaggcgctgtctcgggtgccccttcgtgtcagccatcctctggtctctcgggtctccgaagctcggggctaactgggcgcgaaccgctgagcccgcctaccaaccaggccctttctcccgcccctctgcggctgaaaccctcaaggggttgcaggttcagctttcacttagagacagcaactccaaattcagggtcgctggggaaactaaggcaggactggggactctgagtgagaggtcagacgctggtcgcggactctttctcccgagaactggggatagctcttccgatagcccaaagcgattcatgcggatcctagaagaaagcgccgaggtccgggcggttggccggggagagcgaagcgccgcccacgcggctgggaaagcttggggtggcgctggcgggaggtggggccgggggcgggttcctggcggagggtggggcagacgtgggttaccgggtgtgccaaccaaaccctgaacagaggaggtggcggtggtggccctcgcctgtggcccccgtgctgcttgcactcgaactcgtcgccatggaggagctccaggagcctctgagaggacagctccggctctgcttcacgcaagctgcccggactagcctcttactgctcaggctcaacgacgctgccctgcgggcgctgcaagagtgtcagcggcaacaggtacggccggcccccttcttctctagtcactgcccctagggaccttgggcctcagccggcgaccctggagaaggtgcaggggagagggagcggcttccgcaagctctggcctccccacctctccaagtgaagcccgctaggcaggtgatcccgggctccggacgccggatcctggggacactgcttcacctgcgctcaacggtcacatcttcgctctccccgcaggtacggccggtgattgctttccaaggccaccgaggggtaagtgcgagctcagggtgtgtgagcgaggtgagggcgagggagcataaacgtgggctggaggtggaaggtgcggtcggggccggaggctgcgagtagtcacggtctgaggtagttccgataactgaactccaagtggggcgaggaggctgctggggttgtcccagggggctgtggtttgaggggactgtgctgtttcggcctcctggggaactcaggcccagctgcacctggtgtgctaacaagccctgtgggacccgtcttagtcttacttacggactggctcccggacgagtggcgg

SEQ ID NO: 13767 - DNA, 2300 bp, Homo sapien
cctattcaagggcactactgcagtaaatctcctacaccatcaaaattttggagatgttctaaaaattatttccgtcaacatggaacatgctatttctcccatcttaaaactttttcttgatcctatttcctccaccatgactcccatttctctgtccccgtattcagcaaaactcaggtttctttttgagatggagtctcactccagcctaagctggagtggagtggcgtgatctcagctcactgcaacattcacctctggggctcaagcgattctcctgcctcagcctcccaagtagctgggactacaggtgtgcgccaccacacctggttaatttttttgtagttttagtagagacagggtttcaccatgttgccctgggtggtctcgaactcctgagctcaggtaatccacctgcctcagcctcccaaagtgctgggattacaggcatgagctaccgcacccagcctcttttttttttttttttttttttttttttttttttgagatggaatctgccagcgcgcctggcctttttttctttttttgagacagggtctctctctgttgctcaggctgaagttcagtggcgaaaacatggctcactgcaacctgattcatggattcaagcgatcctcctgcttcagcctcctgagtagctgggactacaggcatgcaccgccatgcccagctaagagaccagctttatccattaccacaactgtttatcagattaggatattgccgcagagaaacagaaatagcacagattttaaagatcaactttattgaagtataatttacatacaaattttatgtgtattagccgggcgcggtggctcatccctgtaatcccagcactttgggaagccgaggcgggtggatcacgaggtcaggagatcaaaaccatcctggctaacacggtgaaaccccatctctactaaaaatacaaaacattagccaggcgtggtggtgggtgcccgtagtcccagttactcgggaggctgaggcaggagaatggcgtgaacccaggaggcggggcttgcagtgagcggagatcgtgccactgcactccagcctgggcgacagagcaagacttcgtctcaaaaaaaaaaaaaaaaatgtattttttttttatgagttttgacaaatgtataggtaattttatttgtagtagaggacgttaaggttcccggggattgtgcaggtccagggatttaacagagggatcctgtttaggaaacaggacaacatcggggctcttgggaaacataatcaaacaggaacaagtggagacaccaagggctggccagaggttggtgctggggtctcagtgcaccaggatctggccctctggaatgcctggcgacttcatggcagctcctggccctcctcagggagcggtctcaccactctgacgcgtgtttaggccacgaggtgagacctaggactgggttctggctctctgccctgcaactttcctgccactacccgcgcccgtatccctgcccaccaactgggggcgctccagtcggtgacagccaactttcactgctgccaccacaaccgcagggccccaattacctctctgttagaaatcggtttcagagcggtggaaccgcgggcgggaaaaagcccaggcgctgtctcgggtgccccttcgtgtcagccatcctctggtctctcgggtctccgaagctcggggctaactgggcgcgaaccgctgagcccgcctaccaaccaggccctttctcccgcccctctgcggctgaaaccctcaaggggttgcaggttcagctttcacttagagacagcaactccaaattcagggtcgctggggaaactaaggcaggactggggactctgagtgagaggtcagacgctggtcgcggactctttctcccgagaactggggatagctcttccgatagcccaaagcgattcatgcggatcctagaagaaagcgccgaggtccgggcggttggccggggagagcgaagcgccgcccacgcggctgggaaagcttggggtggcgctggcgggaggtggggccgggggcgggttcctggcggagggtggggcagacgtgggttaccgggtgtgccaaccaaaccctgaacagaggaggtggcggtggtggccctcgcctgtggcccccgtgctgcttgcactcgaactcgtcgccatggaggagctccaggagcctctgagaggacagctccggctctgcttcacgcaagctgcccggactagcctcttactgctcaggctcaacgacgctgccctgcgggcgctgcaag

SEQ ID NO: 13768 - DNA, 2300 bp, Homo sapien
ggcacgctcctgtagttacagctatgaaggaggctgaggtgggtggactgcttgaccccaggagttcgaggatgcagtgaactatgattgtgccactgcactccagcctgggcaactgagggacacctgcctcaaaaataaataaataaataaatatgtaattttttttcccttccaagttcacagattccctgaattgtatgatctgtaggcctaggtttagaatctctgcttctctaagcctcagatttatcatcagtccttagtgtttgacacattcctaacttattcactctctcacacttacaggcaactgtttcacactattttcacacctcaaccccaatcactcctccctcattctctctctcagttgcttcctacttcactgagaaaaatggaagcaatcagaaaaaaattttcagactcccaccacatctacctaacctctacacttacacccaccttctctgcctgtggcctgttaccataaacgaactgcccacactcctacctttaggctttagctaatcctgaatagatctcatgacctcaaacctattcaagggcactactgcagtaaatctcctacaccatcaaaattttggagatgttctaaaaattatttccgtcaacatggaacatgctatttctcccatcttaaaactttttcttgatcctatttcctccaccatgactcccatttctctgtccccgtattcagcaaaactcaggtttctttttgagatggagtctcactccagcctaagctggagtggagtggcgtgatctcagctcactgcaacattcacctctggggctcaagcgattctcctgcctcagcctcccaagtagctgggactacaggtgtgcgccaccacacctggttaatttttttgtagttttagtagagacagggtttcaccatgttgccctgggtggtctcgaactcctgagctcaggtaatccacctgcctcagcctcccaaagtgctgggattacaggcatgagctaccgcacccagcctcttttttttttttttttttttttttttttttttttgagatggaatctgccagcgcgcctggcctttttttctttttttgagacagggtctctctctgttgctcaggctgaagttcagtggcgaaaacatggctcactgcaacctgattcatggattcaagcgatcctcctgcttcagcctcctgagtagctgggactacaggcatgcaccgccatgcccagctaagagaccagctttatccattaccacaactgtttatcagattaggatattgccgcagagaaacagaaatagcacagattttaaagatcaactttattgaagtataatttacatacaaattttatgtgtattagccgggcgcggtggctcatccctgtaatcccagcactttgggaagccgaggcgggtggatcacgaggtcaggagatcaaaaccatcctggctaacacggtgaaaccccatctctactaaaaatacaaaacattagccaggcgtggtggtgggtgcccgtagtcccagttactcgggaggctgaggcaggagaatggcgtgaacccaggaggcggggcttgcagtgagcggagatcgtgccactgcactccagcctgggcgacagagcaagacttcgtctcaaaaaaaaaaaaaaaaatgtattttttttttatgagttttgacaaatgtataggtaattttatttgtagtagaggacgttaaggttcccggggattgtgcaggtccagggatttaacagagggatcctgtttaggaaacaggacaacatcggggctcttgggaaacataatcaaacaggaacaagtggagacaccaagggctggccagaggttggtgctggggtctcagtgcaccaggatctggccctctggaatgcctggcgacttcatggcagctcctggccctcctcagggagcggtctcaccactctgacgcgtgtttaggccacgaggtgagacctaggactgggttctggctctctgccctgcaactttcctgccactacccgcgcccgtatccctgcccaccaactgggggcgctccagtcggtgacagccaactttcactgctgccaccacaaccgcagggccccaattacctctctgttagaaatcggtttcagagcggtggaaccgcgggcgggaaaaagcccaggcgctgtctcgggtgccccttcgtgtcagccatcctctggtctctcgggtctccgaagctcggggctaactgggcgcgaaccgctgagcccgcctaccaacca

SEQ ID NO: 13769 - DNA, 2300 bp, Homo sapien
tcaagcctgtaatcccagcactttgggaggctggggtgggtagatcacttgaggtcaggagttcgagaccagcctggccaacatggtgaaaccctgtctctactaaaaaaaaatacagtccgagcacagtggcttgcacctgttatcccagcactgtgggaggccgaggcaggtggatcacctgaggtcaggagtttgagaccagcctgaccaacatggttaaagcctgtctctactaaaaaatacaaaaattagccgagcgtggtggcacgcacctgtaggcccagctactcgggaagctgaggcaggagaattgcttgaacctgggaggtggaggttgcagtgagccgaaatcgcaccactgtactccaacctgggcgacagagcaagactccatctcaaaaaaaaaaaaaaaaaattatccgggcgtggtggcgggtgcctgtaatcccagctactcgggaggctgagaaaggagaatcgcttgaatacaagatggtggaggttgcagtgagccgagagcataccactccagcctccagcctgggtaacagagtaagactgtctcaaaaaaaaccaaaaattcatatatatagacagacatataaatacatatatggatattagagagagagaggcagacagggagagggagagagagaaagtgtgagagagcttttttctctgtatctttcatgattataggaatatgctgtgctcatcaagatatacccaattgtggctgtgcaccgtggctcacacctgtaatccttgcactttggggggccaaggagggcggatcacctgaggtcaggagttccagaccagcctagccaacatgatggaatcccatctccagaaaaacaaaaatacaaaaattagccgggcatgatggcgggtgcctgtaatcgcagctacttgggaggctgaggtgggagaatagcttgaacacaggaagcagaggttgcagtgagccgagatcacgccaatgcactccagcttgggtgtctcttattaactgtttatttattatttattttgagatggagtctggctctgtcgcccaggctggagggcagtggcgtgatctcggctcactgcaagctgctgctcctgggttcacacggttctccggcctcagcctctcaagtagctgggactacaggcgcctgccaccacacccagctattttttttttttgtatttttagtagagacggggttttaccgtgttagccaggatggtctcgatgtcctgacctcgtgatccacccgcctctgcctcccaaagtgctgggattacaggcgtgagccaccttgcccagcctttcttattaactcttttttttttgagatgcagtctcgctctgtcgcccaggctagagtgcagtggtgcgatctcggctcactgcaagctccatctaccgggttcacgccattctcctgcctcagcctcctgagtagctgggactacaggcgcccgccaccacgcccggctaattcttattaactttttttttagacgggatctcgcactgtcgcctgggctggagtgcaatggcgcgatctcggctcactgcaacttccgcctcccgggttcaagcgattctcctgcctcagcctcccaagtagctggaattacaggcgcgccaccacgcccggctaattttttgtatttttagggttttcaccattgttggtcaggctgctggtctcgaactcctgaccttctgatctgcccacctcagcctcccaaagtgctgggattacaggcgtgagccaccacgcccggccctccagggtcttaatacaaaaccgggtggctggtggcgatggtacagtaagaaaagctccagaggggaaaagcgaatatgtgaattatctaatctcagccactgatccaactccatagtctgtgacttttggagtcctccaatacttccaagctgcatgttcacatttaaagtttctgggggaaaacgaacagggtagagttttaggaaataccagatgttgctgcgattttctacagtgaaggggcgtggaaggggacaatgggagtagaagcgggtttctgaagttgtgtttgtacttgattttaagcgagctgtgaacaactcgtgtccaaataagtggctgagaggtggtcctaagtaagcacaagtttagtagtagagtactcgtaacacagaactggctgaaaccccgccctcttgtctacgggcgttctttcagggcgactttgtcagtaccccaaactgtccccgcatgaggtcactctgcacggtcacgtgctcgagc

SEQ ID NO: 13770 - DNA, 2300 bp, Homo sapien
ggttgcagtgagccgagagcataccactccagcctccagcctgggtaacagagtaagactgtctcaaaaaaaaccaaaaattcatatatatagacagacatataaatacatatatggatattagagagagagaggcagacagggagagggagagagagaaagtgtgagagagcttttttctctgtatctttcatgattataggaatatgctgtgctcatcaagatatacccaattgtggctgtgcaccgtggctcacacctgtaatccttgcactttggggggccaaggagggcggatcacctgaggtcaggagttccagaccagcctagccaacatgatggaatcccatctccagaaaaacaaaaatacaaaaattagccgggcatgatggcgggtgcctgtaatcgcagctacttgggaggctgaggtgggagaatagcttgaacacaggaagcagaggttgcagtgagccgagatcacgccaatgcactccagcttgggtgtctcttattaactgtttatttattatttattttgagatggagtctggctctgtcgcccaggctggagggcagtggcgtgatctcggctcactgcaagctgctgctcctgggttcacacggttctccggcctcagcctctcaagtagctgggactacaggcgcctgccaccacacccagctattttttttttttgtatttttagtagagacggggttttaccgtgttagccaggatggtctcgatgtcctgacctcgtgatccacccgcctctgcctcccaaagtgctgggattacaggcgtgagccaccttgcccagcctttcttattaactcttttttttttgagatgcagtctcgctctgtcgcccaggctagagtgcagtggtgcgatctcggctcactgcaagctccatctaccgggttcacgccattctcctgcctcagcctcctgagtagctgggactacaggcgcccgccaccacgcccggctaattcttattaactttttttttagacgggatctcgcactgtcgcctgggctggagtgcaatggcgcgatctcggctcactgcaacttccgcctcccgggttcaagcgattctcctgcctcagcctcccaagtagctggaattacaggcgcgccaccacgcccggctaattttttgtatttttagggttttcaccattgttggtcaggctgctggtctcgaactcctgaccttctgatctgcccacctcagcctcccaaagtgctgggattacaggcgtgagccaccacgcccggccctccagggtcttaatacaaaaccgggtggctggtggcgatggtacagtaagaaaagctccagaggggaaaagcgaatatgtgaattatctaatctcagccactgatccaactccatagtctgtgacttttggagtcctccaatacttccaagctgcatgttcacatttaaagtttctgggggaaaacgaacagggtagagttttaggaaataccagatgttgctgcgattttctacagtgaaggggcgtggaaggggacaatgggagtagaagcgggtttctgaagttgtgtttgtacttgattttaagcgagctgtgaacaactcgtgtccaaataagtggctgagaggtggtcctaagtaagcacaagtttagtagtagagtactcgtaacacagaactggctgaaaccccgccctcttgtctacgggcgttctttcagggcgactttgtcagtaccccaaactgtccccgcatgaggtcactctgcacggtcacgtgctcgagcccgcgggagcgccacatcgccagccgcacccctccacccccaacctgcccacgtgacccggcctagtttctccaggcccgtccctacgtctcactcgggaagccccgccccacgctgagcgctccgcctgcgaccctccgccacttacccaccccggctcaagcacgacccgtggatccacgtgctttttcttgtccaatgggagccggctcccgggcgcgaaggggcggggaggaaaggaacgactgtgctacgttgccagaaggggcgggacctgcaacgtccgacagaacgaggggacgtaacggaggcaggttggagccgctgccgtcgccatgacccgtgagcaccgagcccccttctccttgcccttttctttccgttcaccctaaacaccaccggcgaggcgccggctttgaccttccgtagcttccctagcaaggcgtttctctgggcgcgctctgtggccaccctcacactcggtgcccggaaatcgagccctt

SEQ ID NO: 13771 - DNA, 2300 bp, Homo sapien
gccaggtaggaggcctcattgctgagaaagaatagagttcttaagctggtttagttaaatagggattatctgggggcatttactaccaattggtccatactggtaatcctcaaaagggtaccatactccctgtgcccttttccaccaaagatttagaattctattcatgtgagagccctaaggtctttggacatattttaaattctcaagtcattccccccacccccttcatctcatacagatcatctgacaaagtactattcttagaatttgtccctgtttgtggggagcttttctcactctagtcttgctctaaactttaaataatggtcccagacattgtcctgaccatccttccctgtcttgggcaccctcctttcatacctccacccttgacacctttacgcaccaagcaaaaagcacacaagcatacatgatgctagcactcagcattgctagagagatatctggtgtttggggttccattttactcaggccaggcaggcacagggtgtgattctgtccttgaaggattactgggaagggacaacagaagagatgggtattaacaatgagctaggtatttggcaggggcaaaaaaaggtcttagcatggagaatccaggtcctgtcccttacctctctctggaggacggctggacagtgcagagaaagtcagatacatgatatagcagctgatgacagaagcttgtaggaggccagagcggggttgctctggggagtaagtataattgctttagtctacaggctggtaatttcctccatttctacccccacttgtacttctgtctccccatcctttggtggggatagggaagcagagattcttttatcaaataattgagattagggaggtaatgaaacttgctatgcttttaaggcccccaaaacctggaatgctgtaggacatgtacccactgaggcggatgcaaggagcgatggagaggaaggagatgaggccacagaagcaaaggtgcagactgaggagcatcttgttaagcaggcagccagctgggtgtgtataatagtggaataggagcacagctcccacacctgccatgctgtagaatcctagggtggccagcaggacagccaggaaccagctacagtcttgagctgcacctgtctgcctaagggtggaaagtgggcaatggcttggagctccagcattttttttttttttgagttgggagtcttgctctgttgcccaggctggagtgcaatggtgtggtctcagctcactgcaacctccgcctcttgggttcaagtgattctcctacctcagcctcctgagtagctgggattacaggcacctaccaccatgtccagctaacttttatatttttactagagatggggtttcaccatgttggccaggctggtctcaaactcctgacctcatgatccacccacctcggcctcccaaagtgctgggattacaggcatgagccaccgtgcccagctggagctccaactcttttacccattaccaactactcccctgctctcagaagactggtgtgactagccatcctacttggcccacgcagtcatcacattcctaagcttttttgatactgctcagtgggaagctgtgggaccagtgctctgccgtgccttttgcccagccctttccatgtagtaatactagaaacctccccaggaaaagcctttagggttatgtgccccttaccagttcttgttccaggaatgggcaaaagctgtaataagcaccaactgcagtaggatgaatgcaaagcctccacagatgccaatgtaatgccatgctgcaagatgggcaccagtggaaaaatgtcaaattgttacttttttttttttttgagacagagtcttgctctgtcacccaggctagagtgcagtggtgtgatttcagctcactgcaacctctgcctcccgggttcaagtgattcttctgcctccacctcctgagcagctgggattacaggtgcgtgccaccatgcccggctaatattttgtatttttagtagagatggggtttcaccatgttagccaggattgtcttgatctcttgacctcgtgatccgcccgcctcagcctcccaaagtgctgggattacaggcgtgagccactgcacccggccattactcctcttcttacccacttgttatcttagaaaacttagcctactcctgccaagagtgtgggagggagagtacctgggaagagatgctcatcaggaatgcagaaggcaatagcacagagacctaacaggaacagcagcttgaggagccagaagct

SEQ ID NO: 13772 - DNA, 2300 bp, Homo sapien
acaggcgtgagccactgcacccggccattactcctcttcttacccacttgttatcttagaaaacttagcctactcctgccaagagtgtgggagggagagtacctgggaagagatgctcatcaggaatgcagaaggcaatagcacagagacctaacaggaacagcagcttgaggagccagaagctggttaggagggagaaagaaaaacagactcaggagaaaaggcaaaggacagtgaagagtgcctatggggaaaggcaaaagagaaaccaaaaatataggaaagaggacagacgagacaactaaggaggaaccaatcccaaatgagagggggttgggacaggcctactgcaccttattccaaattctaactcaaagatacttaatagcatctgggcaatgttttacagtttataaaggattgtgttaccaagataaccccactgttacctccattttagatgctagaagcacaaagtctggctcaaggttacacagcaagtacacgagaagcagggacttaaacctgttttctgtctttttacagtgctattacttcatcccggaatttcctttacccagcctatgtctactttccctcctctgtcccctccccacccagaaagtacacacaaacctattatgcagctgtgcccgcgggctggtgggggagtggaggtggaccagcaacacagcctgcagcaggtggaaggtggcggttcctgcacatactcggtacacagccccagagccactgagcactggacagtcagagaggccaaacaggtgggcacacaaccccgagggcatctggatctgggagtgtgtgtgagagaaatggcaggacaagtcataatgcatggaaaggtacctacttgtcacgggtatgaccactcatttgtctcctgcccccaaccgaaaccttttctatcttagggtttttccttttatctcttcccacctgacaacccgaccccctctcacttaccctgtgtgtcttgccccacaccctttccactactgtccttgacagcaggaggcagcagattgctgaggcccccacatggaggaggatgtagaacaggcggctgcaagtggatgcggtgagagagggccacctagagtggcagcagctggcacaaggagcaggcccacagcagcacacctgggagtagagcagatgcaaggcagcgaggtggagacttgctgaggaaaggcatacgttaatgtatgtgtgaggttaacccaggaggttgaattccaaaatttccccttcccctttcttccttttactcaggttctgtttcaagctgattccagccatttgggattgccgcccactgacaacttagtagggctttcattataagcaggcttgagatatctgacctttctctcgacctaaacacctggggctggaaacatggcgggagagatttacagattatacctggggcaacgaaccagaacgacattagaggagaaaagaggcctgtcgtttttattggcttctgcacgtcttcctccccagcttcggccactctccccttcgcaccctctcacctgacagaagggacttttcactaggacactgctgcctccgctgtgctgctgtgccaggcccagggaggtgccggggctggggccggccttggcacccaccatccttgtcccagggattaggcttaggtccaccagatggaaggcagatgagagcagcagttgcttctgtcctcagcccattggactgccactgtgttggggctgagcacccggtcccgggcagaatggagacgtccggaagagaacactgacctccaggttgcggtaaatgcaaatgccctgtgaaggagctttgtccttagggcctcaacactgcggccactcaggctgttctctccagattagggggcagtttgtctatctggccccctgtggattagcattctttattggtttaggattagacgtcattcaggttgaacggagttccctgaggtgggtgggtgcgtgtttatgtgttgaggggactattcctagtttatgaggtggttaaggatatcggtggggtgggctggagcggtgtcgggttaggtctgagagaaggcctcgcacaaaacactgtacaaacccgaaaggaagtctgagagacgaaccgccttcctccctgaagcttctagaactggagcagaaagaaggtgtggcccagggccagccccgcctcctccccgggcggaagctgtgtcagttgccggaagtcggcgtgaggtggggcttatgcggcggcgtggtgaaatagat

SEQ ID NO: 13773 - DNA, 2300 bp, Homo sapien
ccggggagggaagaactgttaaagttggctgcccctgaagacttaccgctcctgtttggctttctgctcccgggaccttctgtctccaatcacagacatggcctatgggaaaggcaggtctagttactgcaccgctacccacaattcccaataatctaaaaggccaacaaaacaagcggttcatgcatggattcacgatgacaagtgttaccaggtagcaaggactatgtttaattccattctatgcacctgaggtccccttaagcccactatcaagctcctttaggcaagcggcgcgctccggtgaccgctgtttccctcggctctaccctattgcctcctcctgccaacgggatcagaaccccgtcttggagcgctggcttccagctacagcctcagagcccccctctgctctcagcccgccccgacatgctcttggccaaccttaccgtctccagattggaactctggatctccttctcctctgcatagtcggtgacccgctccaagtccgccgcaccgctgtcatgtttccgtggcttctccggaggccgctctggtccactggtctcagtctccaactccagctccacatccccctcggtcgccatatctatttcaccacgccgccgcataagccccacctcacgccgacttccggcaactgacacagcttccgcccggggaggaggcggggctggccctgggccacaccttctttctgctccagttctagaagcttcagggaggaaggcggttcgtctctcagacttcctttcgggtttgtacagtgttttgtgcgaggccttctctcagacctaacccgacaccgctccagcccaccccaccgatatccttaaccacctcataaactaggaatagtcccctcaacacataaacacgcacccacccacctcagggaactccgttcaacctgaatgacgtctaatcctaaaccaataaagaatgctaatccacagggggccagatagacaaactgccccctaatctggagagaacagcctgagtggccgcagtgttgaggccctaaggacaaagctccttcacagggcatttgcatttaccgcaacctggaggtcagtgttctcttccggacgtctccattctgcccgggaccgggtgctcagccccaacacagtggcagtccaatgggctgaggacagaagcaactgctgctctcatctgccttccatctggtggacctaagcctaatccctgggacaaggatggtgggtgccaaggccggccccagccccggcacctccctgggcctggcacagcagcacagcggaggcagcagtgtcctagtgaaaagtcccttctgtcaggtgagagggtgcgaaggggagagtggccgaagctggggaggaagacgtgcagaagccaataaaaacgacaggcctcttttctcctctaatgtcgttctggttcgttgccccaggtataatctgtaaatctctcccgccatgtttccagccccaggtgtttaggtcgagagaaaggtcagatatctcaagcctgcttataatgaaagccctactaagttgtcagtgggcggcaatcccaaatggctggaatcagcttgaaacagaacctgagtaaaaggaagaaaggggaaggggaaattttggaattcaacctcctgggttaacctcacacatacattaacgtatgcctttcctcagcaagtctccacctcgctgccttgcatctgctctactcccaggtgtgctgctgtgggcctgctccttgtgccagctgctgccactctaggtggccctctctcaccgcatccacttgcagccgcctgttctacatcctcctccatgtgggggcctcagcaatctgctgcctcctgctgtcaaggacagtagtggaaagggtgtggggcaagacacacagggtaagtgagagggggtcgggttgtcaggtgggaagagataaaaggaaaaaccctaagatagaaaaggtttcggttgggggcaggagacaaatgagtggtcatacccgtgacaagtaggtacctttccatgcattatgacttgtcctgccatttctctcacacacactcccagatccagatgccctcggggttgtgtgcccacctgtttggcctctctgactgtccagtgctcagtggctctggggctgtgtaccgagtatgtgcaggaaccgccaccttccacctgctgcaggctgtgttgctggtccacctccactcccccaccagcccgcgggcacagctgcataataggtttgtgtgtactttctgggtgggg

SEQ ID NO: 13774 - DNA, 2300 bp, Homo sapien
cctacatctatctatatatatagtggctcctaggcaggtagctggccttttagatattcataagctgtcttggagacacatgccatttgagtacagtaactctgctgagactccagatgtaccttgaatactgttgagagctagtcagatgaatgagactggcctgccacctagcatctgcacatgaggtattcttctacactgatttttcatacaggtgtgctagattttaatgggtcacttaaattcagttagtctccaacatataaattctccacaacataggatatagtatacactctacttgacccaagatgataaaactgaaaaagacaaaaaaaaattttattgccataaattaatccagtaggtatatttgagaaagcacgcatcagttggttagggcaataagcgcctctaccacgttgcccatgtgttcccgcaaactgcgttctgctgctgctcgagatatctccatctcagtcatctgcagaaaaaaatcatgttacataggttcccaggcattaatgtgccaccaaatatactgactccgcttgtttcaggaaacaacccaaattaagcagaatagcctcccctccgcatacactagttaggcactaccactcactattagctccagatcttccttcttgatagtgacttttgccagttctttctccctgcaaaaatatttaaatatattagtcctcattctcaaccaacaccataaactcccaggaagggtcattcccagaagtgccctgtaaataaatcttgataaacccttgattgaaaataaaaactcccactaatactcctttcccctggagtcttggcagcaggtgttgccaggaggccttctgctaacaagagtaaagttgtggcgcctagatctgcaggaattggtgataaatttgaagaacggtataaaggcttaataatggtttttatttttgtctggggaccggggagggaagaactgttaaagttggctgcccctgaagacttaccgctcctgtttggctttctgctcccgggaccttctgtctccaatcacagacatggcctatgggaaaggcaggtctagttactgcaccgctacccacaattcccaataatctaaaaggccaacaaaacaagcggttcatgcatggattcacgatgacaagtgttaccaggtagcaaggactatgtttaattccattctatgcacctgaggtccccttaagcccactatcaagctcctttaggcaagcggcgcgctccggtgaccgctgtttccctcggctctaccctattgcctcctcctgccaacgggatcagaaccccgtcttggagcgctggcttccagctacagcctcagagcccccctctgctctcagcccgccccgacatgctcttggccaaccttaccgtctccagattggaactctggatctccttctcctctgcatagtcggtgacccgctccaagtccgccgcaccgctgtcatgtttccgtggcttctccggaggccgctctggtccactggtctcagtctccaactccagctccacatccccctcggtcgccatatctatttcaccacgccgccgcataagccccacctcacgccgacttccggcaactgacacagcttccgcccggggaggaggcggggctggccctgggccacaccttctttctgctccagttctagaagcttcagggaggaaggcggttcgtctctcagacttcctttcgggtttgtacagtgttttgtgcgaggccttctctcagacctaacccgacaccgctccagcccaccccaccgatatccttaaccacctcataaactaggaatagtcccctcaacacataaacacgcacccacccacctcagggaactccgttcaacctgaatgacgtctaatcctaaaccaataaagaatgctaatccacagggggccagatagacaaactgccccctaatctggagagaacagcctgagtggccgcagtgttgaggccctaaggacaaagctccttcacagggcatttgcatttaccgcaacctggaggtcagtgttctcttccggacgtctccattctgcccgggaccgggtgctcagccccaacacagtggcagtccaatgggctgaggacagaagcaactgctgctctcatctgccttccatctggtggacctaagcctaatccctgggacaaggatggtgggtgccaaggccggccccagccccggcacctccctgggcctggcacagcagcacagcggaggcagcagtgtcctagtgaaaag

SEQ ID NO: 13775 - DNA, 2300 bp, Homo sapien
cgcctgtaatcctaagcactttgggaggctgaggcggcggatcacctgaggtcaggagtttgagaccagcctggccaacatgacgaaaccccgtctctactaaaattacaaaaattagccgggcttggtggcgcgtgcctgtaatcccagttactcaggaggctgaggcagaattgcttgaacccagggggcagaggttgcagtgagctgagatcgcgccattgcactccagtctgggcaacaagagtgagactccgtctcaaaaaaaaaaaaatgctgtcttaaagccctagactcaaattctttagggatgtcctggggctgaactgacatttttacctttgactggtgattttgattctggtggtactgggatgtcgctttgaaaaacactaacaggccgggagcggtggctaacgcctgtaatcccaacactttgagaggccgagaggagtggatcacttgggcccaggagttccaaaccagcctgggcaacatagtgagaccccatctctataaaaaatacaaaaattagcccagcgtggtgttgtacgtctgtagtcccagctactcagaaggcaggggtgggaaaatggcttgaacctagaaggatgaggccacagtgagccgtgattgcgcggaactccagcctgagcgacagagcaagaccctcttctataaataataaaataagattctggctattctctttaaggttccttctagcccaaaactgtttccttggttgcttagttgggtcccacactgttccttgcctgagatttgtccagtttcatttcttctcccactcaaggcccaattgtagaacacaggtgaagtaatttgggttaatcatattaatagcaacttcaaggcccctcatgactcaaaaattactgataaaaccaaacttttcatggtgtcctgtataaaacatactgtttctggactttaagactttgttcctactgtcccttgtctcccccgcagttataaagtcctttctactgtgaaatgtgtcctgactttccaattagccaatattatatatattttttaacacgactcagcttgtaaattggagctgcttctgttattatcctgtaagtccttaaagagttcttaaataggccgggtgcggtggctcacctctgtaatcccagcactttggggaggccgaggtaggtggatcatctgaggtcaggagttcaagaccagcctgggcaacatggcgaaaccctgcctctactaaaaatacaaaaattagccgggagtggtggcccacgccaacactcagcactgtgggaggccggagtgggcggatcacttaagcctggccaacatggtgaaacctcgtctctactaaaaatacaaaaatcagcagggagtggtggcaggcgcctgtaatcccagctaatcagaaggctgaggcacgagaattgcttaaacccgggaggtggagactgcagtgagctgagatcgagccactgcactccagcctgggtgacagaaaaagacagtctcaaaagaataataattacttagatatttaaatacaaacattttctagccaggaatgtattttaataggtagtttccagaaactggaaaaacctgaaagcctaaaaaagtggagttttgggatttcaggtgggcaatgtcccaggcacctcgggagttttttttttttttttttcggtcactggcctaaatcagcaccacctgccctgtgaaaccaaataccgcaccacagcccaccctggccttatgaactaagctaatcggatactactggcaagatttttattccatcaaactctacttcttctgagctttcaacaagccattcaaacagtaactcactgtcgcctgagtttcttattcactataccgttcttggcttcaaaccaagctaacacgtaaaatctttcattcgaaccttcctcaccgcagagtcctaacagcaaagcccaaaggaagcaaaatttcccgccaaaagctgcttccaaattctgcgacgtagaggacatgcgggcagccaatgagcatgcgcagaaaccgactcgacttcctagctgtgggcgcccaaacgtcgtccaccatcccacaatcctctcgtcacgtatttccggtttatctagctcagccgtaagtagtttctctatcagtcgcgcagctgtgttcgcggactcaggtggaaggaatttcttctcttcgttgacgttgctggtgttcactgtttggaattagtcaagtttcgggaatcaccgtcgctgccatcaacatgtcggtcccaagcg

SEQ ID NO: 13776 - DNA, 2300 bp, Homo sapien
gaggaaggttcgaatgaaagattttacgtgttagcttggtttgaagccaagaacggtatagtgaataagaaactcaggcgacagtgagttactgtttgaatggcttgttgaaagctcagaagaagtagagtttgatggaataaaaatcttgccagtagtatccgattagcttagttcataaggccagggtgggctgtggtgcggtatttggtttcacagggcaggtggtgctgatttaggccagtgaccgaaaaaaaaaaaaaaaaaactcccgaggtgcctgggacattgcccacctgaaatcccaaaactccacttttttaggctttcaggtttttccagtttctggaaactacctattaaaatacattcctggctagaaaatgtttgtatttaaatatctaagtaattattattcttttgagactgtctttttctgtcacccaggctggagtgcagtggctcgatctcagctcactgcagtctccacctcccgggtttaagcaattctcgtgcctcagccttctgattagctgggattacaggcgcctgccaccactccctgctgatttttgtatttttagtagagacgaggtttcaccatgttggccaggcttaagtgatccgcccactccggcctcccacagtgctgagtgttggcgtgggccaccactcccggctaatttttgtatttttagtagaggcagggtttcgccatgttgcccaggctggtcttgaactcctgacctcagatgatccacctacctcggcctccccaaagtgctgggattacagaggtgagccaccgcacccggcctatttaagaactctttaaggacttacaggataataacagaagcagctccaatttacaagctgagtcgtgttaaaaaatatatataatattggctaattggaaagtcaggacacatttcacagtagaaaggactttataactgcgggggagacaagggacagtaggaacaaagtcttaaagtccagaaacagtatgttttatacaggacaccatgaaaagtttggttttatcagtaatttttgagtcatgaggggccttgaagttgctattaatatgattaacccaaattacttcacctgtgttctacaattgggccttgagtgggagaagaaatgaaactggacaaatctcaggcaaggaacagtgtgggacccaactaagcaaccaaggaaacagttttgggctagaaggaaccttaaagagaatagccagaatcttattttattatttatagaagagggtcttgctctgtcgctcaggctggagttccgcgcaatcacggctcactgtggcctcatccttctaggttcaagccattttcccacccctgccttctgagtagctgggactacagacgtacaacaccacgctgggctaatttttgtattttttatagagatggggtctcactatgttgcccaggctggtttggaactcctgggcccaagtgatccactcctctcggcctctcaaagtgttgggattacaggcgttagccaccgctcccggcctgttagtgtttttcaaagcgacatcccagtaccaccagaatcaaaatcaccagtcaaaggtaaaaatgtcagttcagccccaggacatccctaaagaatttgagtctagggctttaagacagcatttttttttttttgagacggagtctcactcttgttgcccagactggagtgcaatggcgcgatctcagctcactgcaacctctgccccctgggttcaagcaattctgcctcagcctcctgagtaactgggattacaggcacgcgccaccaagcccggctaatttttgtaattttagtagagacggggtttcgtcatgttggccaggctggtctcaaactcctgacctcaggtgatccgccgcctcagcctcccaaagtgcttaggattacaggcgggagccaccgcgcctggccaaggcggccttcttaagaagcgcgcgtaaaaccccaacttcctgctctggcgctgcggccgctggggatctgagtgggctccgccccgcctcggacccgcccctcccggcctcccgccgcaatcttggcgggaaggcgccggccgctaagaagccgaaagatgtccaggtcgggcgcggcggctgagaaggcggactccagacagcgaccccagatgaaggtgagaaacggactggtgcttccaaggtgtgctcctgcctcggtttttgtgagggttatgcgggacacaggcccaggaggtcgagggcacctggcaccgggggtaggcgggggat

SEQ ID NO: 13777 - DNA, 2300 bp, Homo sapien
caataagctctcaagtgatgctgatacccctgatatgtgggctacactttgagtagcaagcgctgaggagagaagatggcttggttgctccctcatttctgtttgttaattgcttgaatcttcaagcccaagcctctcagagttacctgctaggaccccttcctaccacctcctagaagttgcactgtcaacagccctcttcctgttgagcatttttacatgatcaagtggacaaggaatcctctgtttcattcttcagcccgaaaacagaaacaatggaaacctccaactgtccagggaggggtcaatttctttttggttcagactgttcgaatttaaaggaattttactacattttcattactcccctagggatgctggaccataaaagttaaaataacaagcgtttaattgtctcagagtgtctatgggtcaggaattcaagagcagcttagctgggtggttctggctcagggtcaatcacgaggttgcagtcaggaggttggctggggctgcagtgatccacaggcttgactggaggtggggacttcatttccatgatgggtcattcaaatggctgttggccgaaagcctcagttccttgctggctgttggcaaaggccccagttcctcaccacatggacctttctataggactgctgaagcaacctcaagaagaatgagtgatccaagggcaagagaacaaggaggaagctgcaatgactttatgatctcagaagtcagacactcactcatgctttattctattgatagaagtgagtcaccaagtctaagccatactcagagaaggaattaagctctacctcatgaaattaggattatcaaagaatctgtggaaatatttttaaatcaccagagatgctccctggccaaggagccaccatggtaggtgacccactcaagggactgatgctcctcataatcttacaggtcttctaagaagagcaataaagaccacactccttgtgaagacatttcaaaatggaaagtcatcaattccattccactgtgacagggtccatccaactagtgaaactgcaaagcatttatagtgcaaggagggcagaatatcatagtgatgaagagccaagtttaggggtctcacagtgctgaagttgaatcctggctctttcacttagttgtacgtccatgagaaaatcactaaagcctcagcttctctatctgtaataatggggataataacagtacctatctcaaagtgtcatgtgagaattaaataagttattgcatgtaaagtgtgtaacacctggactggcagatcgtaagtgctcaatacatgtcagctactatttgctcttgtttttgatatcctgcttccacctgaggcaacagctttctgtatttaaagaggtgctggccccaggtttctgcttcatttgtgtgcttctttcaccagtgcctcttgttgcaattttttttttttttttttttttttttttgagacaaggtctctccgattgcccaggctagagtgcagtagcacaatctcggctcactcttcttacactttattccatttcaaaggtctggttgacctcggtaactgcaggctgtttccacatatggacagattctcttggtaagttgaggctgaactcttcctgggctagttccttcacccaccattctacttaagaaggaacatcagctggcatccaaggcggagagaggcccagtttgccagtctctgatggcatagttttctttttcggcaccagatcgactggggctggctccttccaaagctcagcactgtggggtgatgcttttaccaggaaacagccatttctgacttgagctacaggaggaaactggcatatttttaactgaacctcaagtcagttcagggcaaagtacctgaaagagtttccagggaaatggagaatgtatttgttctacattatgttttaggatttttttttaatgtagtaaaagtatcctgacaaagattttgataggcttacaatacatatttctatctttaaagcaatcaaagaaatcctttatagtttattctctgttttctctccaggtatttagtcttcctgcagatcaaaagggatctctaccatggccgactcctctgtaaaacatcggatgctgccttgttagcagcttacatccttcaaggtaatgacttttgacaggataagtttgcttttcatgccaagtactgattacattattttcagttagcactgatgactccttcttgaatctaaacattatctaggccaggtgctgtggctcacgcttgt

SEQ ID NO: 13778 - DNA, 2300 bp, Homo sapien
ttatgcctatttcattattttaaattaatatatttattacagcattaatgttctatgttgacacgattattttttttttttgagacggtggcttgctcttgtcccccaggctggagtgcaatggccgtgatcttggttcactgcaacctctgcctcctgggttcaagcgattctcctgcctcagcctcccgagtagctgggattacaggtgcgtgctaccatgcacggctaatttttttgtatttttagtagagacggggattcaccatgttggtcaggctggtttcgaactcctgacatcaggtgatccgcccgcctcggcctcccaaagtgctgggattacaggcttgagccactgcgcccggccgacataattattttataacatttcctcacatcaaaaatctttgagggagaatatctcttattgaagttctggtaaaaaaccttgaagtctgtaaatttggggtgacaaagagaaggagacaattctttgtgatgtatacctcctgacatactatgttgttctattgagaaagtctgaagacataatttccagttctaaaagtgcaaggagaagattcattgcttcctctgctccctaccagctgaaggagcagtctccttttgtcttctgaaataaaaaggaggcaaagggtgttagagtggagggttttttaggggattaaacctgggtacttcagaacctctgaggtccctttagcttttatttaagtagctcctgtttcccaaaataagagggctggagcacagaggccagacgggccaacttagggtacagcacaggtcgggggcagtcgccctatctggagcgagaggtatccgcattctgcaggtgcagggactgtgatccagcaccctgccgcctcctcgctccggctcccaagagggcgggaaccgcggtgttgcagggtgcgaggcttggcttcggaaacgcagatcaagtgtatttcaggcggcagacatcaatccagttgggtgctcacacctggcccgggggaggggaaacagcatccataggaaccacggggcggagaggaacccctcgtttgggacgctagagggctgctccggcttgactaggtccgactgcttttctgtgattgcttctttatcccgcccatcatcccagtactctatctcgattggcttttcggtctgccactcggttccgccgcgctgacccccattggccccctccagttgaggccccgccccgcgagctgggcacgggcactggggcgccgaggagacagagcccggcgcttgatctgggctggggggaggcggtggcggctgagggaaggaggaggataaggaggaggaacgaggccagcaggaggcaacggcagcgacggggccggggtgatggtgcaggtgcctggggtcggtgcggagctgccgggctgagggacgcctggtccagggtccgcagcgccgccgcgtcgctcccgggcgggcgggcgggaagatgctgagcaggttgatgagcggcagcagcaggagcctggagcgcgagtacagctgcaccgtgcggctgctggacgacagcgagtacacctgcaccatccaggtcagcgccgcgccgccccgccccgcccgcgggacccccttgtcccccaagtctggtcaacttggccggcggcggccgccgcccaggggtcgccccagccccagcgccgtgctttgtccgttcctggttgcggcggaccgccctagtgcagggcgtcttcaccggagcccctgccggagccctggcacccggtgtgtcaccgccgccgcggggcgagtctccgcgtcccacacccctaagtcctaccctgctctccctgggtgagggcgccccgtcctggttcctcgagcccgcccgagtaaggtgcacctttccggggcgcccggagggaggcgggtagggcggtaggctcctagcccggccgccccgtcgggggcgcaggctttggctctctgcccgggcaaggacgtatggctggcttttcttatctttcttgggttggaaggataatggtttatgtcataattcctccccccaccatttgtgagtcagagctttcagaaggtagaactgaacgcgcagcccatgcggagtggcctattgaaggaagcccagtcctctgggttttagagatttaggccccctcccgccttttgatccccaaattttattgtgttgggcggttctaggggacgtgaggtaaagatttagcaacaagtcccagcgatttggggcttggaagtggccaggaagaatcggcgactta

SEQ ID NO: 13779 - DNA, 2300 bp, Homo sapien
ataacaaagctgagctttgtagaatatcactttggcatattaataattttacttgtctccaagatcttcctgaaattttgagtttcttcacaggtcttcttcctctgggatttaagtgctgtagaacacctgtcaattccatttacttcagttcatcaatttttttttttttagaccgagtcttgctctgttgcccaggctggagtgcagtggcacaatctcagctcactgcaatctctacctcccgggttccagcgattctcctgcctcagcctccccagtagctgggaccacgggcgcatgccaccacacccggctaatttttgtattcagttcaacacttattgaatacctattatgtttcaggcatcagactacctgctgaagctacaaagtagtggagcgcatgcctggttttatgcctggaacacttgacttactagttctagactcataactaactccatccaaattgcattgaaaagagaatcctgctcctatggctattaaatgccacaaaggagaatgcaaccaattaagagcagtccaggttactaaggtgatagaaagaaaaagggggagggagagggggaggaagagagagagagagagagagagaaagagagagagagagagagaatgaaagagaatgaatctccccatgcaaaaaaaaaaaaaaaaattggggaaaatattggaatccaaagacactagggaagaagcatactttaaaggcgggatagttttctaggctaatgtagagtttcatttttgttacacattatacctataaacaagaacagtgcaaatgaaagtaataggaaattatgcctatttcattattttaaattaatatatttattacagcattaatgttctatgttgacacgattattttttttttttgagacggtggcttgctcttgtcccccaggctggagtgcaatggccgtgatcttggttcactgcaacctctgcctcctgggttcaagcgattctcctgcctcagcctcccgagtagctgggattacaggtgcgtgctaccatgcacggctaatttttttgtatttttagtagagacggggattcaccatgttggtcaggctggtttcgaactcctgacatcaggtgatccgcccgcctcggcctcccaaagtgctgggattacaggcttgagccactgcgcccggccgacataattattttataacatttcctcacatcaaaaatctttgagggagaatatctcttattgaagttctggtaaaaaaccttgaagtctgtaaatttggggtgacaaagagaaggagacaattctttgtgatgtatacctcctgacatactatgttgttctattgagaaagtctgaagacataatttccagttctaaaagtgcaaggagaagattcattgcttcctctgctccctaccagctgaaggagcagtctccttttgtcttctgaaataaaaaggaggcaaagggtgttagagtggagggttttttaggggattaaacctgggtacttcagaacctctgaggtccctttagcttttatttaagtagctcctgtttcccaaaataagagggctggagcacagaggccagacgggccaacttagggtacagcacaggtcgggggcagtcgccctatctggagcgagaggtatccgcattctgcaggtgcagggactgtgatccagcaccctgccgcctcctcgctccggctcccaagagggcgggaaccgcggtgttgcagggtgcgaggcttggcttcggaaacgcagatcaagtgtatttcaggcggcagacatcaatccagttgggtgctcacacctggcccgggggaggggaaacagcatccataggaaccacggggcggagaggaacccctcgtttgggacgctagagggctgctccggcttgactaggtccgactgcttttctgtgattgcttctttatcccgcccatcatcccagtactctatctcgattggcttttcggtctgccactcggttccgccgcgctgacccccattggccccctccagttgaggccccgccccgcgagctgggcacgggcactggggcgccgaggagacagagcccggcgcttgatctgggctggggggaggcggtggcggctgagggaaggaggaggataaggaggaggaacgaggccagcaggaggcaacggcagcgacggggccggggtgatggtgcaggtgcctggggtcggtgcggagctgccgggctgagggacgcctggtccagggtccgcagcgccgccgcgtcgctcccg

SEQ ID NO: 13780 - DNA, 2300 bp, Homo sapien
tctggggaagagtggaaagaggattggtcatctcggccatttactacataaatgactttcggcaagttacctctgcacctgtaaaatggaataatggtacccaatagttctattaaacatctgttgaggaaatgtatgtgtatgtgttttgtacaatatttatacttttagatttgcctatgtaaaaatgaaaacactcgtgggaacagtaaatcttaagtagttaacataactttatagaataatttttttttctcttcagacggagtctcactctgttgcccaaggtggggtgcaatggcacgatctcggctcactgcaacctctgcctcaccgattcaagtgattctcctgcctcagcctcccgagtagctgaggctacaggggtgagccaccgcgcccggcctagaataattttcgattgctggttgagcagagcaaggccaatatgagttgaggaaagcagagatggaaaggctctttatagttaatgatttctcatttttgctttgcttccttttgccaaagtcggcttgtcatctgagagtggagaggatttgttagatcttatgaagccagagctcacttctgatgtgaaccaagtattaataattttggtggtggttttctgtactgcatctgagagagtaatcattgttctttgaagatgcaataattctacgctactacgggacttagggaaataatttttgaggataggaagcacagaataattaagatgacaagtcttcctgcctcaaaatcatatcactctgattcgaataaaaaataccaaggtttttccttcttgaggttttatactcatggaagttcttcaacctgaggtctgaaaaataaggcaaccccatcctctccttaaacaggttagagccagtacctttttatttctctatgcacggacaaaataattatgcaaaaaaaaaaaagaggcaggttttgtttttttttttgcactactgaaattcacacttaacatataaacaatctgctatatgcagacagcactggtgtttagagttcaatgatctggattcaagcctatttaaaaccagataagagaaagttcccaaacatctatgtgtcttggattcttcatctgtaaaattgcgttgttgagaagataatatgagactaggcgcgcaaaacaatttgttagagctattatttctaacccggaatgtgttcgctggcagtaacagtgcattagttacgattcatcgagggcagcttctggactttctgtttggaagcccagctgaggcaaaagcagcagtgcgtttaaaaattggagctcgccacattctgaaattctttcggttcgtgaaagcagtaacctaggaaacgagactggcaccacccctttcagtcctaaagcttggtttctcccgcttttctccattatgtttagggcatcgctattttacagtctttttgttttttctttccacatcattagcacaaaagagaaattccccttctacagaagcaagtacaaaacctttctagtcgctcctttttggcagcagctcacctactatttttttctattccgcggtcgcagccccagacgtcctcaaagacaaatattttcgcgagggccagtgtagggcaggaactccctaggccttgaatcaagggaatccagtagataacaacagaaaggactccgacccaggtacctgagacatctgagaccgccaaaattaacacaacaccctacgcgacagagaaaactctgggcggggagagagaaagagagcgagcgagcgagagagagagagagcgagagagagagagagagagagagagagagagagagagagagagagaaagagagcgagcgagagagagcgagagagcgagagagcgagagagcgagagagcgagagagagagagagagagagagagagagagagagagagagagagagagagagagagacgagaggaagcaacgttctcgcgacaagaggggtgtcgacggaaactcggaaatggtcccctagacgacccggccccagctagtgggtggggccagggtacatccgcccctttccggtttttttccccgcctcccaaccgtgaggtgttgggtttgggggacgctggcagctgggttctcccggttcccttgggcaggtgcagggtcgggttcaaagcctccggaacgcgttttggcctgatttgaggaggggggcggggagggacctgcggcttgcggccccgcccccttctccggctcgcagccgaccggtaagcccgcctcctccctcggccgg

SEQ ID NO: 13781 - DNA, 2300 bp, Homo sapien
aaatgtgggatttggagtcagaaagactgtggttagaattccttcttcacaattctctagttttgtgactttggacaaactgcttttttttttttttttttttctgagacagagtcttgctttgtcacccaggctggagtacagtggcccgatctcggctcactgcaacctctgcctcccgggttcaagcgattctcctgcctcagccttctgagtagctgggattacaagcatgcgccaccatgcccgactaatttttgtatttttagtagagacggggtttcgccatgttggtccggctgattttgaactcctgacttcatgatccacccgcctctgcctcccaaagtggtgggattacaggcatgaaccaccgtgcctggcccaaactacttaactttttctatttaatggagtgttgcactgttgcccaggctggagtgcagtggtgccatcttggctcactgcaagctccgcctcccgggtttacgccattctcctgcctcaggctcccaagtaactaggactacaggcacccgccaccacacccggctaattttttgtattttttagtagagtcggggttttactgtgttagccaggatggtctctatctcctgacctcgtgatccgcccacctcggcctcccgaagtgctgggattacaggcatgagccgccgtgcctggcccaaactgcttaagtttttaatacctcagttttgtttttctcaaaactattaattttatttctactagaggacagctatgaaggcaatttggaaactatgagacacgatgcaaatatttattgttgattttacttgccaggacactggaatacctacacctaattgtcagagtactctttctcctttattgtgacacactcttaagatttggctgttgtggccgggtacggtggctcacgcctgtaatcccagcactttgggaggccgaggttggcagatgacgaggtcaggagatcgagaccatcctggctaacacagtgaaaccccgtctctactaaaaatacaaaaaattagccgggtgtggtggtgggcacctgtagtcccagttactcgggaggctaaggcaggagaatggcatgaacctgggaggcggagcttggagtgagccgagatcgcgccactgcactccagcctgggcgacaaagcaagactccgtctcagaaataaataataataaaaaaaaatatttggctcttgtttttctagattccatatagatttttcgtactatttttataacattactaagaattatatttcatactgcattagagtttacaaagcatttatagatgcattaaatgttgactagaggaacctgtatatggcatcccaagcttgtgtacttgaatccttgctgctcccaattttccatggaggcaaacttaatactggtccaccaagagaattgagttaggcctaaccatgtacctgaagattcacatttccaagaagatgctaggttaggaacaggttagaggaagcactgacctgtttattgtcctgccactacttgctgtgtttcggtggccagcacacttaggaagaagattgcctgtttttcacccttgctcttgaagaggcacctgtgtaccagtctcctccttactgccatcctgcttggttctaacatatgcttacagagaacccaccctgcccatagcacccaggaagatgcccaattttaggccattagggtaacctagagtattcagcaggctgtcttgcagaatcacacacctcagcatagccaagcagagtcacctctgcctaccaaatcattcatttactgtagctagagattttcaaaagtgttattctttgactttttatcaggtataaaaatcacacagaaaataatgtatcctgcatctccaattgttcattatttgaacccatggtatatgttttacaagatgaactgtttcagaacatttaattaatagttgtgtcggtggtttaacaatttgaactgaaaaatattattaccaaattttgtctaacagcaagagacccaaaagattcaatcaaatgatggaaaggaattggatataaacaatcaagtagtacctaaaaatattccaaaagtagctgagaatgttgcagataagaatgaagaaccctcaagcaatcatattccacatgggaaaggtattattgttattattcttttgttttgtattaataggatattgactttttcttcccattttgaagtggatattttcaatcataaagaaaattgtttgattttagttcacacatgattaa

SEQ ID NO: 13782 - DNA, 2300 bp, Homo sapien
aaacttctggccacaagtgactcacatgcctcggtctttcaaagtgctggaattacaggcgtgagccacctttcctggccccttgtggcaattttttacccagatctctctagccaaaactataaaattgagagttttgattcagcactatcatttggtaataatgtagagaaaaatggaatgacgtggaaaatatgtgtaaaatacaaataaaaaagattataagatagtatatatgatataaccctaattttaaggtatacagtataatgtacagaaataaaaaaaaacccaccagagagatactcttcagatgataacagtggttatctttaagttgtagtactacagttaaagtttaatttctttgtgcttttctatttttccaagttttctataggaacatgttattaagaagtatatatatatattttttaaattatttatttatttatttatttatttatttttttgagacggagtcttgctctgtcacccaggctggagtgcagtggtgtgacctcggctcactgcaagctctgcgtcccgggttcacgccattctcctgcctcagcctcccaagtagctgggactacaggtgcccgccaccacgcccggctaatttttatttttttgtatttttaatagagacggggtttcacgatgttagccaggttggtttcgatttcctgacctcgtgagccgcccgcctcggctgcccaaagtgctggaattataggcgtgagccaccgcgccaggactttttttttttttttttttgagatagagttttcactcttatcgcccaggccgcagtgcagtggcctgatctcagctcactgcaacctccacctcccaggttcaagagattcttctgtctcagcctcctaagtagctgggattacagacacgcaccaccatgcccggctaattttttgtatttttagtagagatggggtttcaccttgttggccaagctgggcgacagagcaagactctgtctcaaaataagtaaataaaagaaaagaaaagaaaatttgagcaactaaaaataacatattcttaataccttacctaacttgtgtcaatttttatttgtgctatgcatataaaaaggtctcactgttgaagatcactgtatctgaagagattcattttatttatttatttatttgagatgaagtctctgtcacccaggttgcagtgcaatggcgcgatctcagctcactgcaacttccgcctcccagattcaagtgattctcctatctcagcctcctaagtagctgggattatagacacgcaccaccacgcccggctaattttttgtatttttagtagagatggggtttcaccttgttggccaagctgatcttgaactcctgaccttgtgatctgcccacctcaacttcccaaagtgctgggattacaggcgtgagccactgcgcccagtccattttattaattcatcaaatctttgttgaacttctcttacatgctaggcatgttctagatgttggggatatagtggtgacgaagacagtttgtactgtcatggagcttatattctgggcagatttattggtcaaaaaaatctgtgatggggccgggcgcggcggctcacacctataatcccagcactttgggaggctgagggaagcagatcacctgagatccagggttcgagaccagcctggccaacatggcgaaaccccatctctactgaaaataaaaaacttacccgggcgtggtggcgagcgcctataatcctagctattacggaggctgaggcagggagaatcgctggaacgcgggaggcagaggttgcagtgagttgagatcatgccattgcactccagcctgggagacagggcaagactctgtccccccaccaaaaaaaaaaattctgtgatgaatggtacagtgtatcaattagtaactgtaaataaattagcataccaactataaggattacaaaattagaataaacatcatagaattagtgcaatgtaaattgattcacggtggttttttttttttttttttttagaaatcatagtatcaatgggaataatatggatttattttttttcttctagctttaaggaagcctcctatttcagtttctcaacatgaaagtcatcaagcaatctcccatcttccaactggacaacctctctccccaaatatgcctccaggtatgaaggcttatgcttataattccatttgaaaccaacttactagtcatgtacagttatatagtgtataaaatatatcacttagcagtatagtgaaatagcatt

SEQ ID NO: 13783 - DNA, 2300 bp, Homo sapien
atcccagcactttgggaggccaaggcaggaagatggcttgaaccatggattttgaggttgcaatgagctttaattacttcagcctggggaatggagtgagaccctgtctctaaaaataaataaataaataaaataaactttagtaataatggggtaactgtttagttggtattttactgctttccatgatacactctggataaactaattatttgttggattccattgaacttttcaggaatctatttttgtgtgtgtggactgttactattaatagttctgtgctgtgtataccaccagctcccaataaatgtcgcattcagagcatttttgcactaggaagatttagggtgcaaatgaactctgacagaagaatctgtagtatacaaggttttcagaagacaacccacctgctccatacttcgaaataatgagattcacaacggtatgttatttctgcttacttctcagcctctcttgccatcttccccctgccctcccatcctcttttcttagcgcacagaactacttctccaatggctcaacacagtctcatctttggacttttccgtctgttgtttcctttacccagacactcttcccctgcaacacacactcctcctttttgtctcagatgttatcttacgaaaccttcccagaccccctcgccggcactctcatgtgttttacaacgcctatcatgccatccttgtattcgctttatcagtttttaaattctgtttacttgggtgtcttcttcaatagattatgatctttggccgggcgcggtggctcacgcctgtaataccagcactttgggaggccgaagcgggcggatcacgaggtcaggagtacgagaccagcctgaccaacgtggtgaaaccccgtctctactaaaaatacaaaaattagccggtcgtggtggcgcgcgcctgtaatcccagcttctcggggggctgaggcagaagaatcgcttgaacccgggaggtggaggtttgagccgagatcgcgccactgcactccatcctgggcgacagagtgaagactccgtctcgaaaaaaaaaaaaaatcattacctttggggaaggcagtatccgtgtctgcctggctcactgttttacccgtcgcacctagttattttttcaataaatatttcttgattgaataaggagagtggcttggagtttcagtgaaaaatgttcttccaaacactaggcttggttttccgataccccactagaactggattctctggactgatacattttcactctgtggagctgaccgtcctttgacctagggtcgcaggtgggagcccactggcctgaaagatccgagttttcaacctgcagaatcaccgccaacatagggttgagtcgaagggcatgaatatttatgatccaaaagcgactgctacgccctctaggcaatgagctggaaagggaaccttcaagggccaccgaaatcccaggaaaggcgccagattcgctttctcccggcctcaggcagctctccctacgaactacctcctccagcgcgccaagccgttagtcccgccttatcccctcagctccacctacccagcgcgcccacagttactaaaccctagccgccagggtgcactacgcgttcctaagccccgcctccggggcaagggcgcgctccccctcccagctctgcccaagcagttccgttaggagcgggaggaaaaaccgtccttcgggtccccgcctctccactcctaacgctttactccctactccccctgcgaccactacacagccggctacggaggcccctaatgtacaaatatcccccaggcccttgctcatcctgataggttttgtcctttcttaatcgacccagtactaaggccttgtgttcagtttttctccaggattcagactagagagtttcttccggcgtaaggaacttcaacgctcttcacggaagtaaaagtgtttttttggttgttgttgccgttgtggctgcccgcattccttccctcccacctcgcggaattgtggcgggagggggaggaggaagtcagggcgcctgcgcggagaggccgctttccatccgggtccctgtccgtgcggtgcagcaggtcggtaggcgggaaatggcgactggctgaaggagctggttctgttgctgctgcggggtaagcgggaaagacaccacacattgcgcagtcgggaccatcgccggagcctgaggacacttctctgtcgtcacagttaggtaatccccttcgtccagacgccgccgctgcttccaatctcagtcctcctcctctt

SEQ ID NO: 13784 - DNA, 2300 bp, Homo sapien
gttggtattttactgctttccatgatacactctggataaactaattatttgttggattccattgaacttttcaggaatctatttttgtgtgtgtggactgttactattaatagttctgtgctgtgtataccaccagctcccaataaatgtcgcattcagagcatttttgcactaggaagatttagggtgcaaatgaactctgacagaagaatctgtagtatacaaggttttcagaagacaacccacctgctccatacttcgaaataatgagattcacaacggtatgttatttctgcttacttctcagcctctcttgccatcttccccctgccctcccatcctcttttcttagcgcacagaactacttctccaatggctcaacacagtctcatctttggacttttccgtctgttgtttcctttacccagacactcttcccctgcaacacacactcctcctttttgtctcagatgttatcttacgaaaccttcccagaccccctcgccggcactctcatgtgttttacaacgcctatcatgccatccttgtattcgctttatcagtttttaaattctgtttacttgggtgtcttcttcaatagattatgatctttggccgggcgcggtggctcacgcctgtaataccagcactttgggaggccgaagcgggcggatcacgaggtcaggagtacgagaccagcctgaccaacgtggtgaaaccccgtctctactaaaaatacaaaaattagccggtcgtggtggcgcgcgcctgtaatcccagcttctcggggggctgaggcagaagaatcgcttgaacccgggaggtggaggtttgagccgagatcgcgccactgcactccatcctgggcgacagagtgaagactccgtctcgaaaaaaaaaaaaaatcattacctttggggaaggcagtatccgtgtctgcctggctcactgttttacccgtcgcacctagttattttttcaataaatatttcttgattgaataaggagagtggcttggagtttcagtgaaaaatgttcttccaaacactaggcttggttttccgataccccactagaactggattctctggactgatacattttcactctgtggagctgaccgtcctttgacctagggtcgcaggtgggagcccactggcctgaaagatccgagttttcaacctgcagaatcaccgccaacatagggttgagtcgaagggcatgaatatttatgatccaaaagcgactgctacgccctctaggcaatgagctggaaagggaaccttcaagggccaccgaaatcccaggaaaggcgccagattcgctttctcccggcctcaggcagctctccctacgaactacctcctccagcgcgccaagccgttagtcccgccttatcccctcagctccacctacccagcgcgcccacagttactaaaccctagccgccagggtgcactacgcgttcctaagccccgcctccggggcaagggcgcgctccccctcccagctctgcccaagcagttccgttaggagcgggaggaaaaaccgtccttcgggtccccgcctctccactcctaacgctttactccctactccccctgcgaccactacacagccggctacggaggcccctaatgtacaaatatcccccaggcccttgctcatcctgataggttttgtcctttcttaatcgacccagtactaaggccttgtgttcagtttttctccaggattcagactagagagtttcttccggcgtaaggaacttcaacgctcttcacggaagtaaaagtgtttttttggttgttgttgccgttgtggctgcccgcattccttccctcccacctcgcggaattgtggcgggagggggaggaggaagtcagggcgcctgcgcggagaggccgctttccatccgggtccctgtccgtgcggtgcagcaggtcggtaggcgggaaatggcgactggctgaaggagctggttctgttgctgctgcggggtaagcgggaaagacaccacacattgcgcagtcgggaccatcgccggagcctgaggacacttctctgtcgtcacagttaggtaatccccttcgtccagacgccgccgctgcttccaatctcagtcctcctcctcttccagggccgtctgccgggatctcctccccttctaaacctggtcctccagcggctctggcgccttggtaggcatgcactctttggcgcctcgtacgtccactgtgcggagccgctcctgtctggactttcccctgggaacagaaagggagctcacttcccgccag

SEQ ID NO: 13785 - DNA, 2300 bp, Homo sapien
ttgggaggccgaggtcggcggatcatttgaggccaggaatttgagaccagcctggccaacgtggcaaaaccccgtctctattaaaatcacacacaaaaaattagccaggcgtggtggcgcatgcctgtaatctcagctactcaggtggctgaaggttgagaatcgctggaacccgggaggcagaggttgcagtaagctgagattgtgccactacactccagcctgggtgacagagtgagactctgtctcaaaaacaaaacaaaactactttgagtaatttttgccttaattttgtaatctttgtattattagtaacatgaagtgaaataaaaatgtgctaatttgaatcttactttgaattaaagtaagtaaagatagagtatatacctttatgctatttagcataaaaatgtatgtggatcaacattttgaacatctaaataaactcatttcttaaagcaataataattgtgacttaatttaattgaaatatataccaaatttcttcctagattattctacttaagagctcagaggggacttgcatcacttagtccagtaggtttcaactaggggtgattttttcctccaagggacatttgtcaatatctagagacctttttggttgtcacaacttgtggaggggtggctactagtgtctactaggtggatgtcagagatgttaaacatcctacaatacacaggacagctcttcaaaacaaagaattagactgaaatgtcaatactgccgctgttgataaactctgtcaataccttgttgcatagcagagaaactcctcaaagtcaaaaagaaggagaatagcattaaggaaaagcagagacagctataaagaataacactttagagcaacagtccccaacctcttggcagcaaggaccagttttgtggaagacagtttttccactgacagtgatgggaatggtttcaggatgaaactgttccatctcagatcatcagacattagttagattctcataaggatcgcacaacctagatcccttgcatgtaaagttcacagtagggttcgtgttcctaaaagaatctaatgcagcagcttatctgcagataaggtagtagaggcagagctcaggcgttaatgcttgttcacctcctgctctgcggcccagttcctaataggctgcggactggtaccagtgggtatggggttagggacccctgctttagagtatggagtactgttttaacgaatgctatcttaaacacagcagcaatttctccccttgtctctgcccagtgcagcaatatatctttattgttagaaaaaacaaaccaggagggagaaaaagactgagacaagacaagggggacaaaatagagaaagaaacaagttaaaagaaccatagcaaagaaggaaataagtgttgtagacatcaaaagttgaggagaatcaaaggatgattaattagaacagttgattgattttacttttatattcttaaaagatctgtggaacattttgatttacaggaaacttaaaattattttccctagccactctgagatggcgtctcagtgtccataagtaatttttgacactgctatatatagccttttgcttcagtagagttatgttgcctctattcatttcgctgtcattcattagatagaagcagatgtgagggaaggttttatgaattagaaccgtcctagaatgtaaacaaaaataaaattatttgtgttttagttggtgggaactagtttgcttgtttacaaagaattttcttcattttgtgttatactgtgttgatttgaagcctttcagtctataggtgtaaatctactttgaaaaaactcagtaaatattagcattataaacacattgatacataaagagcatttgacttacgagtaatttacctcaatgtttctttaataagctttcctgaacattaacattaattagctttcgtgaagtattttgagggaaaaagagttacttctataatgaatgatttataacacacttctgaaattcagtgttttctagatcatgacttttttcttgtttcttttttagaagctggtagttatgaaatgacaaatcaacatgtaaaacaaaatggaaaattagaagataatccttcctctggcagtcctccaaggactactttgttggggaccatattttcacctgtcttcaactttttttcaccagcaaataaaaatggtaagtataaactgttaactgtgatttggattttttttaaaaaaatgcatagtttgggttttttttttttttttttcttgagacgaagtc

SEQ ID NO: 13786 - DNA, 2300 bp, Homo sapien
ctaacacaagtctgtactcacatggatgatctgctctttgatgactggtacaaatagtttttttctaaaaatgcaaatacatgctatacaccctcagattcctgaatgaataattggaaggcttttactgtaatttaattaaaataactgtagtatccacgtacagattcagttgtctcctgtctcaatgagtttgccactatcggtgaagaggcatcaacagtgacttgaatttacatgctgtatctgcctttccagtttcctcatatctaaatgtttatagaaataaaacagtgaatcttatttaggcccaaccaaggcttgaattaatttacttagtcttttttgttgttgttttttcaaagtagaactgactaaactttcccggggccagatgatcgtttgactgtgattattaaagttattccttataataagggggaaagaactgcttatacattttgtctgttcgttaaattcttcctttttgccataccaactggcactgataattttaaggttgagtttttatttgtgtgtgtatatgtagatttttatttattcttggtagcactgtgacagattttgtgggtagaaaataccagtttcttgaaattgcataatttaaaatacaggtccaaataggtcctagattttgtaaaattgttagtgtgattaagacacaaggaagacaacttaccaattattaatatatacagaatagagtacttcaaggtagaaaaaaattatatgaaacaattattagtaatgttcagagactagtattttgagtataaattgagattataataatcactttagtattgtaaaacctttaatagctttctaaaatgatgtagtatttttctatgtgagtgaaatatcagtttacatttataatacttgatacttaaatctgaattcctcatttcacttaatcttttttcaaatgatcatacacatatactaaaagaggggtgtttaggaaaagttgaaatgatggaatgttttggtcttaggaccttttctcaaaaaaaataaggaaatctaaaaagcattttttcaaatgccaacacaaaaacattccttcttatattttctattctggcatgtacagggatagggaggctgtgtggtccactggttagagccaaggactgggagccaggaggatcctgggttccaatgcggggctaaccactgacttactgtgtgaccttgggcaagtcacttgacctccttgttcctcagtcaaccatctggaaaattggttaaaaagcaggacctcgctgacaaccagatgctgcatctgagctgagctttcttgggtaaataaattacaaaaacaatttagagtttttaatccccctttataatttaataataacattttgggataaactcaagttctttaaggcatagtaatatttggttgtaagctttcagtaattgcttagaatttttatagtaaaatggcagcccaacgcttagacccatatttgtgtttgaatttccttcaagagagaaaatcatatggcttaaactataaagcctatggtgtatatatatgtgtatatgttctactttttagaaagttttttttttttaatttgtttttatttttatgtttaggcaccggcttttccgtgaacattgtgtttgtgtacaaggaaactatataaaggacttaaatattcttggaagagatctttcaaaaactataataattgacaactcaccacaagcctttgcatatcaggtaggaagaaagttgataaacaaactcagattggaaaaaatacaatgaagacacatgctgccaaacagaatatgatgggagaagaagaagagaattttcactggtggaatttccctttaatgtgtcatttttttagaattagaaatgacaaagtggtatattccttttggaaaatttttacttaaatgacatgcagcataaatgaagaaaaacctgagtaagaaaactataagataagcatcattgaatagcattcttatcagttattaaatcagtaattagtaatttaatcataaacatatttgagtactatagttagtttatgttcttctggtctggttatttggtttaatgttctgaaatattttcttagactattttgtcaatatatttgtaccctttgttaatatttctttgacgtataactacaaatgtagatgagtcatccttccttccttttgtttttttgtttttttttgtttttgttttttgagaagcagtttcactcttgttgcccaaactggagtggagtgcaatggcg

SEQ ID NO: 13787 - DNA, 2300 bp, Homo sapien
agattgtgtccttagggacttacattccacccttttcctgacttctttcttgcctccttccaatccacatttttttttttttttggtcttgtcactttgatgcccaggctggagtgtagtggccagaacgtggctcactgcagcctcaactgcctcagcttcctgagtagctgggaccacaggaccacaggtgcacaccactatgcctggatatatatatttttttgtaaagatggggtctcaccatgttggccaggttggtctcgaactcctgggctcaagcgatcctcccgctttggcctcccacagtgccgggattacagacgttgagccaccgtgtccggccctgatccacctttataaatggctgtctgtagatcatggcctctcacattttaactgggctgtagaatatgtattgaaggatcatctttataaaatgtttatttgtagactctgaaaagataacaccagaaagggggaacaatggttaccactagaaagaacggagcggagcagctgatcgttgtatctaccttttttgttttttttttttttttgagacgggtctaactgtcgcccaggctggagagccgtggcgcgatctcggctcactgttgcaacctccgcctcccgggttcaagcgattctcctgcctcagcctccctagtagtggggattacaggcgcccgccaccacgcccaggtgatttttgtatttttagtagaggtggggttttaccatgttggccaggctggtctcgaactcctgacagcaaatgatccgcccatctcggcctcccaaaatgctgggattacaggcgtgagccaccgcgtcctgcccacgtatctacctttttatcacatgaatgttgtaccaagttcgcgtattacatatttgaaaataaattgcgaaaataacaaaaacaaaatccatctactggctagctctttaaaatcctgcgggggagcccagtggcccaacggcgaagtttagcccatcttgccctttctggtcagtgtacctgttccatttatctctgactgcgccactcagtcaggtgagggaccactggagttttctaccggaaatgcacttcagcaaatgccacttgctctctccaacttcagtttcaaccagcgcctacctcaggaagccttccttcatcctccggcccccgccgccgctaaggttatccttttacattcaacctcataatgctgctttttgtggcagtcatcacagtgtcgaaatttgtttacatgtccatctttgctacttgatggagggcaaagatacacctcatacctagcatagaccccaggaggtccgaaattgttctgcgaaagaaaaaaaaatcaatgtgctggcctcaaaggggctcacaggaagggaaaagcctcgaagactaaggctctcttcgattccttcgtgactaactcgaggcaaacatgccaggaacgcggctctccccacccgctcctgcatctgcgcccggggatcgccggattccagaggggtcccctccacctagcgcgcgacgactccctctggggtcccggaagcccggccaccgaccccacaggcgggcgtggcctcagagccctcttctgagcacggcgtgggtatccgcaggcggccatggacggtgatcacagtgaccagagggacagcgcaccctccggtcgaagcggggtaggcgttggcaggggaggggcgacgaagactggcgaggttcaggcgccagccaaagaaccactctgctaacttcctggcacttacgtttcctacccggggcccagagtcgggcggcggtcttccagcaccacgaactccagtactggtctgcgttgtagggagctggaagcccgacccagcactcctcagccccctgtgcccctccctctgctctttccgcccctccctccgcccccctccgcccccccctccgcctctccctcagccccgcagcgccaccgaccgcgttccccgcccacttcttacccgcgcgcgtcgccgccgccgcctgagggggcgtggcctcggctcggcgcacagtcagccacggtcccatcctgctccgcgccggtcaacgagagcaaacccagtgactcacctccgccgtgctaactcctcgctagctctccctctcacacacgctcacacccggctcgagatggcggcggcggcggcggcggcgggggactcggactcctggggtgaggagaagttgctggggcagggcccgggccggcgccggccccacgcagtggcaggcactaacacggctcgctttcttc

SEQ ID NO: 13788 - DNA, 2300 bp, Homo sapien
ttatattcatcaagatcgataccatttagatcccttaatcccaaggaagttattccatgacattagtctagactatccattaaaacttcattttctgcaacttctttcctaatatctctaatcttttctctgcatttgttaatttattcccaaatttcataacagatgtcttaactgccacttcctatatgcatggaaaaaaatgaaaggaccaatatgaacccaaggctcaaaactgaaaatctgctacaatgtagaggggtaactaatatcttgtaatgcggctggtaacaaaatctagtcccatgtttctacaacatgtaaataaagcatctgagtgtcttcaaacaataaccagtcgatttattaacttcaatgtgtgcaaagctcacaacattcttgaacctcaggctgtcagtaaatcggacatccacacatccaacctcatcggactggggagagaacagaaaaactcaaaacaacattcctattaagttcatagtgattatctagcttaaacttttcagcccaggcaggatttatagggttctccgtttgtgtttataaattaggagaaattcactaaattaggcaaaaccacaaaaaaaaatcattttccatttcacacaaaactttatctgcacaaatataacaagattttgagaactttgttaataagagtcttaacattttggatttgagacttctgtaactactgtaaaaaaaaaaaaaaaccatgtagaagtaaatgtcacttacagctgtataatgaacccttcggagttttcaaaatcaaacgactgaggtaaaaatgattatctacaaggcacagacaaaacaacaacaacaacaaaaaaccacgggcccgtcatctacaaccaccaccaaatcttcaatatttccttaggtgtcgtatgtgtgtagttgagtaactgtcgtctctccatttctcaggtcacggtgtgaactacctgggtttctgtccactaactgcgggctatctcagtggtcagttcattctttttaccacagggtgggggaagggagagccaaaagttatttccctttactgtttctagctgtctcgtgtgggaaaaaaaggttgaaattcaactacaatatttcactcatctaatccctcgaacaaactgtataagtagacctcagggtcataaatgagttactggccctgggctgacttgagctcgaaaagacaggcgagtctcaaggctttccatatggataagctacaaggctcaattcccaacttcccggtctcattcctgcgagaggctccggaccgcgaagcttgcacgtgggccgacccggccgatgctgtcacctttcgtcgccagccggcgggtgggatccacgccggagagcagactctcaaccggcgagggagtccgggaggccacgctgccagtcttcggcccacacatggccggcaagcggaggggaagagagcaccgccaggccctatgctcgcgcctggacccacggcccgcaggccccggcagcgacccggggcccagagtcggccggcaacagcgccagcccgcttccgcgctgcccggcgccctagcccgcacccaccttgacgtcctcgtcctcgtcctcgccttcccagcggtccccgccggcagtgccgccgccccccaccttccgcactgggtcttccacggagaaagcgtcggcgtctacggaagaaagcgagccgtgttagtgcctgccactgcgtggggccggcgccggcccgggccctgccccagcaacttctcctcaccccaggagtccgagtcccccgccgccgccgccgccgccgccatctcgagccgggtgtgagcgtgtgtgagagggagagctagcgaggagttagcacggcggaggtgagtcactgggtttgctctcgttgaccggcgcggagcaggatgggaccgtggctgactgtgcgccgagccgaggccacgccccctcaggcggcggcggcgacgcgcgcgggtaagaagtgggcggggaacgcggtcggtggcgctgcggggctgagggagaggcggaggggggggcggaggggggcggagggaggggcggaaagagcagagggaggggcacagggggctgaggagtgctgggtcgggcttccagctccctacaacgcagaccagtactggagttcgtggtgctggaagaccgccgcccgactctgggccccgggtaggaaacgtaagtgccaggaagttagcagagtggttctttggctggcgcctgaacctcgccagtcttcgtcgcccctcccctgc

SEQ ID NO: 13789 - DNA, 2300 bp, Homo sapien
ggcacagtggctcatgcctgtaatcccagcactttgggaggccaaggtgggcagatcacctgaggtcaggagttcaagaccagcctggccaacatggtgaaacttcatatctactaaaaatacaaaaaattagctgggcgtggtggtgcacacccgtaatcccagctacactggagtctgaggcaggagaatcgcttgaactcaggaggcagaggttgcagtgaaccgagatggtgccactgcactctagcctgggcgacagagtgagacttcatcacacacaaaaaaagccaattcaacactactcccacaaaattccccagaataactatcttttacttgcttggtatgcattttctacttgtaagcaacacaatatttattttttacaaaaaatgagattacatcatattgatctacatttttgtcctctcagtacatatagatagacccccttctttctcttttttttttgagacagagtctcgctctgtcgcccaggctggagtgcagtggcgcaatctccactcactgcaagctccacctcccgggttcacgccattctcctgcctcagcctcccaagtagctgggactacaggcacccgccaccacgtccagctaatttttttgtagttttagtagagacggggtttcaccgtgttagccaggatggtctcgatctcctgaccttgtgatccgcccacctcagcctcccaaagtgctggggttacaggcatgagccaccacacctggcctgacccccttctttctaatggctgcagagtattccactgtacagatgtactaagcttgaataatgctttattgatatacatttaaatttttctgttttgtttttgccattacaaagtgtgatataaatattccttacttttttttcctaatagaaaccctttatcaaattaatatcttctcctattttaagctaagagctttttttttttttttttttttttttgagatggagtttcattcttgttgcccaggctggagtgcaatggcacaatctcggctcaccgcaacctccgcctcccgggttcaagcaattctcctgcctcagcctcctgagtagctgggattacaggcatgcgccaccacacccagctaactttaaatttttagtagaaacagggtttctccatgttggtcaggctggtctcgaactcctgacctcaagtgatccgcccgcctcagcctcccaaagtgctgggattataggcgtgagccaccgcacccgtccaagagcttcgttttaaaaaaaatcaggaatagattttaattttactataaattaaagcatatttgcaggtgggtgcagtggcccatgcctgtaatcccagcacttttggaagtcgaggcaaatgcatcagttgaggccaggagtttgagaccagcctgatcaacatggcaaaacttcatctcaactaaaaatgcaaaaattagccaggtgtggtggtgcacgcctgtaatcccagctactcgagaggctgaggcacgagaatctattgagccctggaggcagaggttgcagtgagctgagatcgcaccactgcactccagcctgggtgacagagcaagactccatctcaaaaaaaaaaaaaaaaaaagtatgttggagaccgactgggggtgaggggctggcagcaggagacagataacagctcctcagaatgcagagtgatgaaggctggaactaaggccacaactggagagatgttatggagatagtcagctatacttggtgacttatttgatacaggagggaggacatatagagaagactctggcaagcatctttggtgctgatctctagagcactcattaggtggccttgatctttgtagcatatgaggtctttgaagtatcccagggtgggatttcctggaagagggcaatgaaagaagttgaggtggggccctgtcagcagtggtcctatccccagtcagagtaatgggagtgcagtgcagggagcttcaagcagagaggtagagccatagagagctagggagaggccagaacctcccagcttagagcccctcagacttgtatttgcttccagcttcaagtctggatagtcagaagtttgtgacagtgccctccagtaatgaagtggtaactaacctggaagtgctgacaagcaaatgcctccatgggaagaactactgtcgacaggtcctctgtctgtatgatcttgccaaggtatgtgccaaggggtggggctcctctttctgagagggagggaaatgagaagtttgaggttgattttggacattgccaa

SEQ ID NO: 13790 - DNA, 2300 bp, Homo sapien
ccccctgatatgtattactcttgaaatgctgtagtggcattttattgactaaatgtttatatccttttctctttggcacaggtccagatgtgaaaaagctttgcatcctttgccagattttgaaggatacatccatagccattaatcatacaattattaccagctacagcattgagaatcttcagcatgaatgtagatctattttggaaagactgcagacagatggacaattcgctttggccaggagggtagcagaattagctgagttacctgtggacaacttggttattaaagaggtatcatcggtctttttttttttttttttttttagatacggggtcttgctctgtcacccaggctggagtgcagtggcgcgatctccgctcgctgcaagctccgcctctcgggttcatgcaattctcctgcctcagcctcccgagtagctgggactacaggtgcccaccaccatgcccggctgaatttttttttttttttttttttgtatttttagtagagatggggtttcactgtgttagccaggatggtcttgatctgaccttgtgatccgcccgcctctgcctcccaaagtgctgggattacaggcgtgagccaccacgcccagcctcattggtctttttaagttatttaaaatcttagcttttaaaatcagcattaaacagtaaatcaaatgagatgtataatttataggagataagacttttttttttacttttgacacacacattactttcagaaatggatgagcctacaattcccatgattgagaaatgtgtgctgcaaatgtaacattagtttgtaggatatgctacaactattttcctttgaatagaattaaatataagggggcttccacttaaaccccattccatgagatcaatcaagaattgtttttcataccataactttccagataaaatatctagggtcatctgtagccaaatctctgttctctgatttgatttggttttaacaagtatgataaggccaggtgcagtggctcatgcctataatcccagcactttgggagggcaaggcaggaggattgcttgagcccaggagtttaagaccagcctgggcaacatagggagaccctgtctctacaaaaaattaaaaattagccaggcatgatggcacacacctgtggtcccagctacctgggaggctgaggtgggaggatctcttgggtccagcaggttgaggctgcagtgtgctgtgatcgccaccactgctctccagcctgggtgacagactgagaccctgtccaaacaagtatgatatacttagggaacattagcatttatgatacttttttatccaagaaaggctaaaatctgctttgttaaatttcacagataacacaggaaatgcagaccctaaaacacattgaacagtggtcactaaaacaagcaagaattgacttctggaaaaaatgccatgagaattttaagaaaaattcaatttcaagcaaagcagcttcttcctttttctcaacccaggcccatgtggcatgtgagcacccaactggatggagcagcatggaggagcgccatctgctgctcaccttggcagggcactggcttgcccaggaggacgtggtgcccttggataagctggaggagctggagaagcagatctggctgtgccgcatcacccagcacactcttggaagaaatcaggaggaaacagagcccagattttctcgacagatctcaactagtggtgaactttcctttgatagtttagccagtgagttttccttctccaagttggctgctctgaacacatcaaaatacttagaacttaacagccttccatccaaagagacatgcgagaatagattggattggaaagagcaggagtcactaaactttttgattgggcgcctactggatgatggctgtgtgcatgaagcaagtagagtatgccggtattttcatttttataatccagatgtcgccttggtattgcactgcagagcactggcctcaggggaagctagtatggaggatctgcacccagagatccatgctctcctacaaagtgctgagctgcttgaggaagaagcacccgacattcccctaaggagagtccacagcagtaagtgaaggagatcagatggcccagagtcttaaatggcactgttagcactgtctccaagaaggaagggacccttgtggcagaatagttctaccaagttaaggggacaacaacttttttccaggtaatctgtagactagccaattaactaggcaatgaaatagaaagatctatgtctttta

SEQ ID NO: 13791 - DNA, 2300 bp, Homo sapien
ctattgcccaggctggagtacaatggcaccatctcggctcacttcaacctccgcctcccaggttcaagtgattatcctgcctcagcctctcgagtagctgggattacaggcgtgtgccaccacacgcctggctaatttttgtatttttagtagagacggggtttcaccatattggccaggctggtctttcctgacctcaagtgatccacccacctcggcctcccaaactgctgggattacaggcgtgagccactacgcctagccattaatctgtaacacctcttactatatgacaagcaagttcagtcagactttaccactaacaattttgcaggaccattttttttggtatacagctaccttatggcttcctctgctagtcaaccagagtagaaaaatagttttttttgtccgggcacggtcgagagcagcctggacaacatggtgaaatcccatctctactaaaagtacaaaaattagccaggtgtggtggtgtacacctgtagtccccactactcaggaggccgaggcaggaggatcccttgaacccaggaggtgcaggttgcagcgagcggagatcacaccactgcattccagcctaggtgacagtgagactccatctcaaaaaaaaaaaaaaaaaaaaacagctttttatttttcctttaaccacattactatgttaaacacgtatattttccccctgatatgtattactcttgaaatgctgtagtggcattttattgactaaatgtttatatccttttctctttggcacaggtccagatgtgaaaaagctttgcatcctttgccagattttgaaggatacatccatagccattaatcatacaattattaccagctacagcattgagaatcttcagcatgaatgtagatctattttggaaagactgcagacagatggacaattcgctttggccaggagggtagcagaattagctgagttacctgtggacaacttggttattaaagaggtatcatcggtctttttttttttttttttttttagatacggggtcttgctctgtcacccaggctggagtgcagtggcgcgatctccgctcgctgcaagctccgcctctcgggttcatgcaattctcctgcctcagcctcccgagtagctgggactacaggtgcccaccaccatgcccggctgaatttttttttttttttttttttgtatttttagtagagatggggtttcactgtgttagccaggatggtcttgatctgaccttgtgatccgcccgcctctgcctcccaaagtgctgggattacaggcgtgagccaccacgcccagcctcattggtctttttaagttatttaaaatcttagcttttaaaatcagcattaaacagtaaatcaaatgagatgtataatttataggagataagacttttttttttacttttgacacacacattactttcagaaatggatgagcctacaattcccatgattgagaaatgtgtgctgcaaatgtaacattagtttgtaggatatgctacaactattttcctttgaatagaattaaatataagggggcttccacttaaaccccattccatgagatcaatcaagaattgtttttcataccataactttccagataaaatatctagggtcatctgtagccaaatctctgttctctgatttgatttggttttaacaagtatgataaggccaggtgcagtggctcatgcctataatcccagcactttgggagggcaaggcaggaggattgcttgagcccaggagtttaagaccagcctgggcaacatagggagaccctgtctctacaaaaaattaaaaattagccaggcatgatggcacacacctgtggtcccagctacctgggaggctgaggtgggaggatctcttgggtccagcaggttgaggctgcagtgtgctgtgatcgccaccactgctctccagcctgggtgacagactgagaccctgtccaaacaagtatgatatacttagggaacattagcatttatgatacttttttatccaagaaaggctaaaatctgctttgttaaatttcacagataacacaggaaatgcagaccctaaaacacattgaacagtggtcactaaaacaagcaagaattgacttctggaaaaaatgccatgagaattttaagaaaaattcaatttcaagcaaagcagcttcttcctttttctcaacccaggcccatgtggcatgtgagcacccaactggatggagcagcatggaggagcgccatctgctgctcaccttggcagggcactggcttgcc

SEQ ID NO: 13792 - DNA, 2300 bp, Homo sapien
gccaggtattgtggcaggcgcctgtagtcccacctacttgggaggctgaggcaggagaatggcgtgaatacgggaggcggaacttgcagtgagccaagatcacgctattgcactccagcctgggcaacagagcaagactccatctcaaaaaaaaaaaaagacaaaaaccatatgatcatatcaatagatgcagaaaaagcatttaggaaaattcaacatcctttcataataaaaactctcaacaaattaggcatagaaggaatgcatctcaacattataaaggccatgtatgacagtctcacagctaatatactcagcagtgaaaagttgaaagcttttcctctaagatcagaaataagacaaggatgcccacccttgccacttctgttcaacatagtagttgaagtcctagccagagcatttaagcaaaaaaaaagaaaggcatccaaatcagaaagaaagaagtgaagttgtcattgtttgcagatggcatgattttgtatatagaaaatcctaaagactctaccagtaaaactgttagaactaataaacaaatctaagaaagttgcaggatattaaatcaacatacaaaaatcagtgtttctatataccaacagcaaactgtctgaaaaagataatgaacaaaactatcccatttctattttttaatagaacacaaaatacttcggaataaatttaatcaaagaggtcaaagatctgtacatattaaactatcaaacattggtgaaagaggctgggtgggctgggcgcggtggctggctggacacagtggctcacgctcatgcctgtaatcgcagcactttgggaggtcaaggtgggcagatcacccgaggccaggagttcgagaccagcctggccaacatggcgaaaccccgtctctactgtaagtacaaaaattagctaggtgtggtggcacgtgcctctaagtcctagctacttaggaggctaaggcaggagaatcacttgaacccaggaggcggaagttgcagtgagctgagattgtgccatggcactccagcctagacagccgagcaagattctatttaaaaaaaaaaaaaaaaaaagaagaggctgggcgcacgcatgtaatcctagcactctgggaggccaaggcaggtggattgcttgagctcaggattttgagaccagcctgggcaacatggtgaaatctcatctctaccaaaaatactaaagaaagctgggtgtggtggcatgcacctgtggtcccagctacttgggaggctgaagtgggaggatcacctgagcccaggaagtggagattgcagtgagccaagattatgccactgcactccagtctgggcgacagagccagaccctgtcttaaaaaaaaaaataaaaaatcaattatgttgtatactttaaatatatacaattcttaaataagttgctcaaggtcacgcagctagtggtgtcaagaccaggaatctcacacttttttttgtttttttgaaatgaagtttcactcttgttgcccaggctggagtgcaatggcgcgatcttggctcaccacaacctctgcctcccaggttcaagtgattctcctgcctcagtctcccaagtagctgggattacaggcatgcaccgccacatctggctaattttgtatttttagtagagacggggtttctccaacttggtcaggctggtctcaactcttgacctcaggtcatccgcctgccttagtctcccaaagtgctgggattacaggcgtgagccaccgtacccggctgaagcatcatttcttaccagagtttttatgcaacttctcaggtacacatctttgtataaaatgaaggctacctctatacactgaagtaaaataaatcagattttggtagattcaaagtgatacgtagtgatgcaaaataattacagcaaccagttttatcattagagagttccatgtgcaaatctgaaattaattatggtgatatacagataattaatattgttttactttccccctagatgcatggagtcatctcccacatttctctagccctgacctggttaataaatatgctatagtggaacgtctgaattttgcttattatttacataatgggcggccatcatttgcatttggtacttttctggtccaggaattaatcaagagcaagactcccaagcagctgtgagtatttaaaatataattttgtctgggtacagtggttcacacctgtaatcccagcactttgggaagcaggaggatcacttgagcccaggagttcaaggaagcagtgagctatggtcatgcc

SEQ ID NO: 13793 - DNA, 2300 bp, Homo sapien
aatttatttaaaagagttcacaagtttaataccattcaacagaccagtgactgatccaaagcaagtttctgtgtttaatacagtatacccatacctgttaagttactggcaacttgtcgacactgaactaaaaattcaaaccaagggtgtgcttcatgtaactcttttttttccaaaaagggacaattttcaggactaagtctgtatataaaacaaacaaaaaccttctttgattaacatacaggataagacaattacaaccattttgctcaggcgatgattagcatttaaaaaaagaatcttggaattaaaaagtaaatataacacaaaatactcccactcttgtgttgtattttacatattcttcatgatctggaaacaattttagagatagagattttagagacatcatatgttcactaccatgatgaaatttatccaaatctttatcagattaatagataccttgtactttaagatacttcatattttattggtttttacaacaaaaactttttagcatattcaaacttaataagaggcttttaaaaaactcttacaagccaagtgtggtggtgtgcacctgtagttccagttacttgggaggcggaggtgggggaattgcttgagcctaggagttcgaggctgcaatgaaccatgattgtgccactgcactccagtctaagtgacagagtgagactgtctcaaagtaaaaaagaaataaaaagcttacacaactacagagaggttacaactgaggaattatggctcagaatacatactttgaaaatacagctcttaaacctgttctcttgccagtagctatggagacaacatttctaagtaagactaatgatatgacataccaaaaatacaacttctcttggaactcctagtctgttttttttgagaccgggtctcactgtattgcccaggctggagtgcagtggcgcaaacatggctcactgcagcctggacctcctaggctcaaagtaatcctcccacctcagcttcccaggtacctgggactacaggtgtgtgccactatgcctggctgatttacttctttgtaaagaagaagacccactacattgcccaggctgatcttgaacttttgggctaaagtgattctcctgccttggcctcccaaagtgctgggattagagatgtgagccaccgtgcccggccaattcctagtctttactacacaaaataagtaaaataaaaatgttgcctatgagtgcacaaatgtgggctccagaataaaaattaagtagaattaaatcagctcttccacttattagctgtgtgccttaagtaacatacttagtctctctcaaagcctgtttcttcatccataaaatggacatgggagtaactaccccatagagtttttgtgaagattaaatgagataatgcatataaagtacttagcttagtgccaacattgtaaacactcacatattaaagactacttctattgttattgttattactgacccaatagcaattaacactggccacagatatgattctgcgggttaatcttaggcagacagatactaatgtattgctctctctttctctgtgcgtgtgtgtgtctatagaaatataaattttagagcatatctaatataccttgaaagtgaaatacagtttgctatgaaatcaaagttgcttagcattctcttggtaatcaaagtatcaaagaaaactccaagtaaaactttagaatcttcctctcaaaccttttaaagcatttctttcattgtattctaaagtcaagttatttaaaaggttaacagagatactacagaattaattcaccaaaaaacacataagcattttgctgaatgtagtactgaactcaaagatgtaccaactgttgagatggagaaaactacctcaaaaagatcagtattcctcgtgtgaatgcttactattttcctaaaagtcacattcaggagtcatatgcaaagagaaaatgtgaagacctgctcaaggacaaatgcattctcagtactcacttgtaacagtcaaggtagacataaagaagatgctgcagactgtgctccaaacaatagagaatgaattgagaatggaaatcccaaccttctttggtcttgtagttttgaacagggagggtatcctgtattacacctccaatacggctcagtcttaggaggaagcattcaaagtcttccagttcagatgccaaaaaaaccccattcctatggacagatttataggatgtcaagttaaaaagttgctatgttcagagtagaccaaatcatgcccac

SEQ ID NO: 13794 - DNA, 2300 bp, Homo sapien
ataaggtataattaaagagataatagaatgatgtgttggaacttgcttgtaagttaaaacctgtaatgaaggctatcctatgtgtgagtgctccaggaatgtcctttttctttttttttttttttttttttttgagacagggtcttactctgtcacccatgtgggagtgcagtgccaccatcatggcttactgcagcattgacctccaggctcaagtgatcctcccacctcagtcttctgagtagcttggattataggcatgtgacaccacacccagctaatattaaaaaaaaattttttttggccaggtgcagtggctcatgcctgtaatcccagcactctgggaggccgaggtgggcagatcacctgagggtcgggagtttgagaacagcctgaccaacgtgaagaaaccgcgtctctactaaaaatacaaaatcagccaggcatggtggcacacgcctgtaatcccagctactcggaggctgaggcaggggaatcgcttgaacccaggaggcagaggttagaggttgcagtgagccaagactgtgccattgcactccagcctggacaacaagagcaaaactctcaaaaaaaattttttttgattttttttgtagagacaagggtctccctatgttggcaagggtgggctccagtgatcctcccaacttggcctcccaaagtgctgggatttacaggcatgagaagactgtcctgattataagggacaaggctttgttgtagctaacacaagtgtaaccttagaaattgctttaacgttgccattttttacagaaagaacacagccccagctaagcttagaaggttgaatatatctcccttgtgatagaaaacgtttggtttcagctgggcacggtggctcacgtctgtaatcttagcacttccaggctgggacaggtaaatcaccggaggtcaggaattcgaaaccagcctggccaacatggtgaaaccccgtctctactaaaatacaaaaatttagctgggtgtggcgtgcgcctgtaatcccagctactgggaaggctgaggcagaattgcttgagcccaggaggcggaggttgcagtgagccgagatcccgccactgcactccagcctgagtgacaaagcgagactccatctcaaaagaaaaaaaaagtttgcttttattttgacaaataaggtcatgcattgatcaacaaatgcgggagtacctttcatgaaacatgcactgttttaggtactagccaggacagtggtgagcaacaaagtccttgctcttttgaagtttacattcttattggacaggaactggcagaaaatatcaagtagtgataaatactatgattaaaaacaaaactaggtgagagactgcagtagaagggaccttaggttgaatggcttggggaggcctgtcaatagaggttacatttatgctgaaatgttctgaatgtggaagatgtgttaagaaggtacagttgtcttttaggagactttaccaaaatacctattcaacccctcttctcacctcaaactctttgctcctctccttctcttgatcttggatcatacttccctgagaaaacagacaggagctctctaccatctccaccccttacttaccccgtctctctgactgttacaatggatattatttgacttcaaatttcgggtcaacacccttactatggatccacactgtaagacggtccatgctaccaaggaaatggcaccaccccagagcctgtaagcgaacagcacaataagaaaagcgaagaaaagaggcaggaactgggttccaagggagctggaggcagctggaccaagaaggcaaagagcaatgccacagagcgagaacggctgcaacggcctgctacgctaagctaggccttcaagcatgccagagcagttaagcagagtgggactggcgtcagggcagatgtggctttgctagagaggctggtactgccccccacaggaaacgaatggaatcgaccggagacagccgagaggtctccgcgggagtcacgaggccgagcgggagccgctacgtacaccgcgcatgcccacgacgcagtcaggttccggcgaaagtgaccggaagtaaccgccgggccaagatggctgcagaggaaggggtcgcgagtgctgcttccgccggcggtagctggggcaccgcggccatggggcgggttctaccgatgctgttggtgccagtccccgccgaggcgatggggcagctcggctcccgggcgcagctgcgcacacagccggaggctctggggagcctgacggctgcgggcag

SEQ ID NO: 13795 - DNA, 2300 bp, Homo sapien
caacaaatttgaaaatttataagtaatggacaaattcctagaagatatataacttaaaactcaagaagaaattgaaagccagactagatctactgctattaaagaacctgaaacaatggataaaaaatctccccataaaagagtgttttatgtagcaaatgtaaatatttctaatgtcattttttttctttaagaaaaaatttttaatagagatggggtctcactatgttgtccaggcttgtcttgaactcatgggctcaagctatcctcctgcctcagcttcccaaagtgctgggattacaggtatgagccactctaatgtctttttaaaatctgacccaacaatcctgtgtacctgtgtgtacttcttattctagaagaagctctaacaggctgtgggaagcatctgctttattcactgtttaccccaagcctaacataggcttggcttgaacttaacataatgaaatgatggcaggaaagttagaacatctaggggatcagtagacatatgagacttcagataagggtaggggaccttcataaaaaacagtaggtcccaagtgaaactccaaacagccagggcagggctgtgatctttaagactgagccctagtccacctgctttggtactagtcagtaccagaagtcccttcagaatgaaaatcttcatgcaacaagtttctccttaagatctagtctctacaacaacctaatgaatcacctctggaacactgaaattcaccatgtggtccttttgttaatagtgctaaagtacgttattaggaagttcctgagagaaacagctgaataacattaccaaaaaggccagaacccagctgggtgtggtggcttgtgcttgtaatcccagccctttgggaggccaaggcaggtggattacttgaggtcaggagtttgagacaagcctggccaacatggcgaaaccctgtttctactgaaaaaaaatatatatatatacaaaaattagctgggcatggtggtggccgcctgtaatcccagctactcgggaggctgaggcaggagaatcttgaacccgggaggtggaggctgcagtgggccaagatcatgccactgcactcaagcctgggtgacagagtaagatgctatctcaagatatatgagaagtttttcagtaactttcaagctacttatatttgttcccccacccatatagttatgacctgcagtaaaacttctgaaacaaatattttcctttaaaggcaccaagaatcatggtcttatcaccatgacaagagggtcctaactttcatttttgatgtagggaaattaacttagtttttattcttattcagaagttctacaaagtcatgtgggtttcagctgaacacaggatgtgggcacagaacccagggttgcttgagggttagatgagacttgggagggtgttgggttttgcctaccaggagcagctatgtttttgtttttgttgttgttgatttgtttttactcctgagcttctggaccagtttgccattagagcagccaagaagatgtaagactgtgtatctcatgcaaaagtgtttttaccatgaagatctgacttccaaattcacaggggtctctcatcagtcagagctgagtagctgacttaagctcacatgacccggtgaagggcaagcatcatcaggtggacttgagggcttcaagtacgctgccctgaagcgccaggaatgtggttgctaggcatcctccccaggatctacccaggactttcctatccaattttgttgaagcaaaacctagggattaaattaaatgcaacctcacaaactaccaatgaagggtgtggaaaacagggatcctctttttaactatctgcccccaaatatcaatcccaataaactgtactaaaagccatggatggctaaaaatgcagtttatgtcttttctccattcaagcgtttttttaatcattaaactatgttctcatatttccatcaggccccaatggatggaggatgctagccctttaatgggtgagcaggggaggagctgggacttttaaagccaggagcggcaaacaggtcctggcccaggctgctatgaataacttaaacagaaaggacagcaacagtcaggtggtgggtgtcggcagcaaggcatcaccacactcggacggtgactggtgatgtcggttgggaagtacttctcttcctgcttctagcctgtgcctcatttctgtccctttgtgggacagctccctagagccgagctgggagggtgggtgtttatggcagtctgagaccccagggtctctc

SEQ ID NO: 13796 - DNA, 2300 bp, Homo sapien
agctattaaactgtcatatttgtggctgggcgtggtaacacatgcttgtgatcctagcactttaggaggctggggaaggaggatcacttgagaccaggagttcgagaccagcctgggcaacacagcaagactctgtctccacaaaaatattaaaaattaaaaaaaaaagaaattgtcatgtttgtagacttcccaaatttgccatcctaggcaaacagtgctcttgtttttaaacaaatagttgtatacataattttccccctcactattcaaaacatgtcataaatggtaagtccaagaaaaatacaggtattcccccccaaagaaaactgtaaaatcgacttttttctatctgtactgttttttattggtttttaaattggttttccaagtgagtaaatcagaatctatctgtaatggattttaaatttagtgtttctctgtgatgtagtaaacaagaaactagaggcaaaaatagccctgtcccttgctaaacttctaaggcacttttctagtacaactcaacactaacatttcaggcctttagtgccttatatgagtttttaaaagggggaaaagggagggagcaagagtgtcttaactcatacatttaggcataacaattattctcatattttagttattgagagggctggtagaaaaactaggtaaataatattaataattatagcgcttattaaacactacagaacacttactatgtaccaggcattgtgggaggctctctcttgtgcattatctcatttcattaggtccatggagagtattgcattttcttagtttaggcatggcctccacaataaagattatcaaaagcctaaaaatatgtaaaagaaacctagaagttatttgttgtgctccttggggaagctaggcaaatcctttcaactgaaaaccatggtgacttccaagatctctgcccctccccatcgccatggtccacttcctcttctcactgttcctcttagaaaagatctgtggactccaccaccacgaaatggcggcaccttatttatggtcactttagagggtaggttttcttaatgggtctgcctgtcatgtttaacgtccttggctgggtccaaggcagatgcagtccaaactctcactaaaattgccgagccctttgtcttccagtgtctaaaatattaatgtcaatggaatcaggccagagtttgaattctagtctcttagcctttgtttcccctgtccataaaatgaatgggggtaattctttcctcctacagtttatttatatattcactaattcattcattcatccatccattcgttcattcggtttactgagtacctactatgtgccagcccctgttctagggtggaaactaagagaatgatgtacctagagggcgctggaagctctaaagccctagcagttactgcttttactattagtggtcgtttttttctcccccccgccccccgacaaatcaacagaacaaagaaaattacctaaacagcaaggacatagggaggaacttcttggcacagaactttccaaacactttttcctgaagggatacaagaagcaagaaaggtactctttcactaggaccttctctgagctgtcctcaggatgcttttgggactatttttcttacccagagaatggagaaaccctgcagggaattcccaagctgtagttataaacagaagttctccttctgctaggtagcattcaaagatcttaatcttctgggtttccgttttctcgaatgaaaaatgcaggtccgagcagttaactggctggggcaccattagcaagtcacttagcatctctggggccagtctgcaaagcgagggggcagccttaatgtgcctccagcctgaagtcctagaatgagcgcccggtgtcccaagctggggcgcgcaccccagatcggagggcgccgatgtacagacagcaaactcacccagtctagtgcatgccttcttaaacatcacgagactctaagaaaaggaaactgaaaacgggaaagtccctctctctaacctggcactgcgtcgctggcttggagacaggtgacggtccctgcgggccttgtcctgattggctgggcacgcgtttaatataagtggaggcgtcgcgctggcgggcattcctgaagctgacagcattcgggccgagatgtctcgctccgtggccttagctgtgctcgcgctactctctctttctggcctggaggctatccagcgtgagtctctcctaccctcccgctctggtccttcctctcccgctctgcaccctctgtggccct

SEQ ID NO: 13797 - DNA, 2300 bp, Homo sapien
tggtatcttccagaaatggtctatgcatggcatgtattactttggaaattttcaaaataagatttttttttaaatatcagattgttattttttaaaatgacatctaacataaccagcaaataccagtaatggtggtgatatatacattatcctttatgttgtaaataaattgtattcaaattaaatgcaattttctcatgatcaaaacattctgctttcgatcatgttttgccagaggaaaaggtgagcgcgcttagtgtattgccaggtacttagaaagtgctcaagatctctggcgtcctcaacagtcttggtaaccatcttggattatctttattaatggttttacagctcccctgactgacaaaccttcacttctttctttcttttcttttctctttctttttttttttttttcttttttgagagacagggtctcgctctgttgcccacgctggagtgcactggcgccatgatagctcaaaagcctaagctcaagagatcctcccgcctcagccaccggagcagctgggaccacaggcacgagccaccacacccggctaatttttgttattattttttgtagagaccaggcttcaccatgttggccaggctggtctcaactacggacctcaagccatcctcccgcctcggcctccctaagtgctgggattacaggcgtaagctaccacgcccaaccccctcatgttttcaaaaccgaaagtaagaggcacagtacatcttggaaacaaccaggcaaagagccaaagaggaagccctctgtacgaaaagaccacagggcccatgccgcccagtttgctctggagaatctcacgcagaaggcaggcgtttttcttaaaaaaaaatgcacgaattacagccaaaaggcatgcgctcccgcaaaagccctggttaggcttgacttcaatctcgattgctgccatttatcccctgtgtaattaagtttcttaaaatctcggtgccttagtttcttcatctgtgagaggcagaagataaccatagtagttatctatggcggaagataactgttttcaaaattaaatgacgcaaagcacataaagtccttggcacacagaaagatgtcaataacgggtagttcttataattttttaaaagtgacatgtgatgggaacaaataagttaattattcgaaaccgctttgtatcacagccaagcattctacaaacgtcgcgtgctgtttcctccccacggtgtggccccacatagacccagaggtgctaggacatgcgaacttagcgggcgcctagacgaagtccacagctctccagtctaagggaagcagagccgcagcagacaggcttacccgggcgacgcctcccccagaccccaagcgcccctccacgcgttcacaaacctcagcgccgcgcctttgggacgagcctacccgtcccccactccagctgcgctgggggagccagaggccccgcgaaagagcggaagagaaaccctcccccaacctcggcgctctgacgcttatcgacgccctaaactttgtcccgaccctcccgtcgccgtaggccaaaggtctcccctgctccccgccgaaaggggcaagtagcgcgcgtcccgggtgcgcacccccttccccactcccaggccaccccgccgcttccccgagatccagccctggactagccccacggcgggccaccaaggagaacttggagaagggaagtcacggagcgagagagcacagcgagggccacagagggtgcagagcgggagaggaaggaccagagcgggagggtaggagagactcacgctggatagcctccaggccagaaagagagagtagcgcgagcacagctaaggccacggagcgagacatctcggcccgaatgctgtcagcttcaggaatgcccgccagcgcgacgcctccacttatattaaacgcgtgcccagccaatcaggacaaggcccgcagggaccgtcacctgtctccaagccagcgacgcagtgccaggttagagagagggactttcccgttttcagtttccttttcttagagtctcgtgatgtttaagaaggcatgcactagactgggtgagtttgctgtctgtacatcggcgccctccgatctggggtgcgcgccccagcttgggacaccgggcgctcattctaggacttcaggctggaggcacattaaggctgccccctcgctttgcagactggccccagagatgctaagtgacttgctaatggtgccccagccagttaactgctcggacctgcatttttcattcgagaaaacggaaacc

SEQ ID NO: 13798 - DNA, 2300 bp, Homo sapien
taaaatgggataattattcctatatcataaatttacttatttattcacttagtcatttgttaaataaatatggagtgtctactttgtgccgggcactctttttagggtggttctgagaaggggatggcaatgagaagggctctctaagatgcaagactccaggcaactgcttttacttccagtggttctttattttcacagctcattagagcaaattaccacagcagggagatacaggttgagtatcccttatccgaaaagcctggcaccagaagtgttttaaattttggatttttttttgatttttggaatatttgttaattatcagttgagcatctctaatgtgaaaatctaaaatccaaaatgccccagtgaccctttcctttgagcatcatgttggtgctcaaaaagtttgagatgttggagcatttaggatttcagatttttggattaaggatactcattttgtacaatggaaaacttcttggcactaatctgatgaaagaagaaactacgggagaatccctttccctaaaaggctttcagtaacaagatggccctgactcattctggacagttcctccaaaggtaggcctacaggtagaactcttttctggcagcataggggttttccagaatgaaggtgtattttttttttactgaggccaggaaaggtgaagagaatgaagggttcctagtgacgatgcagcaaccaagtcatttatgtaatggagccttatctgacagatttctaggatagaaactcagtatccaagctcaggcttggcagactgaggtgggcaccgtccccaggattgcagtgtggattagaggtttcaaccccaatcatattcaacagctccctttcccccaacaacccctttttataacaattgttttgtggtgattcttttactaatatgatcatgaaaattaagtaatttagcttgtgaatgctctagcttggctgcactgctggtataaagaagtgccagacacttgcaactgcctaggatctctgtgaaccagcggcatggaagactgagaggcacgctggattgatggctcagattcaagtatggtattgcaggttctggtgtaattttctaaaatggcgaaaatctctaggtaaaactccaaaaataaaaaaccaacatacatcttcctttgagttacctggtagttatattcctggaaaattcagtgtatatgagcctgaggtagtagatggtcaataaatactcaagaaataaaaaaataaaaaaatataaaaatataaaacacatttcttacatgtccttggtgcttgtaagcccagattatatgcaggcttttttttggacggagtctctgttgcccaggctggagtgaagtggcgagatctgggctcactgcaacctccacctcctgggttcaagcgatcctcctgcctcagcctcctgagtagctgggattacaggcacgcgccaccaccctcagctgatctttgtatttttagtagagaaggggtttcaccatgttggccaggctgatgtagaactcctgacctcaagtgatccgcccacctcggcctcccaaagtgttgggattacaggcgtgagtcacagcgcccggctgcttttttatacattaagtgtgcttgcagaggactgcgacctctggccctcggcctcttaataaatactccaagtgacttcattggaacaaccactgagaatcacttatctagagagtgggaagttgctgatctcatcactgcatggggtggggtgagggaagcaaccctgcccttcccctttctcggaaagcagctggctttgaagaaagagaaaccaggacgggaaagtcctgatttctaatctgaaacagcgctttttgtccagagaccggtgacgagcgaccctgggctcgggttttgattgggcagttcggaaactgtaaaagcgaattaaaagggtgacaagctagtgttttagcctatccagttccgggagtttgcacgcagacgctctgcttcgtgaccttggctctgctctgtgggcgccgcccccagcctgggcgcgtccatcgtcgagtaccttctcctctgcctccccctccctctgcttctatctctctccaattgccctccctggcctgcggccgcccggtcctccttcccagcccagtgcagccaggcacccgggttcggcttgctcaggtctctgtccgggactgggaagccacggagggccgggaaagtggcacactcctggagctcaagcttcctactctctcatcgctgaataactaccgggcag

SEQ ID NO: 13799 - DNA, 2300 bp, Homo sapien
gccatcttgcccaggctggtcttgaactcctgggctcaggtgatcctcccaccttggccccccaaagtgctgagattacaggcatgagccaccatgcctggacactgtttttaaatagtgaaaaaaagacttgaagtactctttgtgaagattgagacttcttgctacataggatttggaatcacaggcttctagagacagaagggggtcttaggaattcacattttaaagaaggaggaactgacacccataggagttaaatgtcttagctaaggctattcagtgctctggtggtgagagacaaggcttccatcttctaggccagtactcttacccctaggctaaaggttcaaaaatgtgcaggcgctggctttagtaaaatcagctatactaagcattgtcaaatgttttagccaacaacaaaaacaatcaagatgaaacaaaattacttttttgactaagtgatcaccagcatttcatagacatttatctgacaaaggttttgatctaacaaatgccatgtattgccaaggtgagcaagatacagtactacctatcctgtggtttgttcacaacttagtggaggggcagacatgcaatcaaacaattagaatacactctgttaaagccacgtgtacaaagatctagggtgctatagaaatgtgtaaaactaggccaggcgtggtgttgctcacacctgtaatcctagcactttgtgaggctgaggtgggaggacagcttgagctcagaaatttgagatcagcctaggcaacatagtgagaccctgtcagaaagaaaagaaaaaagaaaagaaaagaaggaaagaaagagaaagagaaagaaagggagaaagaaagaaagagagcaagagagaaagaaagaggaaaaagaaaggaagaaagagaaagaaacagagagagaaagaaagggagaaagaaaacagaaagagagagaaagaaagaaagagaaagaaaaaaagaaagaggaaagaaggaaggaaggaaggaaggaaggaaagaaggaaggaaggaaggaaggaaggaaggaaggaaggaagggagtaaagctgtgtttctcaactggggagtgattccaacccctgcccccaggagacatttggcaatgactggagacatttttgttatgactgggtttggtggggggggggtggctacaggcatctagtgtgtaaacgccagggacactgctaaatatcctaaaattcacaggacagcccctctaacgtaagacttagcaggcccaaaatatcaatagggctgaggttggtaacctctggtatagagccagcaaaatatcttctacaagagacagggaagtgggtaaagcttggtttggggatgagggggtggttagggaagagtttagtaaagagataatgacgggggtgtgggggaagggaaactcccatccgaagggacaacatatacaaagctgcagaagcgtgacatatttgggcgatcccaaacactggggaaagagctgtggtcattaagtctggacagctaggcaggagctagacgtgcaagaaatcatattgagttagaggaactactgtaagaaaaactgtttggctctgtggtggctctttataagtcactcaggagcacagtgttggtacatctctctgcgagctaaaactgctgaagaaagctgtatgaaatgaagcttttttcatcctgctttcttagggcctggtgtttcccaggcctgtgttactgtctcagagataaaatcagggctgcttcattggaatatgagaggtgaactagctctctattaaagccactcagctggtgtcttgatggtgtgatgggatcatgaacaggggtgaggtggttatttttcatgagttaggcttaatataggctgctgctgacgtgtatttcctctttcatagagcatccttagtccagaaatggggagctatgaaccttaagattagaccactaactcgaatctaaatgagctgcccttgtctcctacaaaagaaaagttgggcaggtagggtattctaatgagggtttctctttctcttaagcaaatgatgatcaaagttaactgacaaactgtcacggaatctgccagacctcactctggccttgctgcttctctccagctcctgaacttttctttcttccatcatgctctgagcccattccttgaaaactaaaaggtccctgactcccagtctgcagccatcctgggcctgctgagctctgattcaagtgcctgcctctgccccttggtgggctgaagcttcatggaggtgagtgaccctt

SEQ ID NO: 13800 - DNA, 2300 bp, Homo sapien
agtaataaaacaatggaataaactaatgagataatatttaaaagtatgttgcaagaaatttttgctgaaataaacttgagtcgactgagtatttgggaaaattctcctgaaacagtaaactttaagtcataagctagtaaaatcattaggctttatagattttgaagcaaacaatattgacaagaatgcacatcaaaacttgttatggctaaaaacaaatatatcaatgtaactatgcatgtattaggataaaaaaggtgaagaataatttacaattgtgaagggcacatgaagtaaaatgggacatttaaagataaactcttcctggtcttcaagagaaaagatcacacaaaacaccttctttttttttttgagatggagtcttgctctgtcgcccaggctgtagtagtgcagtggcacaatctcggctcactgaaacctccacctcccggattcaagtgattctcctgcctcagcctcccaagaagctgggaccacaggtgcgtgccaccacactcagctaatttttatatttttagtagagacagggtttcaccatgttggccaggctggtctcgaactccagaaatcaataacaactagataactagaaaatcatatgtacttggagatttaaaaacatttcacataatccacaagtcacaatactcatatgggaaatctgaaaatactttgaattgaataataataaaaaatgacctcttaaaaacatgtgacacacatttcaaaggaaatttatagctttatatgcacatattagaaaaataaaggatcaaaaacaattatctagttcaagaaattagaaaaataacagcctttttttttttttttttttttttttttttgagatggagtgttgccctgtcacccaggctggagtgcagtggcgtgatctcaactcactgcaacatctgcctcccgggctcaagcgattctcctgtctcagcttccctagtagctgagattacaggcatgcgccaccacacccggatattttttgtatttttagtagagatggggtttcaccatgctggccaggctggtctcgaactcctgacctcaagtgatcccccgacctaggcctccgaaagtgctgggattacaggcatgagccactgcgcccagcctaagaacagcaattttaaagaaagaaaagtggaaggaaattataaagagctaaaattaatgatatagaaaagaaatacatgaagagaatatcaataaaaccagaagtatgttctttgaaaaggctaaaaaattgacgaagttctaatcagattaggaaataaaaaaagggaaggcacaaatgaccagtatcagaaatgaaaaaaagattgtcagagaggtgactaaagtaggaggaaaaatttaaaaacaaggacaaaaaaatgagaacaagaaccatgactagagatccctcagatattaaaaaagtaaaagactttatggacaactttatataaacaattttttaatgtttaaaggaagacaacaccagaaaaatataactacttatcacaactgatgtaagaggtgggaaactgtaaaaggaaaacaattttgagtaaaacagaaatttgaacactggtgctatttgactatattaaagaactatcttttaagtgtgagaatggtgtcgcggttgtgtgtatgttttttaagtcctcacttttcagggattcaaagtgaaacatttatagatgaaatgatgaaatgaattttgcttcaaaaataatacttgatgctgcagaatctgccctatgcctgtaaacataaagcatggtaactttgttaatatttagggtttaaaactccccacctcaaaatttaaaacaaaaccaaccaaacaaaaaaccctcaccaactcgagtcgccgccctcctcttatcaggggaaggctgagaggcccctaagtgatcccgagaaccagtcagctcagtctggtagtgactgtcccttatctgagggcctcaggcccttcccggccattcctcttgagaaccaatcatcgagcttgactttggacctggaaccaatcagggatctcagctctgcggcctcctctctcacatctccacaggcttggcgacgccatgtttcaagggcagcgcggttggttttgcggcagcgttagccaggatctgaggcaattctggggtaggaagctgagtggaagcagcgggttaggtggtgaggggagcatcctcctctctctgatgctttgggtccagggtgcttgataggttcaccctgtgctcttacctccacagtggctgaag

SEQ ID NO: 13801 - DNA, 2300 bp, Homo sapien
gggtgaggcaatgcccctccctgcttcggctcaccctccatgggctgcagccactgtccaaccagtcccaatgagatgaaccaggtacctcagttggaaatgcagaaatcaccgtcttctgcatcgatcacactgggagctgcagaccggagctgttcctatttggccatcttggaacggaatctggatgatttacttttggctaccaatttggaagcctcatgccagcaggctactctagatctcttgaactttctaggtaatcaagcgggcaaggtgtctaaactgaaagcccagctctgcctacaacaagtcaaatatctaggcctaatcttagccagaggaaccagggccctcagcaaggaacaaatacagcctatactggcaccggtccctcaaggcgtagcaccaaccagattgataaactcacttatctgaccttgtggccctcgcccagaaactgactcagtccaagaagacagcttagatcccctatgatttcatctctgacccaaacaatcagcactcctgactcactggcctttccccacccatcaaactatccttaaaaactctgagtccccgtatgctcgaatgcttggggagccggatttgagcaataatgaaattccagtctcctgcatagctggttctgcatgaactctttccctattgcagttcccctgtcttgataaattagttttgtctaggcagcaggcaaggtgaatccattgggcggttacatattggggaggggggactgtaagggaatgaaatcctgagcattatcctcaaaggagggaggggccttatagacttaggcctatctagaagcgcctctctcctcagagagtaaaacctcactgtttctcagagggctgagaggcttgaaggaagagtttgggcagaaactctgctttgaatagaagcagcagatccagttgagagaaagaggttcacaaattccatttcatggcttttttttttttaaagacagattttcactcttgttgcccaggctggtgttgaatggcatgatctcagctcactgcaacctctgcttcccaggttcaagctattctcctgtctcagcctcccgagtagctgagattaaggcgcatgccaccatgcccggctaatttttgtatttttagtagagacggggttttcaccatattggtcaggctggtctcgaactcctgacctcaggtgatccacctgcctcggcttcccaaagtgctgggattacaggcaagagccactgcgcccggcctcatgtcttttttatacttaagcaccaggcccatgtaatgatgcacgaattcatttactcctactcgtgccaggccctttcctgggggctggagacaaagggccgacgtggacgctgcgtcatggtagcacctgtctcgcaaagtgcacaccgtgctccacccacagcctcagcattctcgttgctaggaatatggaccctcaggcagcacctcagacctagacctactgtatcagaatctctgtgctggtcctgagaatgtgcattctcaacagcgcctcacattccccaccccaattcttctgcagctaacgtttgagagcgctggtctggtgcctactgcctctgcaggcggttttcaaggcagccgtgtgtgcttgcatgtgaggcggcaaaaacagcgcgctgcagggccggcgcggtggctcacgcctgtaatcccagcactttgggaggcggaggcgggtggatcacgaggtcaggatatcgagaccatcctggctaacacggtgaaaccccgtctctactaaacaaaaatacgtggtggtgggcgcctgtagtcccagctattcgggaggctgaggcaggagaatggcttgaacccgggaggcagagcttgcagtgagccgggatcgcaccactgtactccagcctcggcgacaaacaaacaaacaaacaaaaaaaacagcgcgctgcagatggagccagcacccgggcttctcgctcccagccccctcccgaagccccgccccgcctccgggtctggaggaggctgggaagccccgcccctccacgctagcgccgcccaggctggcacaaaggaggaagcctagtcccgcccctgcgtgcggcgcttctcccaggccccaccttccatccagtgccctggaccctcggctgggtagcgccaccagagcgaccaaacgtcccgcgccttccaggccgcactccagagccaaaagagctccatggcggcggcggccaagcccaacaacctttccctggtggtgcacggaccgggggactt

SEQ ID NO: 13802 - DNA, 2300 bp, Homo sapien
tatctctgtatcaacatcccaaaatctctccgagatgaaggcagtctcgaagtgctgcgtagagaggaagtggttgggagtcggatgggtctcctgtggactcgcagacgggatctggcccctcccccaggctgagcagagcgccagatcaaccccactggtctccccctttgccctcaccaaagaagacccccagtacggtgcggttgtggagcgacggcaggccggctatgccccgcgtggctgcgttgctgagccggcgcgggttgggcagctgcggctcctccagagcctgatacacaccgtcggcgtaattggctggtacgcggcgctgcaaccggcagcctgcggaggcagggagcggggctctgtctaagcactccatcccctaggatcccccaaacctctccctaagcctccctcaacccccatcccacttcactgacagaaccttccctcaagggtctcttggccccgggagcgcataagattgcgctgtgtaggcagcggagctgctgggcgcgtgttccccgcagattccccgctcagggcctttcgcgccccggcccttcgcgagccacggccccagcacgcccgggcccccagaacgcaccaacagcaccacgctcgtggtgcctcaggttgttaaaccagccgtcatagcgctgcacttcccagggcagtgagagtgcgtcctgactgcctgtgggcacagagaagggcctcctcagcactacgctcccagctacccctcccgagcaacgaaggccttggccagtccttccccagctcgcggagcgcccctaaccggacccaagtgtcgggccgcactgggaagtttcccatcccgctgagctgcacggcgaaatgaccttccagtctcagggagccgcttgccgcacctctccccgccccacctcccagggatcctggggaacaccccgccgctagaggagcctgatacttgcccgatggacccagggatccagtcagaagagctcccaggagcatcagtgcctctggtcttgcacggagcatgccaaccctgcagcctgcggggtgagggtgggggtggtaggtggtatgcgaaagccactgttagggcgtcctctatgcctcccctcttgttcctacagctagtactggaggaggagcaccagctgtttccacttctggaaggtagctgttagaagcatcaccgaggaccttcatccaaacgccactctttccaggacaattggcagctctggaggcattgacactgttccccatccgccaccccatcagagagttaacccccgaccataggaacccactgggcaggagtcttctggggcatgtcagtccagggcaggactggtcaagcctcccagggtgtgcccaatgtctccaatgtttcacctccacccgcccccgatccgtcaggctccgcttctcctccaggaggcagggaagggaaaaaggttactgacctgggagtgagggactgcagcacccttccacaatgaatccccccttccccaataaactccccttctgcaatgaacgcctgtgcatgatgggcgagggctagggtcagatcccaaactctggtctaacctgtggtttagggtggtgttgggttcagatgtcttctttcctcttaaaatctttgcttctgtgctctacttcttgccttcaccctcactcttccagctccgccgatcctcagcctccccggctgcactctcacctttctctctgggtccttggtctcgccactgtgcaggtgtcggctcaggacagacctgcgccagtgtgagcatctggacctagggctcaccctcctgccgtggaggtggggcccttatttgcacaacctcttccagctcagaccagcccctgggctgggacacccgtgtggcacgtcgcccacgctgctataaaaggggtcccgcgcgacttccaaactcagcgccaacccgcagaaccaggaaagtaacggctacagacagtgagaaatagtttcgctcgccggctagaaaaactctgtcggtaccaaccccagagcgttgagagcagcccacctccacgcttccttaacggagaggtgcaggactcagacttcaccagcccactcggtcccagccttgtacgcaaagagacgccaaggacgcgctctcccgcgtccaggcagccccagcttgctggcttgcctgcccgcctgcgtgcagcactcggccggcgtgcagcatgaccctgtggaacggcgtactgcctttttacccccagccccggcatgccgcaggcttcagcgttcc

SEQ ID NO: 13803 - DNA, 2300 bp, Homo sapien
cacctgtgagtgtaatattaatgccctccaggcccacgagcagacggacacgggctgtaacgcgcgctgcgctgaaggctttgtaggatgtgttggtgttcactgtacccacgaaccattctgcactgaagtgcacagctgtagggaaaggcacacggtgggggtgggatgagggtgggaaaatggaattagagagtggtatgggaggtgggacactgcagagagatggggacttagaggtccaatgtggttgcatggtaagggccaaaaagtgggccctagaaggagctggagagtgggaagagggagcagaaaaccaaccccagttccctattgtcccaggtgccctctgcccacctccttcctcaccccgtcctctccccatgggctgcaccacacactcacccacaatttctgcgcctatgaacagactgagaagaactctcaccaaccaaaaccagcgctgcaggaataggcacccgggtcaggcctgagccctgccaaaccagagtccccaagaccacccttgaccccacttcacctggatctttagttatatccagacttttgagactaatgttaggcacgcttttcctgcaagtccctctgggctactggcatttctgatattttgtgaccacgcactttcacctccctagccccatttcccatctaccctaacagcacctcccctccacccccacttcctggcactcttccaccaccttcactcccctagctgtctggcgcctggtcctggttctgcctcctggtccagtcactgcttggtgaggctcagtgagtccagaagtgctaggcacgcaggggtcacctccctcagaagagggaggccccagcctgatctccgaggggaggaggtgggaatgcagatactcctaggtgcaccagttccagggaaagcaacacagattaagatgcagaaaagctgggtcctcccagaactgaaaaatgcacaacctaggttctgggagagggggaaagtctaagacaatgcacccagttggctccaacttctaatccaatgtgggagtctcagtcctgaggatgaggcacccatacacatgtgtctcaacccagtgcaaaggggaacactgcagtctgagctgctggcatctgtccttttggcctgaaggtcatcacccaccggatgggatgagagtgcagctttagtcctgggagaggtgggaggccctccagcacaagaagcctagactgttcctcaggattactggactgggtgcccattctctgcagcagccttcccaaggacccagctggggtccttctccaggatatcctggatggggagctctccctatccttggaaaggggtgcttgctgcaccagactcctgacttcactccacctgagcctcaattcgactattcatggaggctcttgtacagtcttacctgtcctgggtccctcaggagacaatctgcccatgagccttcccccactctacctgcactatgaggacacccttaccgagtggccacggatccccggcaagatgagcaggaagcttgctgctagagccaaaaacactagaataacgatgagcagtggaacgctgaagcctgcggcatgccggggctgggggtaaaaaggcagtacgccgttccacagggtcatgctgcacgccggccgagtgctgcacgcaggcgggcaggcaagccagcaagctggggctgcctggacgcgggagagcgcgtccttggcgtctctttgcgtacaaggctgggaccgagtgggctggtgaagtctgagtcctgcacctctccgttaaggaagcgtggaggtgggctgctctcaacgctctggggttggtaccgacagagtttttctagccggcgagcgaaactatttctcactgtctgtagccgttactttcctggttctgcgggttggcgctgagtttggaagtcgcgcgggaccccttttatagcagcgtgggcgacgtgccacacgggtgtcccagcccaggggctggtctgagctggaagaggttgtgcaaataagggccccacctccacggcaggagggtgagccctaggtccagatgctcacactggcgcaggtctgtcctgagccgacacctgcacagtggcgagaccaaggacccagagagaaaggtgagagtgcagccggggaggctgaggatcggcggagctggaagagtgagggtgaaggcaagaagtagagcacagaagcaaagattttaagaggaaagaagacatctgaacccaacaccaccctaaaccacaggttagaccaga

SEQ ID NO: 13804 - DNA, 2300 bp, Homo sapien
agaaggtggccagcttagaaggagagaggaaggctgggagctagggcatattaggaggatcccagcattagaactaaaagggacctggggattatgaaatccatttacagatgaagaaaccaaggactcaagaggttgtcgcttacctgtccaatatgacaatattagtaaagaacagaaactagtcccagaatggattccagctcagggttctcttcaaaaaagattggagaggccgggcacggtggtttatgcctgtaatcccagcactttgggaggccaaggatggtggattgcttgagatcaggagctcaagaccagcctggccaacatggtgaaatcccgtctctgctaaaaaaaacttaaaaattagctgggtgtgatgacccgcacttgtaatcccagctactcaggtggctgaggcatgagaattgcttgattctgggaggcggaggttgcagtgaaccaagatggtgccactgcactccagcctgggtgacagagcaagactctgtctcaaacaaacaaacaaacaaaataatggaacataagaacttaataaaaaatttaaatgtactccattttttatttacttaaaataaaaaaagagattgaagaaagagataaatggagtaacaaaatgccccctctttcccaacttgatagcttatttgtttccagtactattctcagcactttatatacacaatctcatttcatgctcacaatgatgcttacaagatagacattactatctcaaatttttaataaaactggatgtctgtaaaggtcaagtaacttgcaagaggcagaggcagaattcaaaccctctggggctacttgactcccaagcttattctttcattataacgcttaataagacaatgtgtggtcagactaaattatggagccttctgggcaaactgaaaccccagtacagatcacactgcatgaaatgaggaaaactgggatcattgactctaagatgcattttttttttttcacattctgacatctctgaaattaggtacatctcaccagcaatggtggccatggtttaattggcaagactttttttcccctttatttgtgctaaaatagtagtgtgtcatgcaatccattctgtctgagatttaactaaacacattaagttcaggtaccattttcccaatatcctgtctgcaaaagaacaaataagagtcaaacaagttctcagatcaggggatgggcagagaagaccacagctagcgtttgagctgaaacttggcctgggaatttgaatcaaagagaagggccattgttggtaatgtgtggaatagaaggacatctggccccagcactgcctgatagagggcaggtgccccttcagtgcttatttaggtgaactcagtgaagctcaactgttctgcagttaccagaacaagagccagggtgcttgagaaagctggacagacctgtgtgggcagtgctaggtctggaattcagtcctctgatgatgtggctggattatatacttagcagagagctgcctggcctttgttcctttggggactgaggaagaaagccaatctttttgtaatctgtaccatctttcaccttatgccttcacctgataatatagctccttttatgttctgtgatctatctgtgctaggggcctgaaggagagagaagagaattttatttcttgagacagtcccagaagaaacagagaagcccccagggtggtggtagcactgacttatggaacctggaggttaagagaggagaatggggcaacagagactgatggcaaagaccctcattctgtcacctaaaagatggggagatggatggctgaggggcagtggaacggtggtaatagcagagtctgatgatgcacaaaatgtgagctccagagaagaggaacctagtctggctcattctgtgctgtatctccagcactaaaaacagtgccaggtacattgagggcatgcaataaatgtctattgttgttgtacagcattgccccccctgcaccacctcaccaagatggctactttgggacacacattccccttctatgctggccccaagccaaccttcccgatggacaccactttggccagcatcatcatgatctttctgactgcactggccacgttcatcgtcatcctgcctggcattcggggaaagacggtgagaaacccagtcctggagaccccagcccagagagacctcagcctcaggctgaggggttcagagtctctgactacaaccaggctaaggaaggagaccccagtgcggagaaaagatagcca

SEQ ID NO: 13805 - DNA, 2300 bp, Homo sapien
atttagataaacagagacacagacgcaagaaccacccagactgtcattctcagtaatatagacttcatcccaggcccctgtgacaaaattgggatgctttctcatggggtggggggagtttcccacactttagggtcctcctttctcacctggcctagggaggaggaggcagcatcctccctttccaggctcccttatgtactgaagactttccttatgctcaatcttattatagacacaattacccaatccttacctaccacaggttgaagtggagttcctatgtgtgtatgagaggtgggtaaaacataaagttacaatctttaagaaaattcagcctagaacaacctccagccttcttcattcaaagttatgtgctaacgtcttgtggcctctcttgtagcctgacaggacttttttcctgaagtcttcccccttgcccacctcccccatctgctggaaactatagagtaagggccactaattctccacaagtggggagtgggtgacatggctggagttgccaagacctctgattggtaatgcacagctactgcaatgtgatgcttttttctctgattggggtagaccccattaaacgtttacagctgtggctagctaaggggaccctgtcaggaactcctgtgctagactttcctcttcaaggaaggggtctgtgtgtacgtgtgtatctgtgtatgaatgtatatgtgtgttgttgcacaaaaataggagttaagtggagaaattgaacaagatctgaaaagtggattggaggcaggattccccagtaagggctgatgtggataaggaattcaagggtgcagaatcatgcaagccaaagtatccagactcgagttaaactgggatggcgattcgatgtctataaaccttgtggcatttatggccttaagaggttttccttgcctccccagtttcttaccaaactctctctttgaagaactcccacttgatccgaacttggtctggatgaaagcaggaagtgcagccctaggtgccagggcgggagcaagcacttcaagaccccctccaaaatcacctggaccgcacagatctaagcagccgcatcccccaccacccacacccggaccactattccctaccttcccctcttccaaacagtgcgtgtgtggcagcctgcgcctctcgccttcccccgtggaacctcacacgaagcgcccccgggggtgtgattaaagagggaaccaggtcccgacgttctgtgaacaaacgcgcgcccttactctcagtggggctcccgtccgacccccactcctctcctaactcacgtaaggacccggctgtgaccggacaaaccgggtctggggtgcttccagtcactcttcaagtcactcccaaacttctcagactgcacccgaggctctgcggcgccgcctccctctcccggcctggtacagagaagggctgggtgcgccaggacagtagtaccggggtctgccagctccgcagaggtccctccaatcccccctcctcctctgcgcccccccacccatgcccagcaatcccagcagctccagcgcaaacctagcgacgcagttccgggtctggcggggcgcgggcgcggctcgcagggcggtgggacccccaagacctcacgaggatccccggagggagacgtgactccggggtcttagaggggtttaggtcggatgggtgacttgctttgacgcctggcctggtctgtgggtggcaggtgatcgatggccttggacttggagcccagacccgacggtgtcgagaggatctgaggagagtctcccctccccataccctctccgcctcccaccctctccccagccccatgggacttgtgaaggcggacttgcttttttcgccgtccacacaaccgcactagccgggccttcggcaccgacggaacatctctacctgcgccccgggagccctcgccgtctcacctcgcgcgctgccgtccgctggaagcacctccgcgcctccccaggcgccagactccatcccgccccactgcgccccgccccgtggctgagccgagccgggccgtgccttcccctcctcacccccagccccgcccgtcccggcgcagagctgcagaggcaccggacgagagagggctccgcgggcccagctggcagccaggccggagacaagttgcagtcccgggctctggtgacgccgtggccgcaggtcagatttgggagggcttttcccggcccgcgggcctgggcgctccgggggagggagctccaagggcagggtggcgggggagccgcagctcctcc

SEQ ID NO: 13806 - DNA, 2300 bp, Homo sapien
cagaagcccatgatgaaaataataggggctcagggattagaatgtcccaaaatggagaccctagaaaaagacaggcaaagaatgagccccagctactcagaagaatcaggtgaaagactctgcaggcctctgtgaatcaaggcctggggctgggccaaggtcacagtaggtagcaaagttcaagagactcactctttccgaaaattctttaattgattcggcaaatacttcatgagcaccactacataccagccactgacatagacactggagattaagtgacgaacaaaacaaacagaaatccctggtacataccttcatggactttaccttctaagattagttggaaaaccctgctttggcccagcactctgcagagtgtgttccttaggcagggccctgcttggggatcaggagactaggctgaggtctcagtgctgctgccagtccactgtgggatcttagataaatcacttctccaatctgatccttgttttcctcttccagctatgggagcaaatatgcctgaactgtttacttctaagcatggttgccagaatcaaatgtgagaaggaggtttaattcaaagcaagtgacaggtgttgggcaaatgtgatatagagagggtaggcgggagcttgtctcctctggttggatccagaagggatgcactaccaggtgctcatgtatttagtgcaagcttcctgctctctctctctccacccagagtcaacagggaaacagaggcagcagaggactcaggctgggactcctgagtgcgagtaaggagtacctaaagccggcgaagacctcctgaaggcaacctggagattggggttaggatagaggaagaaaggagctcagggaaagcctcatccccagccaaacatcagggttcctggatgggttgtctagaggagagaacccagggagtgacctcatccctactccatctcctattaaatgaaaaaacctaggccctgccataactggaaagctcagtatcacctgctgcatttcacagagtctgtccaggtgctggcctttaatagtgcatgaagagctgggctctggatggttgaagctgtaaagctggatatacggaagtagccacagcggtccttccctgatcccaagatgtcattcccctcccccgccaccaccatgtcttcaggatcctgggcctcaacgctaatgtaccactcagcccctaagggcatgaaatgggctttcagaccaggctgtgtggggatgacctgaagaggaaggtggacatgcttaataaccactccttgtgggtgggttgcccttaatgatttacacaacgatggggcagtaacttctcaacaaccttgacaggaaggttgcccaggacagggcagtgaagccccaggcagagccagcggcagaaccagagagagaacacaggcctgcctgttcttgccccacatggctgcttttccagcctgaagccctagagtggtgaccctggtggccctgaggtgggaggaagatgggtcaaggccatcttggtcctaagggagggctgagggggaaagcttggatcctaaagcccaaagctccctccctggtatgttgtgctggtgccaggagaagaacccgcaggcccaggcaaactaggccacccaacattcccaggtcccaaagaacccagtctctcaaaaccttgattgggcagaggacaggccctaacaggaccggttttagccttaggataagatcggaggcgcagggggctagcattcccctttcttccataacgtggaggagctgcggctcccccgccaccctgcccttggagctccctcccccggagcgcccaggcccgcgggccgggaaaagccctcccaaatctgacctgcggccacggcgtcaccagagcccgggactgcaacttgtctccggcctggctgccagctgggcccgcggagccctctctcgtccggtgcctctgcagctctgcgccgggacgggcggggctgggggtgaggaggggaaggcacggcccggctcggctcagccacggggcggggcgcagtggggcgggatggagtctggcgcctggggaggcgcggaggtgcttccagcggacggcagcgcgcgaggtgagacggcgagggctcccggggcgcaggtagagatgttccgtcggtgccgaaggcccggctagtgcggttgtgtggacggcgaaaaaagcaagtccgccttcacaagtcccatggggctggggagagggtgggaggcggagagggtatggggaggggagactctcctcagat

SEQ ID NO: 13807 - DNA, 2300 bp, Homo sapien
cagtctgaagtgtccccaagggaaagaccgatagagaggggaagaaaacaattgttttaaaagatacatcactgtggtttttaagtatttttacttccattctcctgctgctggtgtagatattaccctcccccccaccattaaatatagagtaataaaggttcagagggtgtcacaaagtccactggtctaaacctcatgtcttgacactacactggggacatttttagctataatcacagagcccagggcctgcaaccttttgggggcagagggttctaaaatgtgtgcaatctgaaggaaaatattggcttcaaaataatgaaaagggaactttaaaaagacataggccgggagcagtggctcacgcctgtaaccccagcactttgggaggcagaggtgggtggttcacctgaggtcgggagttagagaccagcctgaccaacatgcagaaacctcgtctctactaaaaaaaaaaaaaaaaaaaaaaaaattagccaggcatggtggtgcatgcctgtaatcccagctactcgggaggctgaggcagaagaatcgcttgaacccagaaggcggaggttgcggtgagccaagatcgtgtcattgcactccggcctggacaacaagagtgaaactccatctcaaaaaaaaaaaaaaaaaaaaaaaagacacatatttaaataatgtatatgtatgtatatgtatatgaaacaaagcatgtccatttatatttttacaattgctttataatttaaaacaattcatagattagatttactctggaataatctctggggtatgcctgatgatgtctgagaaatagacaattgagttattcatagacaagtagtttcagaagaacaatttttgaatcctttaaataggtatatatgtacacatatattgtacatataactgtgtatatatatattttatatgtgtgtgtatatacatatattgagagagagtcagagagagagtgtgtgtgttaatgagctatgagtacattttagatatttggtctgatgttgtagatgggaccttccaaaagtcagaccctccaggatgtgctaaggtccgaaccacacaccacctcggaaagacgatggcctggggtccctggataccgcctcagagaccagaactgatgcctgacattataaccccattatctcaatcaccatctccctgctccttgcatttcagaaatgccagctgccacttccagggggtcatcaatcggaactcaagtgtctccagagctctccgggtctgcaacagctactggagccgtgaggtccgagctgggggccacatatgtggtggatgtgtgtgtgtgcatgcttatgtgtgtgtgtgtatgtgtgtgtgtgtgtgtgtgtgtgtgtgagtgcatggtgaaagtggtcagtaaggctgacgcaggtagctgggataggctggggtgaaggaggcagcctggaggacctcaggcatctcccctacaaagtctgaggtgaccaggtagctgaacatggccaaaagccaacccaccaccccaacctcagggctgtgggaaagccagtgggacctgtgcaggtatggttccgccttcgttgctccctctcacgttttccctctccttcgacagctttgggcgtcctgtaggccttggagtaccccaactagtctcacttgccccaaggaaacatcccattagacacacatcccgggcagtgtgtgaatgcgtatgtgtgaggggggtggggaggaagcaggggttcctagagattattggggattgtccatccatccaaatcaggccagcatgggtgaagaacattgattgtgaatttaaagcaaaatgagatactttgtgtaaagtgtttactaaggggaagggagtggggaggaagaaaaaagaagccatagaatcagagccctggagctgagttgaaagaggactcagtgtccccctcatcagagtccctttttattaagggaaggaaactgagttcagagagggcctgtgacttgcccaaggtcatacagctggttagtaacagaggactaagacctagatcttctggttactttgccaaccacactgtcaagtatcccaaggtcaaagtaaaattttaagatcccttgtgcttgtatagacctctgtcaggcagcactgacagaggggacacccctcaccctgagtggggaatcaacctgcagaagaggaatgtcccaccggtttgggagcaaacagcaggactgggtgggctcagggataaggatgatggtgtggagggagccggctgtctaacctc

SEQ ID NO: 13808 - DNA, 2300 bp, Homo sapien
gagctgacttctctgcaggtcaaacacttctcttgtcccttcctcctctaatgtttcattctcctacccaaagggaccatgctctgtgtggtttgcgtggtttgttgtcattagtggaaccacccaaactgcatcccctagcttgcatctctcaccccaccccactctgtccatgattttacccaaagggaagcaacagagggtcccgatggtgaccccgaagccaaatccactgccctcaaaatagtcacgaacaacagagggagcacacgctggcaggccttcagtgctgagctgtctcggctgcggacaggggtctcctgggaaggcagaggaagccagcgtcctgggtgctgggccacaggtgctggcacaggatcacggaggaggttagggtggcagaaagggggtgggggcactctgggtagctgaggggaaggggctgccttgggtaacaagtggggtaaaaaatgaatcccaacctccatctctccctcacacacagaagtgtacacacacacacacacacacacacacacacacgcttccctcactgctgtagggttgggatatcctcactgcactgagccctcctaatattatacctagcccgagctccatctcagccgaatgtgaacctcctcaccagctctctctgagtctcagttctgccctcactcagcacttcctggagttctgcagaggggaccctacacagctgcaagtggtggccctggcacctggagttcccaagggcagaaccacagctcactcccctcttggagcacagagattgacgttcagccacattgagccaagcccagagctgaagagggacgaggctccagacccaccactcctccagccaccccttggccactcacctttatgccagacaaagacattgggctgcagagcactggggtcaatgttgataacagcgaccagcacgtcctgcagggtggtatttcggatttcttcaatctccttcttggagaacagcctaagttggagtaagtagaagtcactgggatgggaaggggatgcaggcctccagcaaccccaggcccaaggacccaggtgagaaaagagacccagaggtgttgggaagtgggtggtgggctggcttggaatcaagggctcatgggggctgtctaaggccagaaagagggtctggggcccaggccgaggtagagcctgaggcggaggcccagcacgccttacccattcctggtgttctcaaaccagtagcggtcaccatcccgtagccgcacaaattgttcaaggacgatggtgctgaacagaggtccagggtcccggtggctctccaggagtcccccagggagcagctctagccaggataagtcctggttgtacagggcagctgtggcctccagtacctggaaccaagaaggggcagaagtaagagaaaggacacggcacccaccctaaggcaaagaggtggctcccagggattagccccagggatgataataataaatgacagtaacagtaactcactcctatacagtgcttattatgccccaggcacttctctgagtgttttacataagtgaactccatttatgggaaccctctcacacattcagctgcctattttataaagtaataaaacagccagccaatccgcattcataacttgttcttgaaaaggtatgaaagttgaagggacaaaatcagaatgtgcaaaagttgaatggcagaatgatgtgttataaaaggtttctattctttagaactaaaattttttttaatcaaatgcctgattatatattgccttttggagacagttttcaaaaacatatcaccagcattttctacctgacctttattttagttttcttttctccacagtgtaaatagcacttgaccagcttaatcccactgaggcccatttgaagctaaagatttgctacttttggtgtgcctggtggttcctatctatatattgattttataaagtttacgagcccccatgctcatatcacttctttattggcctttcaaatccccactttccaataattttataaaatagtaagggcaaaatgcaatagaataggcacacaactgtagaaacactgctgtgtcaagatggtaaggtatcccaatctggtctcttggctagcagctgaacaggacccctgttcagcaccatcatccttgaccaatttgtgcggctgtgggatggtgaccgctactggtttgagaacaccaggaatgggtaaggcatgctgggcctccgcctcaggctctaccttggcctgggccaccagtcc

SEQ ID NO: 13809 - DNA, 2300 bp, Homo sapien
gaagcagctcctttctcagctccttacctggcaataccacctattgtccccacctcctaggtcagcttgctcaattgtttcagattgggaaggtccctgggggaagctgctctgcatcccatggggagctttgggtagcatctaagatacccacccttcctcctcagattccaccactcacgtcccttcctggccagagactaagtccagagtccttgtgtcagagactagactcaccccaccaggctgctagctgacccacacacagccttgccaaagactaagccccaagccctcactccagcgactatgtctgccccagcctgctcttcctccctcccttcctccctcccttccttccttccttccttctttccttccttccattctctctctctctctttctttctttttttgacagagtttcgctcttgttgcccaggctggagtgcaatggcgcgatctaagctcactgcaacctctgcctcccagattcaattgattctcctgcctcagcctcccgagtagctgggattacaggcatgcgccaccatgcccggctaattttgtatttttaggagagacatggtttctccatgttgatcaggctggtctcaaactcctgacctcaggtgatccgcctgcctcggcctctcaaagtgctgggattacaggcatgagccaccgcgccccgtcttagcccttgttcttaaacagggatttgcctctgacagtcctctaggctcaggcctgcaaaaagctgtggattatagattccccctggctcctgaccaatgctgggccctgggggcagtcccaggaaaacagggaggcaattctccctggagctgacttctctgcaggtcaaacacttctcttgtcccttcctcctctaatgtttcattctcctacccaaagggaccatgctctgtgtggtttgcgtggtttgttgtcattagtggaaccacccaaactgcatcccctagcttgcatctctcaccccaccccactctgtccatgattttacccaaagggaagcaacagagggtcccgatggtgaccccgaagccaaatccactgccctcaaaatagtcacgaacaacagagggagcacacgctggcaggccttcagtgctgagctgtctcggctgcggacaggggtctcctgggaaggcagaggaagccagcgtcctgggtgctgggccacaggtgctggcacaggatcacggaggaggttagggtggcagaaagggggtgggggcactctgggtagctgaggggaaggggctgccttgggtaacaagtggggtaaaaaatgaatcccaacctccatctctccctcacacacagaagtgtacacacacacacacacacacacacacacacacgcttccctcactgctgtagggttgggatatcctcactgcactgagccctcctaatattatacctagcccgagctccatctcagccgaatgtgaacctcctcaccagctctctctgagtctcagttctgccctcactcagcacttcctggagttctgcagaggggaccctacacagctgcaagtggtggccctggcacctggagttcccaagggcagaaccacagctcactcccctcttggagcacagagattgacgttcagccacattgagccaagcccagagctgaagagggacgaggctccagacccaccactcctccagccaccccttggccactcacctttatgccagacaaagacattgggctgcagagcactggggtcaatgttgataacagcgaccagcacgtcctgcagggtggtatttcggatttcttcaatctccttcttggagaacagcctaagttggagtaagtagaagtcactgggatgggaaggggatgcaggcctccagcaaccccaggcccaaggacccaggtgagaaaagagacccagaggtgttgggaagtgggtggtgggctggcttggaatcaagggctcatgggggctgtctaaggccagaaagagggtctggggcccaggccgaggtagagcctgaggcggaggcccagcacgccttacccattcctggtgttctcaaaccagtagcggtcaccatcccgtagccgcacaaattgttcaaggacgatggtgctgaacagaggtccagggtcccggtggctctccaggagtcccccagggagcagctctagccaggataagtcctggttgtacagggcagctgtggcctccagtacctggaaccaagaaggggcagaagtaagagaaaggacacggcacccaccctaaggc

SEQ ID NO: 13810 - DNA, 2300 bp, Homo sapien
tcaaaaaaagagatgttccttcacttttcacctagatatgctatttgttaccattttaccacatttgctgtttgtggaacatttgagagtacaggcattaatactttgttttaaacattctgatttaattttaatatagttcagcttatcttcttttgacctcaactatagaccagggtcatcttcaggcttggttcagcacttggaagaaacccagagattcccaggactcctgtaagaatttggctttgcagcttagtcctgccctgccttcagtgctcagcctagacaggaacaatggggtggctcctgggagagcttttctcctgcatattttattatgaacattttcaaacacagaaaagtaaaaagaactgtagcgtgatctcccatatacctaccacctagattctacatttagctcttggaggttttaagctagaggatcttaagccaaatttttatggcagagcaggctcagaaggcaggttatatacagttcccgaaatctaccccatagtcccagaagtgggactgatgatggacacactttagggaagcctgcctggccaactttctttcaggccttttccctgcccacctatggctgggtccagctcccattggggacaagggctgaggttggagcacccgaaagcagggcctccattggtctgggactgtctactgtgcctgagcatgggatggtaggagtgctgtgcgtttgagccaggtcttcctgggctctggaccctgagctgctccctagcctggctctgctttgcaggggtggaggtgcctgaagtcatcaaggacctctgccggcgagcctcctacatcagccaggatatgatctggtgagcacccatctgggaatgtcggggggaggagttggggagttgccatttctctcccctgaatggctgggatcagggccaccgctagcccatgcagcaccttcaaacaaattagaaaaggacacccctttctctaggcagacacagccctgtgccagggcaagcagaaagcctgctggatttccgctctcacttacggcctggcccagatgcccttgtgaagggtaaaggcatatgcagcagccttagcgaggacccccaagatcagactctgtctataggtgactgtgggaatcctgctgtccccttgctgacagctctgatccttcctcagcagaatgggtttggaggcagaccaggatagcagaggaacgagtggttgagatggccagcatcctatctcttaccattcttgtcttagtccctctcccagagtgagtgcccgctgttcccgcagcgacattgagactgagttgacacctcagagactgcagtgccccatggacacagaccctccccaggagattcggcggaggtttggcaagaagtatgtctgctcttccccttaagcccaggcagttcatccattccttcagcttataaacatcttttccttggtgccaggcactgtgctaaacattgtgggtacaggcagggtgaatagtccttgcccaagaacatcacaatctaagaagagaatctggtacactgataatttcaatgtcccactgatgactgttctaatagtggtaagagcgaagggctttggaactcaaggaagcactcacctctgccagggaggtcagagatgccttcatggaagaggtgtcctttgagtctctagtaaaggctgaatatgggcgccgggtgggagttgggagctacagactggaaggagagggactgagtgtgaatgaacacaggtagatggagtacatcccctgggaagaaatgaccactccaagccatccctccactgccagcttgcttatgcagtgcaatatagcctgatgcggtgaggtctgaacccttcttccacaagggtaactaggtttctttctcggaagcagtgggcttccctcacttctgggcggctcacctccgtgaagtggggccccactagcgttgggtcccatggtgggtgccaaaggctaaggcttcctgtctcccagggtaacgtcattccagcccttgctgttcactgaggcgcaccgagagaagttccaacgcagctgtctccaccagacggtgcaacagttcaagcgcttcattgagaactaccggcgccacatcggctgcgtggccgtgttctacgccatcgctggggggcttttcctggagagggcctactgtgagtgactttacttaccacgagccctgtccctaggcttgcaatgagtgatcgccctgggggtggggcctgcgataagtgccagccctggg

SEQ ID NO: 13811 - DNA, 2300 bp, Homo sapien
tgcttcataggctggaatgaggtatctggacttgcttcaaaatggggagtggagccatgatgaattcttgagcaagagaggaacaggatgaaaatgtcagctttattactgataaagttgattagagaacattacttatgttcactgcaatgggcttatgtgtcatcacaatgggcttcttaatacttcaccacagaattaaacttgcccaatcaggcttgggcaactcagtaggcctagtgggggaaccctgcaaaagaagagccagagcttgtccccatccaagctcagagcctgcccttgggtacctggggctctgggtcaaagacagcacaggagcaggccactgactgcatgaaccagaatgttctttctcttcaggaaaagagagtgtgcattcactgaccaatacaataaactgctcttcctacttgggagaggtggtaagggaggcagagagtggtcaagaatatcccaggactattattccatggagctcttggaaacacaagcctgcagaatggaggttcaccctagcagtaatctatatacggaaagatgagggtgaaggtcactgggtattggcaaagaacagatgggatttgaagaatgaaggagggccaggtccaaggagaacagtgtagtagacagaaatggagaaagtgagaagctgactaccccatttaggtcagagggtgtggaacccaggaagcccccatgaatgccctgaaattatatgtgaaaatatgggagcacattttttgggggagtagctccatagcttttatcatattttcactggggtcagtgatcccaataaaagaactactagctttggagaaggtggtcagtttgaaacaatggtatgtcaaagcgaaaggtctttatggcaatggacccaaatgactggaaatacagatgcagcaagtgccatgaggctgggcatacagttcaaggaattaggatagggaaaaatgcataagacctagtcttgggaaagagaggccaagagaggatctagggagaggccaaatgggggtgatcagaaagaaagtctttgccgggtccgtggggaggatggtcactgcctttccaatagtcattttggagaagcagatgtgacttgtgtgacctgaagtggtacaggaggccacacaactgaaggtcagatattagcattcgagatagtcaggaaggacaaaataatggtgagggctgggtcagtgatcccaaaaagagaaccaattagctttagagaaggtgatgagtttgaaaccatggaatgtcaaagtgaaaggtctttatgatgatgaacgtaacttgtcgaagggaaagtttcaaggagcgggtggtccacagtgtctgggcagcaaagaataattctgtgattgtcaaatgatatcacttgcgggctgggtgtggtggctaatgcctgtaatcccagcactttggaaggccgaggcaggcagatcacctgaggtcaggagtttgagaccagcctggccaacatggtgaaaccccccatctctacaaaaatacaaaaattagccgggcatgatggcggatgtctgtaatcccagctactcaggaggctgaggtgggagaatcgcttgaaccggggaggcggaggttgtagtgagccgagatcgtgccattgcactccagcctgggtgagagagcaagattccgtctcaaaaaaaaaaaaaaaaagaaaagaaaaagaaaaaaggaatgatatcatttgggacagaaggaaacaaatggagcttggcatcagggaggaagtggacaacgggagggttgtgcctcagtttcctaaactcataaattttagctacccagccctcgctggctgttgcaggatccttttcctgtcttttactctagtgcccacctgcccttgccttcattggctcccttgcttttagagacccagaagtgttttgagggtgaggaacccaggatgtgtggttgctgagctccccccagagccagggcatctcctctgaaggaggcctggcttgttgctgagaagcattggaggaggggagccagaaagccaaggctgaaccctcacctttcccttcctgccctgctccggcagagatccggggctccaaggagacagcaactcagcccttgcctctgtatgacacaccctatgagccagaggaggatggggccaccgcggaaggtgagggggccccctggccccgggagtcccgcctgccagaggatgatgagaggccccctgaggagtatgaccagccctgggagtggaagaaggagcggatttccaa

SEQ ID NO: 13812 - DNA, 2300 bp, Homo sapien
ggagattagtgtccacattaaagtttgagaagcactgtcctaaatacaagcagcactggcttgatcagaagcactgtcctaaatacaagcagcactgtctgaccagtggcacaatcatagctcgctgcagccttgaacttctgggctcaagcaattctcccacctcaacctcccaggtacctgggactacaagcatgagccacctcgcccaactagaatttgcacaaagcaggaactcaacaaatattttgagactcggggccctgggaatcccaggagattcacagttttgccattacatccttctttacaccccccgctttgaactcctttcctttggggcctcttggctttttgcgccctcaaaaggcagatatggccaggtgccgttggctcacacctgtaatcccagcattttggaaggccgaggtggggaatcacttgaggtcaggagttcgagaccagcctagccaacacggtgaaactccatctctactaaaaatacaaaaaattaaccaggtgtggtggcgcacgcttgtaatcccagctactagggaggctgagctgggagcattgcttgaacccgggaggtggaggttgctgtaagctgaaatcgtgccactgtactccagcgacggagtgagactccgtctcaaaaaaaaaaaaaaaaaaaaaaaggcagacatgaacctaggagtgcggagacactgaggcagtgggggaaagggggtggggtaaagtgaggtgagacagctgctttcccagcagagccaagagcaaatgtgttggtgttggcttcaggcctacatttatggtgaggaactggctttatttctttccttttcttttttctttttcttttttttttttttttgagacggagtctcactctgtcgccctggctggagtgcagtcgcgcaatctcagctcaatgcaacctctgcctcctgggttcaagcgattctcctgcctcagcctcccgagtagctgggactacaggtgcccgccaccacacccgactaatttttttgtatttttggtagagacggggtttcaccgtgttagccaggatggtctcgatctcctgacctcgtgatcctcccgtttcggcctcccaaagtgctgggattacaggcgtgagccaccgcgcccagccggaactggctttatttctaagacaaaaatgcctagcacttgagcatctgagcctcaagaggataaggagtttgtgatagacaacactgggactgtttctagacttgatttattgacttgtctgtttccattctgttactaatctgattgacaatgaagcccgggatgtggctggaagggatttctgcgtgcgtgcgcatgctatcgtcagggccatgtgggcccgtttggagcaggtgctcccgtgggtgggggatgtttgagcgagggctgtttgcgtgtgagaagggcgtgtgtgaaaacgacacgggagaagtgggcgtctctagggagttgtttgtatgtgatgtgagatgtgtttgcctggatcgggaagtaacgtaggttcgggtatgtgcagtgcgtacggttggatgggaggaggttgtggggctcccaaggtagcacgggaggaggaggcttacagacacatcttacagaacctagccccttttcttgcccgcctagattttcctcctagattatagtttcccagttgcgagatcctgggagagggaagaggagaggcgtaaggctccctagagtcaggagtctgggggctcccctctttgcgtctcgcacgagctgggagctggggaaaagaacagatggggatggatgcgctccccacaggggaccgcgtggcgacacgtaaaggattcaacctcagtccagtagtcgcatcctctgccccagggctgcccacttcacttcttgcctgtgcataccggctggaagcccgcgtacactcttccgagctacgggaggaggaagaccctgttagggagcggagccccgcctctcccttgttactgaagcgccccgccccctccccgcccggcggagccccgcccccctccccacccccgcccccgccccccacccgccgctgcgctcccctcgctcagtctggctggccccatgttactgagcggagctcctccggctggctcccgcccggggccgcgaacgcaggggagcgctgggggcggcccgggggggtcccgccggggcgccgggggtgcgggagccggcccaggagggggcggcagcggcggagtagccaagtggctccgggagcacctgggcttccgcggggggggcgg

SEQ ID NO: 13813 - DNA, 2300 bp, Homo sapien
gctttctttagcattcctgacctcagacatggatggctagtgggttatctcagatggtgaatgtttgtgatttttgttttattggttgacgcttttttttttttttgagacagggtcttgttctgttgcccaggctggagttcagtggcatgatcacggctcactgcaatctccccctcccaggctcaagcaattctcccacttcagcctcctgaatagctgggactacaggtacacaccgccacacctggctaatttttgtattttttatagagagagcttctcaccatgttgtctaggctggtctcaaaccccggagctcaagcaatcctcccacctcagcctcccaaaatgctgggattacaggcatgaaccaccatgcccagcctcttggttgacactttttccttgtagtactcttagagagtggctactcctaactttctcctcagggtgtgggagcagctcattgcctactgaagcacctgcagcagggcagtgggggctggtcttcaggggaaaagccagagcctttcctggcatcccaccctgacaccttattccagcccacagattgaaatccgtcacagcagttatttggtgaggggttggaggaatataagtcaccacattcctgttggccagttctttttttgttgttggcgatgttgattttctagacatataacgtttgaatcagtcatccaaagcttggcaagttctcaggctcacctttccccattctattttgcgcagaacactctcgaggtgtgagctgtcctgttgtgtggtttaaactcgccaaatgtagagaactgggagactggagacctggggagattacagcccccacgcagtgccttgcttttttttttttttttttttttttttttttgagacagggtcttgctctgtcgcccaggctggaatgcagtggtgtgatctcagctcactgcaacctctgcctctcgggttcaagcaatccttccaccttagcctcccaggtagccgggactacaggcacacgccaccatgccctaatttttgtattttgggtacagacagggtttcgccatgttgcccaggctggtctggagctcctgagctcaagagatccgcccacctcggcctcccagagtgctgggattacaggcatgaagccagtgcctagcttttaagtgctgttcattctttactgattgattgtgggtagagggggcgcaaccccattgcaatgtctgtctctcccaggaatgatctcgggcttgccttgccaccctcaggacacctgagaggagctggagaggctcattcctcagtgccctctcattccctccttgagagtgacatagccaccaccagctgcctgaaagtcaaatccaaaactcacttccattttgcctaatgccaaatgacagacttgaatttgttgagtttgggttttttaggtccacataaaacaagcaaacaaaatgtgcttaaacttgaggtagattaggggaaaaccctccaggagaaaaccccctctcacctaggagactgtggagatgaaggccacaaacctctcattagcacccctcatagtggctactggaaccagcacctctagtgcagtcatatatttcacttgtcacgggatctgaagcaaaacggttcagcgtatggtctaatctgcattcttctaacccttaattaatgtttgcacattgttcctatcacccctttgtcccaaagtattgatgttttagctagtgtgaaggtttttagaggatccaatatatgattcggtcattcacaagggtaaaataaagagtaccacacagaaactacacaaaaataaaataatcacatattggggaaggtgggggtgactgattcactagcagatgagaaaggaaagccccagagtgtgcaccgaactttttgtgcacacttcattgtccgttataatttcagccctggccaggtaacagcttttagagttagcttcccagaagaatgtgtggctttctaagtctaaaaagaggcccttgccgtaccattgtttccacaatgccgtgactcggattcgaaccgaggttgctgcggccacaacgcagagtactaaccactatacgatcacggcgagctaccgggacgccacgacgagcagctgacccagtgttgcccttctcgtctagatggcggccattccagctttcctaagcgtccattatctaccaggttcctcccgcacccacgttcacccgcaagagcagccgggagcgctgtggactccctagcccgaagtctcctcttgg

SEQ ID NO: 13814 - DNA, 2300 bp, Homo sapien
gtaagcaggttcactttcaacactggtgtcttattttcctgaattaatataagatcttacaacagtgctccacaattgcaaagtcatgtaatatttttccaagttctttcttctgtattaaattacttaattttcatgataatcttatgagataggattaggcagggtgggaaagatggaagaggcccagaaaggtaaagtgagttgctctcgatccagaatacaacacacatctactctgtgagggattctgtgtacgtctgcgcacatacacatgcagaactggggaaacagaaatatgtccttactttggtgtttggaatccgcatctacataccaaataatctaagccagaatctgtggtggtgatgttgttttcacatattttacaaatatttattgattgcctaataatattgtggtgggccttgagcctagggatacagtgaagaacaagatagagaacctggccaggagcagtggctcacacccataatcccagtactttgagaggccaaggcaggaggatggcttgagcccaggagtttgagaccagactgggcaacatattgagacccctatccccacagaaaattaaaaaaagacttagccaggtgtggtggtacacgcctgtggtcccagctactccagaggctgagatgggaggatcacctgagcccagaagttagaggctgcaatgagccatgatagtgccattgcactctagtctgggtgacagagcaagaccttgtctaaggaaaaaaaaaaaaaaaagacagagagcttgtgcttgaggagatcactgtctagtaggcgatggtatgtgctctatagggttcagcaacaacatggtgcaatcagagtgcagggaggggtcctaagttttatccagagggcgtcataggaagctttctttctttctttccaggccaggataagtgttaccagctctgtaaagtctttctctccctcttttttttttttttttttttttttgagatggagtctcgctcacccaggctggagtgcagtggcatgatcatggctcactgcaacctctgcctcctgggttcaaatgattctcctgcctcagcctcctgagtagctgagattacaagcctgcaccaccatgcccggataatttttgtatttttagtagagatggagtttcgccatgttggccagggtggtctcgagcgcctgacctcaaatgatccgcctgcctctgcctcccagtgtgctgggattacaagcgtgattcaccgcgctcgacctgcaaagcctttcttgacacatccgtctttcctcactgatctgttcgttttttgatggcagagaccttgtctcactcatttttatgtcctcacacggaaaacggtggctggctaatagtggttactcaataagtatttgttgaatggattaataaaataattcctagcagtcatttggcatggaatcatgtacagtcgtgctgtttattgttttctagggcatgtctttccagcacaaaatgatggtaaattttctgggtgcagagacggctcttactgtattttacaggctacccagtgcctagtccagtggtgggtaatgcttacaggaatgtacctgttagaagttcttacagaattcttttgttttgttttgttttctgacagggtctcactctgtcgcccaggctggagtgcagtggcgcaatcacagctcactgcaacctccacctccagaggctcaagggatccttccacctccgcctgccgagtaactggaaccacagtcgtgtgccaccgcgcccagctaatttttgtatttgttgtagagatgtggtttcgccatgttatcctggctggtctcaagcgatccgcccgtctcggcctcccgaagtgctgggattacgggcgggcgccacctctgcataagtcttaggcctgcaaaacagtcttaaaaacatataatatttaacttgagaggtgcagtcctcctctacattgagggcaggctcagcgaaggagggcccaagacataaaactaaccaatggcaggaaagcccccatgccccacccaagctgcccctcctccctcgcagctgagcttttctttcagtccttcactgaggagccagagggaatcaattccacaagctggggtaagtaaaggtgtttgggggagggcaggtgcctaatttacaaatttttaaagagatcatatttaaactaaatgcaggtagttttgtgcctagtcaggaaggccctaatttacacaatataagttggttatgtgtgtttaatgaaattata

SEQ ID NO: 13815 - DNA, 2300 bp, Homo sapien
ctcttttttttttttttttttttttttgagatggagtctcgctcacccaggctggagtgcagtggcatgatcatggctcactgcaacctctgcctcctgggttcaaatgattctcctgcctcagcctcctgagtagctgagattacaagcctgcaccaccatgcccggataatttttgtatttttagtagagatggagtttcgccatgttggccagggtggtctcgagcgcctgacctcaaatgatccgcctgcctctgcctcccagtgtgctgggattacaagcgtgattcaccgcgctcgacctgcaaagcctttcttgacacatccgtctttcctcactgatctgttcgttttttgatggcagagaccttgtctcactcatttttatgtcctcacacggaaaacggtggctggctaatagtggttactcaataagtatttgttgaatggattaataaaataattcctagcagtcatttggcatggaatcatgtacagtcgtgctgtttattgttttctagggcatgtctttccagcacaaaatgatggtaaattttctgggtgcagagacggctcttactgtattttacaggctacccagtgcctagtccagtggtgggtaatgcttacaggaatgtacctgttagaagttcttacagaattcttttgttttgttttgttttctgacagggtctcactctgtcgcccaggctggagtgcagtggcgcaatcacagctcactgcaacctccacctccagaggctcaagggatccttccacctccgcctgccgagtaactggaaccacagtcgtgtgccaccgcgcccagctaatttttgtatttgttgtagagatgtggtttcgccatgttatcctggctggtctcaagcgatccgcccgtctcggcctcccgaagtgctgggattacgggcgggcgccacctctgcataagtcttaggcctgcaaaacagtcttaaaaacatataatatttaacttgagaggtgcagtcctcctctacattgagggcaggctcagcgaaggagggcccaagacataaaactaaccaatggcaggaaagcccccatgccccacccaagctgcccctcctccctcgcagctgagcttttctttcagtccttcactgaggagccagagggaatcaattccacaagctggggtaagtaaaggtgtttgggggagggcaggtgcctaatttacaaatttttaaagagatcatatttaaactaaatgcaggtagttttgtgcctagtcaggaaggccctaatttacacaatataagttggttatgtgtgtttaatgaaattatacttcaaatgcttgaagagatcacattttcaaaagcaattccatggggaagggaattttctgcaaagtaaataaatatctcagaatgaacttatattctaattgtgaatgtccatgtattaaatttgcttattctgaggcccaaatgtttgcttattttgtttaaaaactttacttgggatcattaacattcatactaattattttaaatgtaagttttgttaatttcactgatgagttctctctggggcataaaaaaccaattcttatgctacattatagtcaggaatttgaaggcctgtaaattgttatctgttcagcaatactttagggtccgggtcttcccaactgccttcctccctgtttccttcttactcagcaagctcagtggggcctccctggggctaaaaggagtagttaccctgtgactctttctttgagggtccaagtaggaacctttatagcccagatcctggggccctgggcggcccactgattcatttcaattccactgcctttcatttctcttctcctatcttactgcctcttctttagctattcacaagaggaaataggattttatttttcattatttattatataaaaattacacatccaatcttctcaattctcagttcttaaagaaatcaactaagccttcaaagacttttagttttgcgttttccatgggtaactggtcctaaaaattctccccatccccacagaacagaatgaccaatctttcaggcttggccctgaatttgtttttcagttgaggagaacaggagatggagaaagcaagtggaagacagtccattgctctgtccacagtggagactggcacagtgaacccggggctggagctcatggtaatcaccagtttagtttctctctgcagagctgtgggctgctgcatgggctcctgtagggtatttggctgctctcaatccccatcatccctggcagggctc

SEQ ID NO: 13816 - DNA, 2300 bp, Homo sapien
agaacagcctacctagcagcctcatctgcagcgcctgagctattatgggtctgcatgctattttccccctgccacccccaccactgccccaactgtgacccaacttctctctataatgtaattgctgggtctttacagctggggcagtccagggcagacactatcttttgatggtctaaggtccccttcttcacttataagtttaaattgctccaaattaatattctttttctttccctttgcctctctcctcctccttcgcaatccttctcattcccaggccttctcgttattcatagccttcaacaggaacagcgttgggcaatgaggcccatggtggtttccatgtcattatccctatagtaactcagggaacagttgttttctgagcatcctttcatgttccttgggaaaccatggaaaagactgggggctgtcagtactctggaacttctattgtgattataagaccgcacgcatgggactgaatttatttgcttatttatttttgttttccctaggtgagagctgaaatcattacaacattttcactctgtggatttgccaatcttagttccataggaatcacacttggaggcttgagtgagttcatccattttcccagctccccagtaagacagccagatcccagcttctgtagtgggcagtcctggtgcttcagtacaagctgggatcagatagagaagccattgtgaaatgggcccatttcttaggctgcagttaacttggacctaaggcagtcatgcccacctggctaatgcatacagccctttataatctcaacttcagttacttctttttcctttggattggaggccccaaaaactaattttattttaattttctctatgaggaagaaaatataatgatattatttcaattttgccattaaattggaatagtgcatatataaataaagatatttatttatttatttatttaattttttttgaaacagagtctcactctgttgcgcaggctggagtgcagtggtgtgatctcagctcacttaaacctccacctcctgggtttaagtgattctcatgcctcagcctcccgagctgggattacaagtgtgtgccactatgcccattattattattattattttttttgtatttttagaagagacggggtttcaccatgttggccaagctggtcttgaattcctggcctcaagtgatctgctgccttggcctcccaaaatgttgggataacaggcgtgagccaccacacctggtcttgtattttattcagtagtgaagacactttttgaaattaggctgctcactagtcatcctcatggaaacacaaagaattaaaacaaataaaagcagcaggcacataaggcagatagacagtaagagagagtggtgtaaagtgttggatttaaatatgcaagtaccaaatgttaaaggagtgggtctttgaagcagacacagatatatttagactgttggagatactgctgcatgggggtgattgttggaggaataatatgaggaaagtggaattgtccttgagtgcaggggcacaggggtgactagcagatcccaagtttggaagatccaagttagaaatggatcttaggctggatgtggtggctcatgcctgtaatcccaacactttgggccaaggcaggaagattgcttgctataggagtttgagagcagcctggggcaacatggtgagattctgtctctacgaagaatttgaaagttagctgggcatatttgcacatatgcctgtagtcctatctactcgggaggctgaggtgggaggattgcttgaactcagatcgagcctccagtaagctgtgattgcaccactgcactccggcatgggtgacatggggaggtcctgtagaaagaaaaaaagaagaaaaggaaggaaggaaggaaggaaggaaggaaggaaggaaggaatcttagaaggagtagattataataagaaatatagctcagtgtgtccctttttaaaggcaattatattctggggtagagtcatttaattcatgtacttggtagccaatttaattgaaaggtgaaataattccctttcagtttaccttttccccttctgtcaaacacctgactgtattgttctagtcttgatgcctgattactgtccgattatgagactgccatctagtagtgggatatgcattgtgtggctaagtcttaggccacacaatgagtgttgctttccttagccctctgtctcaaaatagtccatctaattctggtccaggcttaagagtgcgtatctcaagcagtgaa

SEQ ID NO: 13817 - DNA, 2300 bp, Homo sapien
gatgtcctccaatctcaagcagaaatggtatagtaatctcaagggcttgttatgtgtacttactgtactcttcagttcttttcaggagaagcacatctctggctgccctcagtacactaagagaatcagacctcagaggtggctgcattttattgttgggagtaagtactttttaaattttgagaaatgttagagatttcccaaaacctcactagaagtatgaagccttgattagaaagataaagggatttggttccaggtcacacagcaaattaagtggcagaattaagttatgaacctagacttactcctttcaccatattatggcatttgggggcctccttattgctagagtagtaacacattacctcatatagctttttttttttttttttccccagatggagtcttgctctgtcgcccaggctggagtgtagtggctcgatctcagctcagtagctgggattacaggcacccaccaccatgcccggctttttttttttttttttttttttttttttgagacggagtctagctctgtcgcccaggctggagtgcagtggcgccatctcgcctcactacaagctccacctcccgggttcacgccattctcctgcctcagcctcccgagtagctgggactacaggcgcccgccaccacgcccggctaatttttttttgtatttttagtagagacggggtttcaccatgttagccaggatggtcttgatctcctgacctcgtgatccgcccgcctcggcctcccaaagtgctgggattacaagcatgagccaccgcgcccgacctagtttttgtatttttagtagacagggtttcatcatgttgaccaggatagtctcaaactcctgacctcaggcaatccgcctgcctcggccttcccaattgctgggattacaggcgtgagccactgcacccggcctcatacagctctaatgccacgcatcaagttctgcatgtacaatctctcattttggcctctcagcaaccccccatgtgctagggacagtaaattctattgttctcactttgcagataagaagactgcaattcaggaagacatatagtagtctataagtgattcaggactggaactcagttatcctaattccctctcggaggctctttccaccatgccatctgctcgtctggtgctttccatccatgaactctggaaaacaagcttgagataccaaaattgaaaagacagctcatcaaaaatgaatagttataattctataagtacaaaaatgaaatactcaaatctcttgccccccctcctgctaggagcataaatgttaacctgagttctctagctctgtacaaatccacagcaattaagactgcactgtgagggaaaatacttttctaaaaaagaatcctgatcaagttgaaacaaaaattttaaaacatgaaatggaaggaacgaaactgtcgtcctcccttatttctgacccacacttgtcgattttcatgacggagtttctcaagccaggggcatatggccaaagaccatgtgaaatgccaggtgttccaaataacaaccgacggggtactggaaggaaagcactgcctccccggggaacaaatggcccaatttccagacttagttttctgcagtctcaaacccgatgttgcaccaagaaaccacctaatctttaggtggtttcgtttaccgaaaaatgaggtgactggttcagtgcgcatatgtgaatttaagggtaacactgtactcacgctttgcatatttaaattctcaaatattcacttaatatatgcatagaccattgtcacttcgtcagaagtcgcgtcctgcccagttgcgcgagactccaacgggccttcttgcgacgctcgggtctgggtccgggtccggacgtgcaacagaagccgtcagtggccccgctggctaaaaaagggcaagcatcggaggctcgagccagcggccgcggcgcttcccgacagttcctaattcggggcgctacgccggccccaccacctgttcccggcagccaatggggccgcggggggcggccggggcggagcgcggctacaaaaggcctcgggccccgcgcgcccgcccaccccgctccgggcgcgctctcgggaaggcttggaccgacgcggcccagaggccaggaacattccgcgcgtggaccagccgggccagggcgatgctgcgggtgcggtgtctgcgcggcgggagccgcggcgccgaggcggtgcactacatcggatctcgggtgcgtgcgccaccggcctcgtctggcggccgcgtgactc

SEQ ID NO: 13818 - DNA, 2300 bp, Homo sapien
tcattgaatggcatgataaatatggatgttcagatggctgaaatcatagtgttgcaaatggttagacctaaagggacagaatggattttactggatgattgggaaagacatttatagttttgctcagagtgagtggataagagctgaaggcccagtaacagaattccttgttgcttttgtttgcaacctatggtaaagactggatcttttagagaaagagtgaagtgaaataatatttcctgtgcatatggattctataaggtcagagggttcttgtttgaccttgtataaaatcaacctcttagaccaaccaaaagcaacatgtagtttccttctcatcatattcctaatagcatagtttgtgcctctgttttaaaccaattcagaaaattttgaggccgatttaactttattggctccctgttttggctttggttattccactccattaaacctttacttcttggccatttctgcactgtaaatataagtaaatctactaactcttttacatgagatccctttacatatttaagacagttatcctgtcctcagtaagtcttctttccctctcccagatccttaaagcttcttggagctgaatagaaggaactcgatgaggtacaggcttctgataaaataacttgataggcatgtaattcacacctttaggggtcggtaaaaacgatggctttttttttatttcaaaaaatgcaaagctgttatttaaaagtccccaaaccaaaaagaactgaagccaatgggattaagaggaaaaaagaaaacaggaagtaatgggtgacttatccatttcaagacctcctcctgctattttctgattcctaaattgttccagaatcgatttaagcagacaagtacagctgagaccaggtaagttactgtcaagtcaagaagtctgtcatgtctgccatgaagtttggacagaatgagatcaggaactggcatgggtcttaagatcccagatctgacagtacttcccattgataagatattactacacagtctgtaattgattatttgcatagatagaaaaaaaaaacttcccagcaacttaagcactctaaaatatcagttttgtcaactcacaaatttgggttgcagtgaaagtggggaaaatagaggtaggaagatgtaagtcaaataaaaacaaggtatatcttcttgtctttgagtatctgtagttcttttttaacggcaattaagagggatagaaaatgtattccagctgataaaaaggaattccctgtgcgaaagggaaaggcagaaagcagctggaaaaaaaaaatagcaggcagttgtcttaataacgtagataggtatcgcctctaatacaggacttagtactgttgtgccccaattagacagtaagcattgatcgcatgaactttagtgattaacttgttgccaaagaatattcaaaagaatatcagaaatcagaacaaatgtactgttggtgtgctacaaatccatcaggtagcctagttttccttctttcctctctacaagggattttaagcgctaccgtgtgcttccctcccactatgctggtactttcccataggaagggttgtgcctggacctcccagattggaaccccgattaccgaaggtcccaaggctgtattctcagttacgccaagtcacctgagacatttgcaccagagcacccaaaattctgtgcccatgcggatagttagagtttcttcacaaaatagcaaagtctctaggttgctattccaacggcggtagtactgatgctccagttcgaaggccaggaaaacagaatgtaaagccggtgacttccaagatatatgtaaccaccaaagtacatgcttaatgacctagtgaagtgagcttaagccgcctcccagacacctgtaacgaagaccatctcgggaaagctctgggttaggcaactcgatttcacgaaagcggacaccaacgctctacccagaggcccgagcgtcgtctaacgtttccattggccctttcggccttcactcagctgctagcaacgcagtctgccctagcgcatgcgcgcaatctgcttccggcctgcgagctcggtgttccgctttttgtgggccgggtgggtttcctaatctggtttcgtctgcctggttcatctgtgtgcgatggctccggactcggatcccttccctgaagggccgctcttaaagctgctacccttagacgctagagaccggggcacccagcgctgccgcctgggcccggccgccctccacgccctgggcgcgcgcttgggctcggcagtgaaga

SEQ ID NO: 13819 - DNA, 2300 bp, Homo sapien
atacgaaaatcctaatattccagaggagtaacactggctagaaagttgcacaatgaaaattctatgtcatttaacaagtttttgttatttttaagaacacacaaagttctagaagccaggtatagatagctaggtccctgcccttaaggacacaggtactagatagtgcaaggaagaaatccactcaagtcctgaactaactgagctaaaagtgtgtaattatcatttctcttttgaatcctatcacaaaatagaaatatcagtcactaaatttcaaactgttctttagaattcaagtcaatttaggaccaaagcttaaaataggacagctctgaatattcaacctccctgacaactcagggagcagttgtgggtacctcctcaattgtggaataggatgctggtgttatgacaaggaatgaataaatccagaagagttaatgcctgcttccatttagttcttccccaccttctccctttttatttcaacacacttacttcttgaggctatccttctttaaattctcattccaaaaaatgagtttaacacgcttgtaggtgaccaaaattctcttaagaattaacattactgattataggacctgcacaacaaaattaatctgtaatggacacctcgcttcccaaaacaattagactctggggaaacaggtcctgactctcagatcctgactcacaggtcctgacaatttgactctggggaaatacaggtcctgactcacagatcatatatcggcagagaacgtgttctctgcattgcaaagagccccaactccaacctcaccgatgctcaaacctaagaggcaaacgcctccggggcagccaaatggcgccagaagcggccgaggttccaccgacagtgggcaaacccgccaagcccattcacctctcggtcaaatctcccgggcctacgcagcgctgggtctagagcgtccggccggttagtggctcccacaaccacgacctcgcggtccccactggcgccgtccagcagcgtcaacacctgggccactacgcggctctcgggtgctcgactgccccgctggggacacaaggcgtccatctcgtccaggaagaggaggctgggtccgcggctggccagttcccgggcgcgctggaagacccgccgcacgttctcctcggtctccccaggccgggaaccctgcagcgccggggcgctgactgccagcagctccgcgcccgcctcgcgcgccacggcccgcaccagctgggtcttgcccactccggggggccccgccaggagcaccccgcgaggcaccgctaagcccagcgcggtcagggcgcgcgggtagcggagcgggaggcggaggagctcccgcagcgagtcggccgcctccgaaagacctcccaggggcacctcgggctgcggctgggcttccgacggaggctccccgccaaggctgacgcgggtacgaggggtgaccagcccagcgggatcgggactgggcgtcccgccgacgatgtgcaaggcagccaccaggccaggagcgcctggcggagcgaccaccacgtggcccagggagatcggtcggtttctcagcagctcctgtgccgcctccagcaccgcggctgtattccgggcaccgggcgcgcctgcccgctctcgcaacaccggccacacggcgacgcgccgcaggggcggacagggcactaggaggaggcgattcaggctgagactcctccgggatctcgacgccccgaccgccgccccggggctcgcgcacagcgggtccagctgcacaaagccgtccgctccgtcccgccgaggccaggcagtgcagaggcaggagccgccgtcgggtagcgagatcttcactgccgagcccaagcgcgcgcccagggcgtggagggcggccgggcccaggcggcagcgctgggtgccccggtctctagcgtctaagggtagcagctttaagagcggcccttcagggaagggatccgagtccggagccatcgcacacagatgaaccaggcagacgaaaccagattaggaaacccacccggcccacaaaaagcggaacaccgagctcgcaggccggaagcagattgcgcgcatgcgctagggcagactgcgttgctagcagctgagtgaaggccgaaagggccaatggaaacgttagacgacgctcgggcctctgggtagagcgttggtgtccgctttcgtgaaatcgagttgcctaacccagagctttcccgagatggtcttcgttacaggtgtctgggaggcggcttaagctcacttcactaggtcattaagcatg

SEQ ID NO: 13820 - DNA, 2300 bp, Homo sapien
tctaggtaatacaaaccaaggagaattaatgttgaattttctttgaagtatataacgtagatccatccaattagcaaatgtctctagttacagttctggggttaaacagtaagaacgcttgccagagtaagggagtgggaaactacatttatgatcagccttacataaaacaaatctttgaggctgggcgtggtggttcacacccataatcccagcactttaggaggctgaggggggcggatcacctgaggtcaggagttcaaaactagcctggccaacgttgcaaaacctgtctctactaaaaatacaaaaattagcggggcgtggtggcacatgcctgtattcccagatgcccaggagactgaggcatgagagtcgctttagcccatgaagcagaggttgcagtgagccgagatcacaccactgcactccagccagggtgacagagcgagactctggctcaaaaaacaaaacaaacaaaaaaccaaatctttgcatatagtaactatttgttgagtgcctactacaagcaggacagaatgctttacatatattctaacattttttccaactctctcccctgccaggtttgcccccattttgcagatatataaactgaaactcatgaaggttaagtagtttacttaaagtcagctattaataataagtatagcaggggcaggctctgaactcaggtccatttgactacaaaacccaggtttagaatgaaaatggggttgaaacacagcagggtctagccaatttcagggaacgttaagatgttgccttttaactttaacttacagcttgaacttcaaactgtttgttttaaaataactggtcctttacttattgcagtatttaacagaggggtgcagacagaaccatggtgttgggcaccagacagacctgcgttctgatggcatcgccgccacttaccagtgacgtgaccagagcctctctgagtcttaataagactttgcacccaccttgccgaggggaatctggctcagtgtctggcacacacacagcccctggctctgtgaaattgttaccattgcagccgcctgcaaactgcaaagtgaggttgctggcttagaggagagttaggagggaacccaaagactaaaccagccggcagggtcgtttgcagaaagaccttctcctgacagcctccccagcttattcttttgtttgttctccctcgacctcgggtttttgttttattgtgtttatttgtttgtttttgtttttttgggttttttttttagcagaaaaagtcaggacgccctgggagttattctgaaataaactttacaatttaattttaatgatctccataggtgcacagaccacattttggagcttttaatgtgattggattaattctaatttacccgcctgcacctgggagcctctcctgggaccctccggtctgcagctcatttttccggacccccttttattgtttatttgcttatttaaatattttgttttattctattttatttaaaacagggtctcgctctgttgcccaggctggaatacagtggtgtaatcttggctcactgcgacctcaaaggcctggactcaagcgattctcctgcctcgccctcctcagtagctgggactgcaggcatgcagcaccacgcccgctaattttttttagtagagacgtggtttcgtcacgttggccaggctggactcgagtgatcctcctgcctcagcctcccaaagtgttgggattacagtcctaagccaccgcgccaggcccggatacccttttagaagggttggctttccctcaggcctcggctatctgcgctcccctcttagggggttccacctcctactccccaaacctccaaactcctcacaagcacctaggggggccaagagcgaccggggtcggcaggtaaggaagaccgcggcgagcggcagggggcgccagcgcccgcgttcgggcgcttcacgtcagccgcagaatgtcctgcagggggcgcccgggagtcgcgtgcccaacggggaaagcgagtcaggtccctcgcgctccccgccccacgcgcgtgaccagagcgcgctggcccggcccacccggggcggttgtggtcgctatatataaggtggggaggccgccggcccgttcggttccgggcgttaccatcgtccgtgcgcaccgcccggcgtccaggtgagtctcccatctgcagagacgcggacgcgccggcccgcagttggcctgcggagcgcggtggacggtttggcgcccaccaggcgatcaatactttggatttttaatt

SEQ ID NO: 13821 - DNA, 2300 bp, Homo sapien
agtgatccaatggtgagcagaacagtaggtcctcatggggttacagtcttgtgggggaagaaataaactaatcagtttcccaaatgcacataaaatgacagctatgagaaggtgactgaaggaaagggtcacacgactgtggaagcacaggcaagaggcctgcctgggcttcagggaggcatccctgaggtgaaggcttgcacattgatccacccacctaccatccagtagggaccacattccagagagaccgaccttccttccttcccttccttcccgtccttcctgtccttcccgtccttcttgtccttcccatactttctgtccttcccttccttcccatccttcccttccttcccttccttccattttttttgagacaggatctcactctgtctcctaggctcaagtgcagcagtgagatcctagttcactgcagtttcgaactcctgggctcaggcaatgctcctgcctcagcctcctgggtagctgggactacaggtgtgtgccaccacgcccagataatttttaaaaatttatagtagagatgaggtctcactatgttacccaagctggtctcgaactcctggcctcaagcagtctctgcccgtctctgcctcccaaagtgctgggattacagatgtgatgtactgtgcctggcccacaggagctccttttctagtaggcaggtggatactctatgcaatgatagaaattaaataaatgtccgttcaaactatttggaggccacactgcacacccattcattatcaaaaataaataaaaatatgaaacctaccattggcaaagctataaggaaataggtacaaatcatatactgctaggagcactgcagcttaggccaacttttttgaggacaacctggcaataggtaagccagagctttggatactgtaccctagggtttcactttggggagtatttcttttcttttcttttcctttctttctttctttcttttttttttctttttgtgagacggagtcttactctgttgcccaggctggagtgcagtggtgggatctcggctcactgcaacctccacctcccaggctcaagtgattctcatgcctcagcctcccaagtagctgggtttacaagcgcacgccaccacgcccagctaatttttgtatttttagtagagacagggtttcattatgttggctgggctggtcttgaactcctgacctcaattgatcctcccacctcggcctcccaaagtgcttggattacagacatgagccaccacacctggccagtttgaggagtgtttcaaaacaaaatgcagtggtatttataataacaaaaaaaaattttaaaggaaataagacctgatacaggggaacactatattaatatatgaaaaacaataatatataaatacatggattgcagcaggcactgacaggttgtcattgtttttgcgccttcctggtgttcatgaacatcacctccttggatgttcatgtcacttctatgaggaacaggaagctctgggcacccagctggtgagagcaagagtcctgtgtgccccacatgacaccaagctgccaacttccatcttaccgaaccccaggctgtctgctcctgagggggctctggggcatggtgacattccccagtgggcgaggaagctgaggtcactgtctgctttcaacacttgtccctgagtcactgcctgggcctgagtaggggaaatccagcccctgcccattgcagccacacggcctggctcccctggctctgggggatgtcaccattctgagggcgtccagcagtgtgatggtgaagccaggtgccctctcctgacagccacccttgccccacagagcctgcctgctgggatgtagaggaggggggttccagcccctcctgtcccgcgtcaggtctgtagcacacaagctgcctgcccagggtcctcaaatcagctgtcttcactctgacctgcaggtctcggctcctgcatactgcaagctgggtgccttccttctacagaacccatgcccccttgcaaggaaaccatggaatttccccaggagtcttcgacaactccaggccacaggaaggtcacaaatggtcagaaaaggaatgaatttgaaggaggaagaaccagccctgcccacgttgtctggggcccctcccaaggggacaggaaagctccacaaacaggacctggaacatccagggagcgtctgggctgcaggtaggtgtcgccttatacactttacaccaggcccctccccacctccccatttagagcctccaggaccaatcgtatc

SEQ ID NO: 13822 - DNA, 2300 bp, Homo sapien
ctatataaatgtactctctcaagcagtgttaaaaaaattcccattccatgatgatatgtttacatcttagatcttaactgcaggtgtttaaatctcaaaaaaattaatgtttaaaaataattttgaagctgtttaaaaatcctaaggcaaccagtaaacaaatgactatataatatgttgagaagcagtggagtttcctttaggaacacattcttttttttttttttttttgagagagacaagagtcttactctgccgcccagaatggagtgcagcagcatgatctaggctcactacaacctccgcctcccgggttcaagcagttcttctgcctcagcttcctgagtagctgggattacaggcgtgcaccaccatgcccagctaatttctgtatttttagtagatatggggtttcaccatgttggctaggctggtcttgaactcctgatctcaggtgatccgcccacctcggcctcccaaagtgctgggattacagacgtgagccaccgtgcctggccaggaacacattcacatgcattatgcagtagcttaacaaaagaaaaacttcacttggggctttagctcttttgtacagtagctgagagtacggaggggtggggatgctagataattttccaacctgatgacctggatagctacttggaatatcaccatttaggtacagtgtcaagttttgcaccagaagacccagtcactaagtaagaggtcctggatgctgtgggccagtcatggcagctcacacctgtaatcccagcactctgggaggccaaggtaggaggatggcttgagcacaggagtttgacatcagcctgggcaaaggatgacccccttgtaggtaggccctgtctctacaaaaatcacaaaaattagctgagcatgctagtgcacgcctatagtcccagctactcgggaggctgaggtggaaggatcacttgagcctggaaggtggaggttgtagtgagctgagatcacaccactgcactccagcctgggcaacagcgcaagaagatcacaccactgcactccagcctgggcaacagtgcaagaagatcacaccactgcactccagcctgggcaacagaataagactctgtcttaaaagcaaaaacgagaaataaattcaaagaaaatgtacgtaaagaaacaaaaagtttactgcactccagcctgggcaacagagcaagactctgtcttaaaagcaaaaaacaaaaaacaaatacaaagaaaatataggtaaagaaacaaacaaaaaatctacagtctaagtttttttaggctaaaaaataaaaaagatgatgaggaattgattgatatattagccaggagcatcagtgttcctacaaaatgaaattatcagatattaactctagttctttgaggcaagttttgctgaagctacttaaatgtcaacttttgggttctacttttgagtctgacatctgggtaaatgttacttcatataatagttcaggtaattattttatacatattttcaaaataagcaaaaaatttaaaaacagtaatacagtaagaagcagagctgtgtagatagcaatgtatgattttaactctttataattaaacattaaaatttgttcaaaacaggcaaataaaaatgtgtgcatttgcagaattatgttgatacgatggctgcagtcaagttcagccacacagcatacattatacctgtgatagctctgcttaaaatctaagctatggtagctttggctgaaatacctgaagtaaaagagagaagctaatgctcattaacgggttaaacccatgtggttttgctttgttcaataaactgaaagtaaacttttttctgatgatatcttcaggacatagggagcaacctttgaagattaatgatcatcatataattttatatgtgtaaactgtttagctgactaggctaaatgtaccctggaaaagatgtttctgaataaattttgtttatctattttcatttgctttgttcaaacaagatatcactggaacgagttcagttaatcagggttatagttcattgtggttttactataaaatattataaagcaaaagaaacaccaactacctacctaagcgatgaaatccaaaggtgaatcttttggttggtgattttgatgatagccacaaagcaagcagggtgagtatgatggcgcttaggtcagttaacatatgaagtgcatctgtcatgattgctaggctatttgcaatgtatccaccttagagttacaagtaggagaaaaaaggaacaagttaattttttaaaaaag

SEQ ID NO: 13823 - DNA, 2300 bp, Homo sapien
agaatagtttgaaatcgggaggcagaggttacggtgagccgatatcgcgccattgcactccagcctgggcaacaagagtgaaacaccatctaaaaataaaaataaatgaataaaaaagaagaaatacctttcataaggctatagctgccattgattcctctgatggacctaggtaaagtaaattgaaaaacttctggagaggattcagcattccagatgccattaagaacattcgtgattcatgggaggtcaaaatatcaatattaacaggattttggaagaagtggattctaaccctaatggatgattttgagggattcaagacttcaatggaggaagtaactgtagatgtggtggaaatagcaagagaactagaagtggaacctgaagatgtgactgaattgctgcaatctcataaaatttgaacagatgaggagttgcttcttatagataagcagagagagtggtttcttgagatagaatctactccttgtgaagatgctgtgaacactgttgaaatggcaacaaaggatttgaatattccataaacttagttgataaagcagaggcagggtttgagaaaactggattgactccaattttgaaaggtccactgtgggtaaaatattatcaaccagcatcacacgccatcaagaactctttcatgaaaacaagtcaatcaatatagcaaatgtcattgttgtcttattttaaggaattgccacagccaccccaaccttcagcagccaccatccagatcagtcagcagccattaacaaggagcaaagaccctccaactagcaaagaatatgacttgctaaaggcctagatgattgatagctttttttttttttgagaccgagttttgctcttcttgcccaggctggagtgtaatggcgtgatctcggctcaccacaaccttcgccacccgggttcaagcgattctcctgcctcagcctccctagtagctgggattacaggcatgcgccaccatgcccagctaattttgtatttttagtagagacagggtttctccattttggtcaggctggtcttgaactccccatctcaggtgatccgcccgcctcggcttcccaaagggccggtattacaggcgtgagccaccacgcccagctgatagcatttttttagcagtcatgtattttatttacttgtttatttttagagacaaggtctcactctgtcgccaggcaggggtgcggaggcacaatcatagctcactgtaatctcgaacctctgggctcatgcgaccctccttcctcagagcaattaacaaatgtatatatactttttccttcctctctcccaatattttaaattaaggtatgcacattgttttagacataacgctattacacgcttaatagactacattataaacatgattgtatttgcactgggacatgaaacatttgtgagacctcactttgtcatattgcggtggtctggaaccaaattcgcagtatctccaaggtatgcctgtactagattttctatgcttgagtttagtccatatcgtaaataccttggaggcaaaaggaacacggcagagagcacaaagaggacaatacatatttgctgaaaaacagtaggacacagaactgctgacgacgacagccttgccctctccagttgactgcagcaaatgttgccaatttgccagagacaagcaattcgaggagagaaaagctgcttgccttttcagttagcaagaaaagtgctgggtttgtcttctgccgagcacccgcaacccagatcccgacccgagattcctgagacacactttcggtggagggaactcctagcagcaacgcccagcccccggcgtgaccctccgaccgcacttgcctcccagcctgggaaggtggaagaggccgcccaaagtcccctcagttggccagtgagtgacccctgggcggaggcggcgcagtggcccccaatccagcctcggggcgagaggcggggcgcgccgcgcgcccccgcccatcgcgggcgccccagccctgcgcgccaggcctgcgtgtcctcgcgccgacccctccctcgcgcgcctcgcccggcgcacgcgcgtggcctcgcgcagggcggggagaggcggtggctgtgggcgtccggccccgaacctgtcagacctggggagccggcctccagcagcgggcgcggcgggcgcgagcacgaccccactctcctgcggccgcgggtggagcagcgcgagcccgcctcgctgagccggccgggggcggggagatgagttgcggccccgcggcagcgccccaggt

SEQ ID NO: 13824 - DNA, 2300 bp, Homo sapien
agacgggggtttctccaggttggtcaggttagtctcgaactcctgacctcaggtgatccacctgccttggtctcccaaagtgctgtggttacaggcgtgagccactgtccctggcagagatcaaggttttattatgcagatgaagcctctggtagagctcttatcagacctaaaaaggtgccagacttggttaattccctcctgggtaagggaaaacacctggaaaggaacagggcttttctacagactgtaggttttcccccacaagatacagctttgcagggccatttaaaaatatgtcaaaggaatatattttggggttaaataattcaatttccttcagggcctgctatctgtcgtgatgctatactagagtcaggctggcttggtgtcaaaaataaagttctagaaaagctagaaaaagtctggcagtcttaagatctgttttcatgtgaatgctgttcagctcagcctgaattccaaagggaggagggtataatgagccatgtccgacccacccccgggactaacccccccatccccacttccatctagatgatggaataactagattttcaggtttactttggaatgcccttggccaagaggtgaggggcagggggtccatcagtcagttgtggggtttataattttatttttggtttacaaaaggatagaatatttcaggttgaagcataggcaagagcactgcagacatgaaagggcataattttaggagaatgctcacatggaataaagaatgtcttgaagggtataccgtacattattattggtgttataacaagttatcacaaacttaagacacagattatttcacagttctgttggtcagaagtccaacattgatcacatgaggataaaatcaaggtgtcatcagagcattagagaggcttcaggggaatgtttccttaccagttccagcttctggaggtcacccacaatgctggaggctcccttcctctatattcaaagccaacaatgttgtatctctctaatcattcttcatagttacttgtcactcttgactctcttttgcagttttggaggccctatgattacaatcagcccactggaacaatccaggataatgttttttttttaagatggaatctcgccctgtcgcccaggctggagtgcagtggagctgctcagctcactgcaacctctgcctccctggttaaagcgattccaggataatctatttcaacaccaggtaattaacaaccttaattcccatttgctatgcaagctaacatattcacagcttctggtgttcaggctgtggacatctttgaggggctagtattctgcctaccagagttaataagaaggagctaatactaagaggaaaagaggcccaaagaggaaagtgtgtgaatgcactgataaaggcaatggggaaccagtgcaagtttctgagtcttgcaaattcttatttttttgaaataagctttggttgcagctgagaaaactgaacaggcataattggggagcaacattaggaggccaccattacagttgagatgagagggtataagctagagatggcagagctaaatcgttttctttggtccaaagctgcctatgcccttttctaagtgttttccaacagaattcatgagatcattccacaggatctcagcaagtgcagtttctgataacttggccgaatttgttcagtagctgctgcaacggagggcttaaatctttcatctacacttaacaaggggagcccggaaaagtggcaaaaccctagttagcaaggctgaggctcgcagagacctaggcatcgaattttttaatggtccaaatcgcagggaaagcgagcactccctgttctgaaggttttccctaaacacggagacaacactaaaaagctgtgccgcgtgagggctgaaagtcctgttttctccctagcttcagtgaagaaagcctgacggctcccccgcgtccaacaaagacaacgctcttccggtcttcgtgacccaccccgtgagcagcccaaaccgaccaccgtcctcccccagctcccaccaatcggatcgcagggactcgagccccacactgctgagtccgctgacactgcgtccggggccagacgacgatatcagcgcggggtccccacaacgccatggggcagagccaactctcgagcgcgtgatcgaagcccgcagttttttcgcccccgtcacttccgggtgcgacaatctcttctgtccggccagccgctggagtcgttaggtgccgccttgcttctgacgagccacacgtttgcttct

SEQ ID NO: 13825 - DNA, 2300 bp, Homo sapien
gagtcaggctggcttggtgtcaaaaataaagttctagaaaagctagaaaaagtctggcagtcttaagatctgttttcatgtgaatgctgttcagctcagcctgaattccaaagggaggagggtataatgagccatgtccgacccacccccgggactaacccccccatccccacttccatctagatgatggaataactagattttcaggtttactttggaatgcccttggccaagaggtgaggggcagggggtccatcagtcagttgtggggtttataattttatttttggtttacaaaaggatagaatatttcaggttgaagcataggcaagagcactgcagacatgaaagggcataattttaggagaatgctcacatggaataaagaatgtcttgaagggtataccgtacattattattggtgttataacaagttatcacaaacttaagacacagattatttcacagttctgttggtcagaagtccaacattgatcacatgaggataaaatcaaggtgtcatcagagcattagagaggcttcaggggaatgtttccttaccagttccagcttctggaggtcacccacaatgctggaggctcccttcctctatattcaaagccaacaatgttgtatctctctaatcattcttcatagttacttgtcactcttgactctcttttgcagttttggaggccctatgattacaatcagcccactggaacaatccaggataatgttttttttttaagatggaatctcgccctgtcgcccaggctggagtgcagtggagctgctcagctcactgcaacctctgcctccctggttaaagcgattccaggataatctatttcaacaccaggtaattaacaaccttaattcccatttgctatgcaagctaacatattcacagcttctggtgttcaggctgtggacatctttgaggggctagtattctgcctaccagagttaataagaaggagctaatactaagaggaaaagaggcccaaagaggaaagtgtgtgaatgcactgataaaggcaatggggaaccagtgcaagtttctgagtcttgcaaattcttatttttttgaaataagctttggttgcagctgagaaaactgaacaggcataattggggagcaacattaggaggccaccattacagttgagatgagagggtataagctagagatggcagagctaaatcgttttctttggtccaaagctgcctatgcccttttctaagtgttttccaacagaattcatgagatcattccacaggatctcagcaagtgcagtttctgataacttggccgaatttgttcagtagctgctgcaacggagggcttaaatctttcatctacacttaacaaggggagcccggaaaagtggcaaaaccctagttagcaaggctgaggctcgcagagacctaggcatcgaattttttaatggtccaaatcgcagggaaagcgagcactccctgttctgaaggttttccctaaacacggagacaacactaaaaagctgtgccgcgtgagggctgaaagtcctgttttctccctagcttcagtgaagaaagcctgacggctcccccgcgtccaacaaagacaacgctcttccggtcttcgtgacccaccccgtgagcagcccaaaccgaccaccgtcctcccccagctcccaccaatcggatcgcagggactcgagccccacactgctgagtccgctgacactgcgtccggggccagacgacgatatcagcgcggggtccccacaacgccatggggcagagccaactctcgagcgcgtgatcgaagcccgcagttttttcgcccccgtcacttccgggtgcgacaatctcttctgtccggccagccgctggagtcgttaggtgccgccttgcttctgacgagccacacgtttgcttcttccctgtgttcccagctggagggacatgagtgtccctgggccgtcgtctccggacggggccctgacacggccaccctactgcctggaggccggggagccgacgcctggtacgtactatcgggtgggaagcgcggcccgggctgggtgtgaggggcggggacctgagtgagtagaactccggagaaaccctgggggagtaagcggtttttggcggctgcggcccccgggccctgccccgagtgcagaaatggggaaccgcgccggcccctctgcccagcgcaatgggcggaactgaagtcccgaggggaagctttgtattgggggtgcaattgaaggcggttgatggtgaagccattctgagtttatgtgttg

SEQ ID NO: 13826 - DNA, 2300 bp, Homo sapien
ccttttttttttttcttttgagacagggtctggtttatagcccaggctggagtgcagtggtgtgatctcggctcactgcaacctctgcctcctggacttaagccagctcccacctcagcctcatgagtagctggaaccacaggcacatgccactatacctggctaatttttgcatttttttgtagagacagggtctcattttgttgcccaggctggtctcaaactcctgagctcaagcgatacaccagccttggcctcacaaagtactgggattacaggcatgagccaccacacttggccttatctccattttaacgatgacaaaattcaggtgtaaagaattgccccaaacgcgatttgagaccagatttctgagaaagacttgatgttagatccagtacttttcttatgtcctaggagacctttctgggtagagtctaagcctgcctgagccacacccctccctgccctcccgcactctagtatacatttatttagcagaaccttttgtggctctaggactgagtattattattattattattattattgagacaaagtctggctctgttgccccggctggagtgcagtggcacgatctcggtttactgcaacctatgcctcccaggttcaagtgattctcatgcctcagcctcctgagtagctgggattacaggcatgtgacaccatacctggcaattttttttttttttttgtatttttagtagaggcagggtttcatcatgttgctcaggctggtcttgaactcctgacctcaagtgatgtgcctaccttggcctccaaaaatgctgggattacaggcatgaaccactgtgtccagccaattttcactattataccactttgtttatatatgtagaaaaaagtatatgataagaagatcttatatttgtggagcctatagtagacatctttctttccccatctgctgctgccagtattcaatccccctttccattttttgaaggaatacccatcataatagttctggcagaagtaagggggccaagtatattctccctgctctgacagctacaatgctggcctttgacatacagttggtcaattggaaactcccactgagaattttcactctcactctctttatatttgtgtcgttcattctacagtaatttgtgatgacatgggagcatcctgggggtagccaggctgtttctactaaaagaaggtggacattctgctttttgattatccacagctgtcctcattcctgtgcacttctcctcccatcattacccatcattttaatggttctgtgaatccctgagagccttttaatgtcccttttcttctttttcttttttttgagacagaatctcgctctgttgcccaggctggagtgcagtggcacgatttcagctcactgcaacctcaacctctgggttcaggcagttctctgcctcagcctcccgagcagctgggattacaggcacctgccactgcacctggctaatttttgtatttttagtagagacggggtttcaccatcttggccaggctggtggtgatctcctgacctcgtgatccacctgccttggcctcccaaagtgctgggattacaggcgtgagccactgtgcccagcctaatgtcccttttctacttaaggcatccagagctggtttctttcttgcaaccgataatgctgattgagatagaacctccatatacattagtgcttcttgtctgaaaacaacaacaacttgaccttcaatgacacagatgaggttactccagctaccctgtagactgatgtagttttagttattatttgataagcagattagctgtgaggaaaacagcatgtttgggaggtgttggggctgtcttttaaaaacgaggcatgaaacccaagtattgccctgtaatatggtttggctgtgtccccacccaaatatcaacttgaattgtatctcccagaattcctaggtgttgtgggacggactcagggtgaggtaattgaattatgggtgctggtctctcaagtgctattctcatgatagtgagttagtctcacgagatctgatgggtttattaggggtttctgcttttgcttcttcctcattttctcttgccgccaccatgtaagaagcgcctttcgcctccctccatgattctgaggcctccccagccacatggtactgtaagtccaattaaacttctttttcttcccagtcttgggtatgtctttatcagcagtgtgaaaacaaattaatacaacctgttcatctgcctatctggttctgagactgccctgtgg

SEQ ID NO: 13827 - DNA, 2300 bp, Homo sapien
ctaggcaatgtagtgagatctccatctctacaaaaaaaaaaaataaataaatttagaaaaaaattagttgggcatggtggcacatgcctgtggtctcagttatttgggaggctgaggtaggaggactgtttaagctccagaggtcaaggctgcaggaagctgttatcgcaccattgcactcaaacctgggtagcagagtgagaccctgtctcaattaaaaaaaaaaaaacccaaaaaaccaaaaacccaattaactgtccagagtcctgcacaatttctggtgtcctgtgccttgcaccaacattcaagtatgcaaaaaaccatttttttggtaaagttatttaggttctagttcagataattataaacattaagcattttgcatggttttcatactaaaatttccaggaatgtttctattggaataaaggaagaaaagagtatactttgttttgttcagagcttctttaccagagttatttgccatttcaaaaaatcatgttggctgggtgcgatggctcacgcctgtaatcccagcactttgggaggccaaggtgggtggatcacttggtcaggagttcaagaccagcctggccaacatggtgaaaccctgtctctactaaaaatacaaaaattagccatgggtggtggtggatgcctgtagtcccagctactcgggaggctgaggcaggagaatcacttgaatccgggaggtggacgttgtagtgagctgagatcacaccactgcactccagcctgggagacggagtgagacttcgcctcaaaaaaaaaaaaaaaaaaaagaagaagaagaaaatcatgtcacagaagcaatgctgcagatggaattgagttaccaataaaagtctacagtctgcgtttgtattgtattgttcatgatgattttgccatagatacagtcagtctctttgattaaagatagaaagtatcagttgaaaacatttaaaaaaataatattcaaggctgggcatggtggctcacgcctgtaatcccagcactttgggaggcccaggagggcagatcgcttgaggccaggagtttgagaccagcttggccaacatggtgaaacctcatctctactgaaacatacaaaaattagccgggcatggtggcacacacctgtagtcccagctactcaggaggctgagacaccagaattggttgaacccatgaggcagatgttgcagtgagccgagattgctctactcactgcgctccagcctgggcaacacagtgagactctgtttcaaaaaacaacaacaacaactatatatatatatatatatatatatattcaaaattcataaaaccaaataagtgtaaaagaaactcaaactttcaagggtttatttttgtttgtttttttgaaagcttctagcacttgcacttctcaggttatgagacttttgggacaccctgtatttattgtaaaaagggttactgaatctgatatggtggagaaccactcactgagactttacatcaacctggaaagagccgccaactgaaaatgtccagtcatgaatatgggatgggacactgtggaggccagtggctggaagccagcttacccctgcctgcgcgttttgaaggaagggctccagcgcacaccaaagctgaacctcggtcaccttctctgtgaaatgagcgcgggaatacctgtgtttctgggcagctgtgtgaacccggtgagaagcccagggcacataggaggacccagtgggaacagccagagcctctctgcacagcgccccgcctccgcttttgcctgccctgattacaaaacgctgttggcacccaggggcggaagcgtcaggtggcctcggtgtcctccgcctgtgcgccccagcctgcggggccgcccttcagggcgcgcaaggggcgagtctgtccagccggcagcaccccaggccggatggacgcttgttcctggttctgtgccccgtgagcgctcaacgccctggtgtgttcactgaccatggtgcctgggctgcggcgccgggcggggcacggcgggacttttcgggacctttcctggggggagcctcgctttccccgcctccagcctccgcccggatggcaggcgggcggggccccagtccaggccttgagacccagaagggagcgaaggtttttgctgcgccaacgcagtgaccgaaggctccgctcacgcccgggtaagaggcatccgcggccgatctttggccctgggccagcggagggagactgggcggggacagcgaccaccactgaggctgtttgttagcttaactcggttt

SEQ ID NO: 13828 - DNA, 2300 bp, Homo sapien
tgttatgtgtgaatttggtcctgtcattatgatgttagctgattattttgctcgttagttgatgcagtttcttcctagccttgatggtctttacattttggcatgtttttgcagtggctggtactggttgttcctttccatgtttagtgcttccttcaggagctcttttagggcaggcctggtggtgacaaaatctctcagcatttgcttgtctgtaaagtattttatttctccttcacttatgaagcttagtttggctggatatgaaattctgggttgaaaattcttttctttaagaatgttgaatattggtccccactctcttctggcttgtagagtttctgccgagagatccgctgttagtctgatgggcttccctttgtgggtaacccgagctttctctctggctgcccttaacattttttccttcatttcaactttggtgaatctgacaattatgtgtcttggagttgctcttctcgaggagtatctttgtggcgttctctgtattccctgaatctgaatgttggcctgccttgctagattggggaagttctcctggacaatatcctgcagagtgttttccaacttggttccattctccctgtcactttcaggtacaccaatcagacatagatttggtcttttcacatagtcccatatttcttggaggctttgttcatttctttttattcttttttctctaaacttcccttctcacttcatttcattcatttcatcttccatcactgataccctttcttccagttgatcgcatcagctcctgaggattttgcattcttcacgtagttctcgagcctgggctttcagctccatcggctcctttaaagacttctctgtattggttattctagttatccattcgtgtattttttttcacagcttttaacttctttgccattggtttgaatttcctcctgtagcttggagtagtttgatcgtctgaagccttcttctctcaacttgtcaaagtcattctccgtccagctttgttccgttgctggtgaggagctgcgttcctttggaggaggagaggtgctcgctttttagagtttccagtttttctgctctgttttttccccatctttgtggttttatctacttttggtctttgatgatggtgacgtatagaagggtttttggtgtggatgtcctttctgtttgttagtttttcttctaacagacaggaccctcagctgcaggtctgttggagtttgctagagatccactccagaccctgtttgcctgggtatcagcagcggtggcttcagaacagcggtggctgtaggacagtggatcttggtgaaccgcaaatgctgctgcctgatggttcctctggaagttttgtctcagaggagtacccgactgtgtgaggtgtcagtctgcccctcctggggggtgcctcccagttaggctgctcgggggtcaggaacccacttgagaaggcactctgtccattctcagatctccagctgcatgctgggagaaccactactctcttcaaagctgtcagacagggacatttaagtctgcaaaggttactgctgtctttttgtttgtctgtaccctgcccccagagatggagcctacagagacaggcaggcctccttgagctgtggtcaggtgggctgctttgtttacctaatcaagcctaggcagtggcaggcgcccctcccccagcctcgatgcccccttgcagtttgatctcagactgctgtgctagcaatctgcgagactccgtgggtgtaggaccctctgagccaggtgcgggatacagtctcctggtgtgccgttttttaagcccatttgaaaagtgcaatattaggctgggagtgacccgattttccagatgccgtctgtcacccctctctttgactaggaaagggaactccctgaccccttgcgcttcccgagtgaggcaatgccttgcccccttcggctcacgcacggtgtgctgcacccaccgtcctgcacccactgtctgacactccctagtgagatgaacccagtacctcagatggaaatgcagaaatcacccgtcttctgcttcactcacgctgggagctgtagaccggagctgttcctattcggccatcttggctccacctctgagtcactatttcttaaatgtggaatttccatttcttcagcgccatttgttaaaagaactatcttttctccgttgcctttaatctttcatcaaagatcagtcgactatgtcagtctatttctgggctctctattctgtaccactgactgcttgtctattccttcaccaa

SEQ ID NO: 13829 - DNA, 2300 bp, Homo sapien
ccccgaagataagacttatttcagaacttcaaaaagctgatgactttcagactgagactagttgtgtgtgcttttgtattagacagaagtccttctgataacctcctcattactaaaaattgaagagcacggtgcactaatctgtttatattgggtctttatccaagtacacaccttagtcaatgtcagaatatagaaagaaaaacctaatattgattttgaagcacggagatactaaaagtttaaacaactttttagtggcatttttttccacgttaagatttaagaaagaagacaccagagatcactttgatgatgtacttgattggattacttgactgagcccatagtgtatgaatatgttgatgaatattcttttattatagacaaaaaagtattatccccaagactattctggaaaagagaatctccattttattttggcttctaaccaaagaatcagcctacttttaaggaagtttttctcttgacatttctgtcttcaatgcattaagcttctattcatatatatttgtgtctgttcttttaacagccatgtcatctagcaatcaagtatcttatttgattttcttcaaatgatctgatctcagatacctttatcctcacagcaggcaatttttatgtaaaatactggtatcaactctaatggatctgatgacagttttaaaacctttctacattaatggcctttccattgtatttaagcatcgtgtctcctatatgccatgataaatgtgacactcccattataatgtcctaagtaaccactctgaatggggcactatccgttcttcaaatctgtaattgcctaatgcaatatatcattatgacttccaggggaaaaatacccctttaacttacatgagtgtttagttgtaaatgtgtgattatgtggttactttgctatgggaatatatttagaaaagatagaccttagaataagatagagttactagggtttcatatattgatatctataccaaatctgatagcgttactagagttttatatattgatatctataccaagttttcaaatttactttctaggggaaaacatggagcagatcatataatggctattaatatattattaaatatccagaaccaaattaaagtttaaaaaaacttactgtgccctgttagaaaatgtatatatacagtgcctcatgcagcctactttgggacatagtctcagtctatactgaatctgtgttcctgggcttaagtcctcaaacttggctaagaataaatctaactgtgacttttctaagtgctagtgcctgtttgttttccacttttggtgactattcacattcctattctctcagtctttatttcatgtattttgaatccctgatattaggtgcataaatgctcgaactataattttctgttgatgaattgacctctgtatcattattaagtggcatttttacccctgctagaattttttgctcttaaatatactttctctgatataatatagcctttccaaatttctataggtaagtgtaacatagtaggactctttccatccttttacgttagccttagtggcctttacatataagtgagtttacattgtagccagcacataattaagtcttatctttctacccagtctgctaatttatgccttttaattagggtatgcagaccactcacatgcaacacaatgattggtatggtcaggttagatttatcgtcttgctatttcttttccatttctcccatctctcctttgttgcctcctttatttagaattactgagtaccttatagtcctatttcatctttttttgtcttattagtagtaataactcttcattttgttctcttaatggtttctgtaggcttcagaatataaatttttttttttttttttttgacatttgactattttcttgtttattggtatttctttgggagatttttttttttttttttttttttgagatggagtttcgttcttttttttttttttttttttttttttttattgatcattcttgggtgtttctcccagagggggatttggcagggtcataggacaatagtggagggaaggtcagcagataaacaagtgaacaaaggtctctggttttcctaggcagaggaccctgcggccttccgaagtgtttgtgtccctgggtacttaagattagggagtggtgatgactcttaacgagcatgctgccttcaagcatctgtttaacaaagcacatcttgcaccgcccttaatccatttaaccctgagtggacacagcacatgtttcag

SEQ ID NO: 13830 - DNA, 2300 bp, Homo sapien
gtccctgaagaacacaaattggcttgttggtgggcttggccaggaatcggtttagctggagatgcctttcactgattgtgaaggaggtcctagaacccaaacgtgaaggctcagcgatctgtcacgcacacctgatgtcatgagcatggaccatgtccctctcatgtttcaaatacaggccacaggtagggtccatagtcccaccacagaaagcagttcttgtggtattgaggtcaattatatgtcctcaaaaacctgaagttctacccatttcattaccgtctcttcttcctgctatgatgctaagtgtggatgggtaaacattcattatttttaaaatgctcattaacatgtattaggtgccagggattatggcaggccatttaaagcatggtggtcgagaaagcagcctctgaagcagattgccagggatctaatttctgctccactaattactggctatgtgatatacctctatgcctatgttccccgactataaaataggctctatctcacaaggttgttgaggattaaatgagctattatgtgttaatgcttggaccaatggctggctgctacctgatctttggtctctctagacttaacaaatgttaattactatttatttgaatggagaaaccaaagagatatggagccctgtgtgagacacagggatagctaaggcaagatatgttcatgaaagtaattttaagtttaggagttaagacaataagtttaacaagaggtctgagcattgagaggtgtttgtttattgttttttagaactctgacttaagtgagtcaagcaagagaagagaaagagggagggaaaaataaatgctatttttggaggaaagatggttgggtaagctctctgtggtactggtaggcaggttttgcatgtggctgggtagctgggcagtcaagtattgcattaacgccagcctgatgcagcttgggctggtgtgaagaaccatgggatctctaaggcttaggggtcttcacatttagtgaccaccaagttaccaacctgagtatcatcttagaaaaagtgggtaatacttacaaggaagacttgtttcaagaattaaaggaacgtatgagcaatcatccagctaactccaaaatgctttgttttccacaggactaattatatgggatacaagccaagcatacaaattgaagtcttccttcctttaaataccacataaaaccaccaaagcttgcctcatatttaagggacattcactccttgaacattgtttgaatacgtactgtatgccgaggaccacactaggagctgttgacaaagttatgaatatgagtatgaattatttctgcctgaacaaacttacagaccaatagttctgcctagagaaacttaaagaccagtagtagaggaagtaatccaaacaggaaaatgtcacatgagtgataggtattatcatgaaactaagaacagaatgctgagggaagcccttagaaaggaacttctcattgtctgcagaaacagggaaaagtaaatataaaaatatttccacaacaataacagcgaggaagcgggctcattagaaaagggcacgtgtggcttggattggggtaaagagggtgttctggaactttgtgggcctttttgcatatggagaaaagctgggctgacagtctaactccaaaggccaatgaacagcggttagatgattaacacctgggaatacatttctacagtattaaaagtgatatgtagctcatttaaagaaatacatcttaatatgtagtacacaatatatctaaaccatcgcaacgacaaaatcaaagcaaggtcctttgcaccgaagggcctggggagatgtgggcgaagaccccaggacctttcccctgctcagagaccaaagggttttcagagcggaggtgggggctcccggcaggggaagttagagccgagggagcggcaggagcacgtgggctgagtgggggtgggaggacgcagacggcggagtaaccggtggaagtgtcaaagaggaaggagtggagggctgctgaggtgacagggtgtggtctgtgagggagcggacgaacccggagaagagagcagagagacccaccaggactaggaggcagcggggagcgtgcctgcgtcgctcggagcggtgacagcaaggagcgcagcgcggaggccgggcggcaaggggagtttccagtcctcgataagtggagtccctgctctgcgctgcgccagcgccttccgcctgggcccgcggtgctagacacctgccgagtccgaagcgggagtcaggctgagc

SEQ ID NO: 13831 - DNA, 2300 bp, Homo sapien
acatgtaactgtgtttgggagaaagcaggaaccattgaggaaaggaagtcctttctgcgcccctctcttctctctttcacggtaattaaccatactcaaatgaaaattaagtttggcggaaaaagctctcttctttttctttaaacaggggcatcatggttcattctagccatttagagccctcagtgatccataattcaactggaaattaataaaacacagcccgttcttggaaatgaagtttgaattaaaatcctcttgttttggaatatgtgactttttttttcctttcatttgtgacagtcaattttaaatgatgtcacttcaaggacattttcatttctcccacaacatattacatgaaacacttgcctgtaaaaccgggtcattagcctgcaaaattatactgtacagaatggctttcattcaaagtagaaatgggatttttagtaggcaatttctgtattttataaagataaagcaatgtttgattgctttcttcccagctgttttgcttagtggttataaagagaaatggggggcgggggggtaatgtgggggcgggtttgtaaagatgtgcttaaaaaataaatcttacactggaaaactaaggcagaacttcacggaacaactgcgcccgcagctctcctgggctgcagtgatttgtcctctgggttctggaggaaagctctgaaagaagtgagcgagagggaaagagggagggaatcgaaaaggttgcttcgcaggctgcagcacccactgcgagctggatgactgaggcactgggagttgctagaaggagcagctactcagaggtggggagagggagggtgcgcagcagagcgccggagaggagggacgcggaggccaccgaggggtcagcagggccgcggcgccagggtgggggcctccaggcggcgctggccacggttcacccgcgagggcgagcgcgcccggccggccgcgcctcctgccgtccgtgcccgggggtgggacccgcgccgggagctgccgagtgcgtggagggagccaggctccggctcgcctgatggattgacttggagatggatcgaattacaccatttgccgtgcatcggtttgttttgctcctgctctgtcccgctgctgctgctgctgctgcaaggggtggtggcgagtttcaggattctatcaaggaagccaagacctaaggagacagagggatatctatttttacaatatttttctttattttctttcttccttgcgcgtggcaagcttttttttttctttttcttttttcttaccagcctccccccaatgaggtaagaccgttttcaacaatttgctaatgctcttgtggcgcccggtgggggtcggaacctgagatcccgaatcgctgtgtgtgtgtgtgtgtgtgtgtgtgtgcgcgcggtgggggtcggaacctgagatcccgaatcgctgtgtgtgtgtgtgtgtgtgtgtgtgtgtgtgtgtgtgtgtgtgtgttgccactggacagttgatttattttccaagctgctctctctgcctgccgtgcaagggacgcgcaaagggctagagaggtttggcggacgcgtcaaaactggcaaagctggcggcttagggggaggggcaagtggacttggaggccctcctccactgtgcacccccttggaaaaaaagcggagggggcatcaagtaaaagtttcttgccaggcagagccagctcggcgtcccccgcacatagctggggttagcaggggttgcttctctgccgggcacagcgtctccaggagccagccggggagagctgagccaaggccgaaggagccgcctgcgggcttagccgccccctcccgcccgttggccccagagcggacgctgggacgcccggggtctggcagctctgcgcccggctaggagcgggcgggcgagcattagcctgcgtcctggagaaggggcgcagcgccgcagttgaggccggagcagcccctcgcgggcgtaggatacctgtcagtgagcgcccggattgcacggcccccgggtagtgcctgccggcgaggggcgggagctcgggtgacttggccatccccatccccggcccaggcccggagggcggccgcttcccaccgtccctctccccttactggcagagcgcgctgcgggcggactcccgggcccggagcagcccaccggccaccccaccgcccacccggctcccggtgtctcctcccggccgctctacccagcaactttccgtgctttgttccccgactggaaatgctttacggaagcgtcttggacagggtctccgc

SEQ ID NO: 13832 - DNA, 2300 bp, Homo sapien
gagggggttggactagatggtccctaaggacccccacagctctgaagttcaataaagctaaaaggaccggtgtacttagggtattggtttgtgtccaaatggttttatgtaaaaacgtagacttccctggtggcctggtgtcagctgtgccacttcatccctgccttgctttgcttgattggttatcatgaaatcattgtatttcttttaattccctttcaccctgattcagggtcattcgtgtcattgtctccacgttggtcgtagtaagcatagggaaatactcgacttaagaatttggggctaatacttgggtaatgctgggaatttggcaacaccataagcaaagagctaaggagagattatgacaggatcatcagccctctggctatttttgaggcagcttgagcgttttatgcggggcagagacaagctgtattagatatatttcaggactgggggaagggaagaggattggaatttaattaaaattcttatcccaactttgcccatcttcttgccaagtcagcagctagcatttctgctcatggttctggtggctctgctgtgatgacatacaattacctccaaaattctcgtgaatttgctgaaaacttcaataatgctcaaccagatgctttaatcaggcctggcatgttgccatcttttgcctgtgtttttggcgatacctgatctaccactgccagcattcctggtgggagaggggctttggagggagctgatggtgaaaactgagctgattacaaacaagaaaaccgcttcattgcagcatagagatctttccaaactgcttctgttttccaggtagctcagtggcatttctgagcaggggccaccctgacttcaccttggcccaccatgagggtcttcctgctttgtgcctacatactgctgctgatggtttcccagttgagggcagtcagctttcctgaagatgatgaaccccttaatactgtcgactatcactgtaagtcgtctcaagaacagtcttctattctgagaaggaagcttttctgtttttcattctgtaagcatgttcattttcagaaagaggcagagattttttatgtcttaaccttgaatttgcatctgagtttatcagtaatcatttcctagtgtttggagaaaacggggcagttttgttgggtgcttttctacagcaacctgtatataggttatatattttgagttaaaaagaccatttgctgacattcactgccttttattcatttatattcaagaccttaagagaggaatttagttaaaacccttctacaacaagtatatacagctaatcaatgctgtttattgatccctcagctccataatcctgaatgatggtttagcccatttttacttgcagattcaaggcaatatccggtttttagaggacgcccttcaggcaatgaatcgcagcacaggctggactttcagctgatgttgaaaattcgagacacactttatattgctggcaggtaattttcctctcattggtttattagattaaaattcttttctcttgtggtgcttgcattagtgtgtctagttcatgaaaaactaatatgtgattgtgatcaaaaattgcaagtagccagaaatattcactgagaagagtcagtgttgtgtaccgggaacaaaatacagagctcaagctttcagcggtgctattttattactgccatcaagaaatcatacaccattcttttttcctaaagcagcaggggaaaaaaaaaaacctttctttatgcgtttttaacttagaattattcaagcaaatattagaaatatgtctatgctaataccaagtagcagtttgacccatgcctggagagaagagctttctttgctctctgactacagtgatatataaaagcatctcactaatgaaaaagtactctttgttgactttgtttgagacagagaaaatccagatgatctctaaaacacaataaaggcagatctgtaaaaataaaaaaggaagcagcttaacatttttatgtattcacgtgatatgttttattgccttatttccaacagggatcaagtttatacagtaaacttaaatgaaatgcccaaaacagaagtaatacccaacaaggtgagcaactgtagttggcaaatttatttaccttccctctgaacctgattaattttcccactgcctccccaaaaatgttcgcagttaaaaactgctttggttttgcttgattaatacagaaactgacatggcgatcaagacaacaggatcgagaaaactgtgctatgaaaggcaagcataa

SEQ ID NO: 13833 - DNA, 2300 bp, Homo sapien
tatacagtaaacttaaatgaaatgcccaaaacagaagtaatacccaacaaggtgagcaactgtagttggcaaatttatttaccttccctctgaacctgattaattttcccactgcctccccaaaaatgttcgcagttaaaaactgctttggttttgcttgattaatacagaaactgacatggcgatcaagacaacaggatcgagaaaactgtgctatgaaaggcaagcataaagtgagtgaaacagaaaaatgtctgctagatttagtctttctgtgggcttgataccacagtgccagcatgttcaaatgtctaatattaatgtaactactactttctttaggatgaatgccacaactttatcaaagtatttgttccaagaaacgatgagatggtttttgtttgtggtaccaatgcattcaatcccatgtgtagatactacagggtaagtatattttatgtgatatgcttcttttgatcaacttttctcccttcactgatatgctgttagagttgaaatctttctgctttccagtaatttgttttatctctagtgcaatgaaagaataaagacagaattcttcaaatggaattttaatacaaataaaatagtattgccttcaaacgggcacgttgaatagatatgacactggctatttacttttcttttgtagttgagtaccttagaatatgatggggaagaaattagtggcctggcaagatgcccatttgatgccagacaaaccaatgttgccctctttgctggtaagatcctttagcgtaatgaatataaatgattaatgacattgaaggtgaaaaaggaatttaatggaagagtaaaagttaataacttggatacccaccttgatctaagtgttcgaaaggctagaatctatgcacaaatttccaaaaaaagaagaaattaagggcaaggatatttcagtgcacactataagtattatgacaccgtgttgttaactaggccagtggcccccgataagttgcttaagtttttgatgcctagatccctgtaaaattagataatatcatggctgacctgtcacatgttgatggtgagaatcaggtgtagccctatttgtatagataatggtaataccagtgagagcgctccaaagggcataacacgctgccaaagctaacacactgcaggataattatggttatcttaccaaaattatacctttggtttcagatgggaagctgtattctgccacagtggctgacttcttggccagcgatgccgttatttatcgaagcatgggtgatggatctgcccttcgcacaataaaatatgattccaaatggataaaaggtacctttgaagagcagtgtcgtggggtcaccaggatagtggatggcccaagtggggacagcagccacggccatcaagaggttcagcgcatgactttatattgtttatttagaacaagtacacactgctttgattgtgaacaggagcattgacagggaatgaggaggctggtagccatgtcagaagagtaagttcatccaggtgtttatcctaggtgacctcaaaaaaaaaaggggagatttcatctctgtgtgtgccaatttgtctaactttctaaatgcacataatactacttgccatctacccatcttggaaagttaccagagagaatcgattagtccgtatgagagccattttgttcttcagagtctagaaatcaagattttttattttcagtgtaagaggttttcttccctagttaaataggttaatgaataaatctgttgaaacaaagacctttgctgtagttcagttccctgtaggtctttttacagtccattagctgactttagagatgactggttccctgaagcttgaacacacccatattgggactcctcaaagtcattggcagattggagttcttgttggcttgaatgtaattgtgcaacatctgtcagtcatgctttgcagtcggggtcttatgctaattgaattatcctttaggaaccagtttgtttttaatttttctttcagagccacactttcttcatgccatagaatatggaaactatgtctatttcttctttcgagaaatcgctgtcgaacataataatttaggcaaggcaagtatatgcatttggcttgaattgtggacttgtactgcatgaaattgagaccactgtgatagagttaaggatgctcacttggcatgttttccagctctcaattcagtatacatagggccaactgcagagaggtgggttgcttatcatgagaataattgctggaaaacatctgaacaataa

SEQ ID NO: 13834 - DNA, 2300 bp, Homo sapien
tgtcagtcatgctttgcagtcggggtcttatgctaattgaattatcctttaggaaccagtttgtttttaatttttctttcagagccacactttcttcatgccatagaatatggaaactatgtctatttcttctttcgagaaatcgctgtcgaacataataatttaggcaaggcaagtatatgcatttggcttgaattgtggacttgtactgcatgaaattgagaccactgtgatagagttaaggatgctcacttggcatgttttccagctctcaattcagtatacatagggccaactgcagagaggtgggttgcttatcatgagaataattgctggaaaacatctgaacaataacctgagtgggaacagcagccttgagttttgagaaggtatcgttttttttcctgcagccacagagagtgttctacaggtacccttgagctacggatgctttttttactctttagaaaaccactgatagtctattctttctcagcgtcaaaagacaggatagaaagtagcgaccccattcaatttttagtgtttcagtgaaagcccatgtgattttaaagtattgcaaccccttctatgccaagttgaaagatgacatgtttcattaacaatacaggaagcaaagttggagaccaagtgcagggatggttttcattcagcaaggcagatagacagctcacttcttgggaaggatgcttagcaaaataggaaagtggctcttttttccccacaggtgaatctagtttaccttcttactgaacagatccctagagagaagactgctagatttttttgaaccagatgtatctttagtattttttgtccctcccttaaacagtatcattttgtttccattcctttccatgctcataaccccattgctttgcttctatccgttgggcaggctgtgtattcccgcgtggcccgcatatgtaaaaacgacatgggtggttcccagcgggtcctggagaaacactggacttcatttctaaaggctcggctgaactgttctgtccctggagattcgtttttctactttgatgttctgcagtctattacagacataatacaaatcaatggcatccccactgtggtcggggtgtttaccacgcagctcaataggtgagagcagaaccccggcactgcaaagatattctctgcatgcctgtcagaaccaagacaggcttcatgtcgccagcctcttcctgatgattttcttccttttcagcatccctggttctgctgtctgtgcatttagcatggatgacattgaaaaagtattcaaaggacggtttaaggaacagaaaactccagattctgtttggacagcagttcccgaagacaaagtgccaaagccaaggtaaataaaaaagtagaaaagggttttgtcttgaacaaaaccttccggtcattggaagcatccctcctcagggagcagcttggccaacctcccacaccaggaaggggtccctctctcagacagagccagcagacatagccttgtgacctgcaagcccatgagtgtgaatggagaacccattgaattcaggggcatagcattgctcctttagtttcactcactctccttcctcacttgacctcttctctgagaatatacacttattccttagatacagtacatggtgtggcaggggcagccgagagcataaaataacgctgttttcctttcaggcctggctgttgtgcaaaacacggccttgccgaagcttataaaacctccatcgatttcccggatgaaactctgtcattcatcaaatctcatcccctgatggactctgccgttccacccattgccgatgagccctggttcacaaagactcgggtcaggtgagattgtgtgtgaaacactccttcctattcaacgttttctctgcccgttggcctccccttctgatctgtgccgcctcctcttgtaggtacagactgacggccatctcagtggaccattcagccggaccctaccagaactacacagtcatctttgttggctctgaagctggcatggtacttaaagttctggcaaagaccagtcctttctctttgaacgacagcgtattactggaagagattgaagcctacaaccatgcaaagtaggtatatgttacgagaacgcccttcagcactgctcaaaaattttcggcatgtatttcatctagtcatgtccttttggtcctctaaattagcagtggtttggcataatagtgttttgtgttttttttctcattgaaataaatcttgggtttgtttttttcccgagcctgctaggg

SEQ ID NO: 13835 - DNA, 2300 bp, Homo sapien
tacaaatcaatggcatccccactgtggtcggggtgtttaccacgcagctcaataggtgagagcagaaccccggcactgcaaagatattctctgcatgcctgtcagaaccaagacaggcttcatgtcgccagcctcttcctgatgattttcttccttttcagcatccctggttctgctgtctgtgcatttagcatggatgacattgaaaaagtattcaaaggacggtttaaggaacagaaaactccagattctgtttggacagcagttcccgaagacaaagtgccaaagccaaggtaaataaaaaagtagaaaagggttttgtcttgaacaaaaccttccggtcattggaagcatccctcctcagggagcagcttggccaacctcccacaccaggaaggggtccctctctcagacagagccagcagacatagccttgtgacctgcaagcccatgagtgtgaatggagaacccattgaattcaggggcatagcattgctcctttagtttcactcactctccttcctcacttgacctcttctctgagaatatacacttattccttagatacagtacatggtgtggcaggggcagccgagagcataaaataacgctgttttcctttcaggcctggctgttgtgcaaaacacggccttgccgaagcttataaaacctccatcgatttcccggatgaaactctgtcattcatcaaatctcatcccctgatggactctgccgttccacccattgccgatgagccctggttcacaaagactcgggtcaggtgagattgtgtgtgaaacactccttcctattcaacgttttctctgcccgttggcctccccttctgatctgtgccgcctcctcttgtaggtacagactgacggccatctcagtggaccattcagccggaccctaccagaactacacagtcatctttgttggctctgaagctggcatggtacttaaagttctggcaaagaccagtcctttctctttgaacgacagcgtattactggaagagattgaagcctacaaccatgcaaagtaggtatatgttacgagaacgcccttcagcactgctcaaaaattttcggcatgtatttcatctagtcatgtccttttggtcctctaaattagcagtggtttggcataatagtgttttgtgttttttttctcattgaaataaatcttgggtttgtttttttcccgagcctgctagggcgaggggggtgaatggttgatgagtttaaaaataatgcagcccttgtttttcacctgtagaatatgagaacattttaacagcacctctcttatcttgcagatatattccaagatgctacatgcagcagacagctgtgagcttgcatacacacacacacaaatatacatgcacatacatacacagaatgcagtactagttaagtatttccttcctatctttaataagtaagagaatatttagaccattaaaaaaaaaaacaaataagaaatagaagagagaaatggagccaaggggactaaggagagaaccagaaccatctaacacaggaaaatttatatgcattaaagcacgatcctttttatttctatagtcaaatgtggccttcgcaaatgcaattcacttctatcatcataacaggaaagcaatgtttaaaaaccctttgtccagcctgaaatttaaccaaccatgcagagaagtagaagatgaatcacataattattatttcccaagctatgtacttgcctggtttgttaccaagaatattccttatgatttcccaggtctcagtaattgctaaagcaaaccacacttgactgactaaacatatggcttcaaaatgtatcccacaaaataggtgcagtgctgagaatgaggaagacaaaaaggtcatctcattacagttggataaagatcaccacgctttatatgtggcgttctctagctgcattatccgcatccccctcagtcgctgtgagcgttatggatcatgtaaaaagtaagctcgtgtttctttacttaccctgggtcttgcagtatcgaaacctttgttgatgagaaaatccaagttacattctgtttggttttacacaggtcttgtattgcatctcgtgacccgtattgtggctggttaagccagggatcctgtggtagagtgaccccagggatgctgtaagtatactttgtcacatgagctaggatgaactatcctctccagggtctctaaagctagaaattgcagaaaacttccaattatactacttttctttttttttgttgttatgggagaaacaggaaaacg

SEQ ID NO: 13836 - DNA, 2300 bp, Homo sapien
cttatgaaaataataataatatagtaaactattcatgtatgtagttttatctgggtgttattttacaagaaaaagatctttaagatgcttttgcaaaatgaagaatgtgtgtgaagcaaatctaattcatctcctaaaatctcttttcgtggtaaatccatatttagatggtaatttgtttagaccaagcatatgcatgttctggcaatgtgttttcaagaccattcattgcaaagtaatcgatctgcaaatgttgatggagtactaactatgtgcaaggcacttctgctgttccatagcaattggctcgtaccttcagacacttgctctctctcttgaattagctgacaatgtgcattggaagctttcactttgggtttgagctttttatattattggtattttatttgtttatgatgttttatgaattgattgaagtactgtgtgttgaagaggagaggctcgcaagacacttccactcagcataaaactaaacgacctcttcccttagtcttagctagctggcatgtaggccactccccagtgatcagggtgctgcttcctgcgagtgtagacagctggaactctgcttgttgagaatctgctctatactgggctatgctttggtgactcatcatcacagcctcacaatcacaccatacatctgaatatctagttcctagaaatgacagttttggagaggtttataatggataccaattcccacaaaaaaaagtagtttttgagactttcttccgacccaagatcacaaacatcaggaagcaacttactccgttccatcagataaagctagtttctaaatagaaaacttactaggcatatcaatttttgtgttttttctgcaaagcaaaggaaccatgaaagttgcaaaactacaaaaatttttatgaacaaaaacgcttctatttcaattgaaagaaagaaagagaaagaaaaagaaagaaagaaagaaagaaagaaagaaagaaagaaagaaaaagaaaagaaaagaaaggaagaaagaaagaaggaacgaaggaaaggaaggaaggagggaaggaaggaaggagagaaagaggaggaggagaagaaaggaaggaaggaaggaaggaaggaagggaggaaggaaggaaaacaaacaaaacaaagaaaaagaaaggaaggaatgaagacgtcagccagaggtcgttctgagcaaattatttgcgttcatttttgtaattcttaccacaacccaaatacaggtgatccctgttttacagatagcagaactgtgtagcagaaaggttaaataacatgccaaaagtcacataactagtaagtagcagtgctagggctcaaatcatgtggtctggttccatagcctgtgctattagctataggttactacactgccaaaagttctaaatatcttggcaagcctcataaatgttagcatagggaagatagtagtctatatttaaacactaccttgtacgtcaaatttgcattttagatagctccctctggcagaaagcacagcctatcaatgatcaaatagcatccactccatctcaataattcttgaaactgtcagctactctccatccccgttgccacagccttggttcaagccactatcatttctcagctagacgattgcaatgatgccctaactggcctttctccctttggccctaactgaagatgaagatgagaggctaaaacagaaatatgaaaggatgccgagctagccaaagcatgtacatatattaatatcaacccaaacaacttctaggggaaagggctggagagagatgggaagcagttgcaaacccaactttttacaaatctagagaaagtcaaaagcagagccagtatgaagacattaaataaaaccacacattttcataaagtacaagctgccttaatctgcccttagagactgtaggccatggaaatagctatagacaatggttgtcagctctcctccgtctcctccggcctccctggagattgggtctcctgatcagagaagcttgactggctacactcgccctttctcctgtgctggccttgctgagatgtgccctgggcagggtattgggcaggaaggagactcctcacatgatccagtttaatcctcctcttctcccttcctgaagctgcacgctgcagtaagagcacagcagaaatgcagacaaaagggggccaaacatgggcgagaagggctctgttgctcggcatcctgtgggccactgcacatctgcctctctcagggacctccctgccccaacgtctcccaagggccacaggtaggt

SEQ ID NO: 13837 - DNA, 2300 bp, Homo sapien
gaagaagttacaatgtaatggaaataataacttaccatattacaggtctcaacactatcatgttggcccctattcagagactgtgcagcgtacacaattagtgcagcagcagttcttggtataatatatgacaaccaagtttactggtaagcttgaaaataattcttatgtaaaaattagagattttatgaatttctgatggttcagtaattttttttcagaaatgttatttcagtcacttaatctgccacttctataccatattccaacaggtctgtgagttaacctcatcacaattgctgattgagttcttctcactagtttgcaatttcttcttaatcacttcacagtctccttttttctctcactagtcactggagaccaccacttttccttctccccactggctgcctattcagaaagtttcccaactcctgttgtccattaaagccacaacagttgactttttcttctgctgggttactgctcaccttgccttggttagaagtgttcatggccacaaaagactggagaaggatggtagaggaagtaaaagaagtctttttaaattcctccaaacttctgatgctcattcaggagaaactatagccttcctctaagaaataacaatgcttagcttttcatattaaaaattgtttgctttccttacaatctctctgtgcctagctggtccaagaaaatgaaaaaggtggtgactgagtggacagatactaactttttcaactagtaagcagcaggcacctactaggtccttctcactatgctagatatcataagggataatgaaatgtaaaacacagctacacaggttatatacattgcataactccagaggacaccagaaaaatatgaaaaaaaaaaaatgtaatggtgtccatctggagaaccataaccttgcagcacggcgtaatacctgctatcaagaaacttaaaacctagccagaagcataatttctaaactaatcatcctgtcctctagtccgtctccctaagacactgtgttggtagaatagaaatccttctagaactcagcagttgtctgtaagggatagtgactgtgagagtatccaagctaattcttcctccattagggaaatcagaactgttctttaagatacagcagacagagattcactggctataaaaggtaaatgcaaggttcaaatgtgatggcattagctaactgccagagtacagggaaacagttcttggttccaagggtataattttatattttagaacatcttgttttcttgtgactgtaagccaaattcagctacattcaaatcattaaaaatgctctgtatgacaaactgaaaaatcccagcctaagcctcccatatctgagtaatattttacacaaagttcctataccagaaaacttggacagttgaaataacttaacagttactatattattttataattattatgtatgttggggaatgtattatgccaatgagctgaggcagaaaatgttcaccactatttattaattttacatttattttgaaaatctccaattatcattttccttgcatttttatacctatcatttggaaggaatctacaagtaaaaacgagtttgttgatcttgtttttaaaaaaaaaaaaacaacacagaagtgtccagcttttatcaataaacataataatgctgtaatcaagtctggacaaatctacaaaacaaaaaatatctagaaatgtttgattgttctatggctacttttgttagaaaatcattcaatagatactgcccaaaagctatcaactctaaaatgactttcacttttaatttaaaaacacaaatttctcttttgtaggtatgaaggggctttactgcttttgatatatggattgtatgttttggtgctgtgttttgacattaaaattaaccaatatattataaagaaatgcagtccttgctgcgcctgtcttgccaaagctatggagagaagtgaacaacagccactgatgggctgggaagatgaaggtcaaccattcattcgtcggcaatcaagaactgatagtggaatattttatgaagattctggctactctcagctctctataagtttacatggccttagtcaggtttctgaaggtaatcactaaatcttgcccattattaagtctattcgcaaaggaaaaactttaaaatttcatttcaattcagcaagtattgtgtgctttttatgtaaaaaagactgtgaagactcagaaatgataaagaccaagtccctacctttaaggaacttccaatatcacaggaaatacaa

SEQ ID NO: 13838 - DNA, 2300 bp, Homo sapien
tgtatcagtttttaaaaggctgtttaaaacatttgagtacctcattactgatattgctggtgaaaagaaactaattgaaactttagggcagacaatgtaagatgtgatactccgcatttctttatttggggccttaaatctataaaaatgtcttgggccattcgttaaatatattgtagatagtgtttatgaagtgtcaattggacatctcctgtggattgtcttcagtaactttttgcttaagggattaacctggtttctaacctagctactccagttgtctccacttcataatattgatgatgcctctgcctgccctatgtaccagataatgtatacttaaagaatataaaataatcatagcataatttttttattaagtcgcatatcctaattcttagtggaagtggtttttttgtcctatttcattactattttatttattaaattcagactttaccacagttcatagaaataaccttaaagtaggaggtagtatatcatctaaagtacaatttatgaaaattgagtatatttctttattcaatttaatttagtagaaggataatgataatatattggataaaaattcgaattcaaaaatgttcaaaatttgtatggcatttacaaaataatgtaacaattggatgaaatcatgttaaaactaatgttagtacaacaactcataaaaagtttgccaagcttcaaccaatgtgccattaagtaatattagatataattttaacataatcaaagaatttggattggttcttttgcgtttcttattataaacttaatttggagaggcatacctcttatacctgaaagagtagaagctaaaatttttgtaaaaagggggaaaagtcatgttttaaaattttaagtagtagattagaataaaaccctcctaaaggcttaattaaatttagaatctgttttggacaaccactttataaaaaggtaacccatgaacttataattttgaccatagctgaattttctgacttcctactgaacctatttacctaaaagttttgctattgctttaaacaatggtaaacctcagctgtttttcttctttcttccaaaccagcccctttttctgagttcccagttttaataagtgctgttcccattttctcagtcaagattaaaacataggaggtgtctttgttcctttttctggccccatatagtcttggtgatgcttccttcatatagtctcacatctgttctcatttattcccaccactttcacttggtctaggcacctagtaaacacatcagctgttgtaatagcctctcttacagacctctttgtctcttcatattttagttcggtgaacatcattttgggtaacattactaagataacagttctaataatttctctcctcagaaaccttccaagattcttaaaatagcatttaagattcttcttatcctattcctttctacctttcctctccttccttcctatgcacatactgtgctctatgtgttttatctctgcatcatttatggaatgaagacctcagtagctgctacttattggtcataacatatgtcattagttaaagtctttcctgtccagcaaggcccaatttaaatgctcccttctctgtgaaaatctcctatctgtcctcaccacattttggcaatctgtcccatttgtgaaccacagtcacactttatttttctctttttatggtacttaacgttcatactttagctattttgtatttcctgtgatattggaagttccttaaaggtagggacttggtctttatcatttctgagtcttcacagtcttttttacataaaaagcacacaatacttgctgaattgaaatgaaattttaaagtttttcctttgcgaatagacttaataatgggcaagatttagtgattaccttcagaaacctgactaaggccatgtaaacttatagagagctgagagtagccagaatcttcataaaatattccactatcagttcttgattgccgacgaatgaatggttgaccttcatcttcccagcccatcagtggctgttgttcacttctctccatagctttggcaagacaggcgcagcaaggactgcatttctttataatatattggttaattttaatgtcaaaacacagcaccaaaacatacaatccatatatcaaaagcagtaaagccccttcatacctacaaaagagaaatttgtgtttttaaattaaaagtgaaagtcattttagagttgatagcttttgggcagtatctattgaatgattttctaacaaaagtagccatag

SEQ ID NO: 13839 - DNA, 2300 bp, Homo sapien
tcttacatatttgaactctattttcagaagactttatgcttttcatttattgtaaatcagagcacatagtaccttgggaattttaaagtatgattatttaaaattaattagtatattatctttccatccttgtttaggcagtgcaatgattggagggtttgcaggaagaataggatcttctaacatgggtccagtaggatctggaataagtaggtttaaattttactagaatttattcagtaatatttgagtgcttgcaaagactttgcaagagtagttatcgtagtatagtaatactttgttcttatacgttaatgtgtcttgctataatttgagaaaccttgataattgagcaaagcctttctgtttgattattgtttgaaatttctaaattaactgtttgaattttacttttttgatatttctaaactatgtgttaacagccaatccaggaaccttctttccaactaaggaatctggggatttctctgatcatgtttcaggagcaacttttgctttagcaccaactttgtttccttgcttattttctataatagctattagtgactagcttattttatttgtaaacatctatgtcttttggtaaatgcagatatagcactcttaggcatctcctgagcttgagtcaggctaaggttgaaagaggtacttaattcttttcctcttgaacctttcccgtaatagcatcaagagtagttgcaacactggggaatgctgaatctcccatccgtctatttccactcctaccttttaggccttatattaagcctgaatacatggattatttatttatttttttaacctcttttgcttactgggacatgtctctgagctctccatactttattgacttcctttaattgatcaaatttcacaaatagaaaatacaacctatttaaactattctaaaagtaaattctaaaatcctgtcagcttaagacgtctacttccattgtatcttgctccttttattcctccttccatcatcttttagcctcagccatttcctattagtcctaacttccttaccttcctcttttatctcagtgtttgtacttctgtttccctgattttatattggttattcacaaaaagccaatttgagggtgatgttaatttttagaatttccatgtttggggatattacatacaagacaaaaggtttgataatgagtaagatgggagcaattgaaaaggacaggaaatcgagtcagtgcataagaatgaagtaggtatgagttcggagctaaattcttaagctctggctaacgggaagtgatagcattttttgttcccttgacaagttccgtgtaatattgagattaaaagttatgttttgctatgagtattgaattaccatgagaataaaaactgggaaacagaggtgaagatgctgaggtgaaagataagctaggaaaggagtatttacttgtaggagagtatgatgagagcggcttgagtgctagagttgtaataatttgcatttatctctgtgtatctttattttagcaattattatgcttgatattattggaaaataaaaataaggatcagaacaactgtcctgttattggaagcagtgattggtagaggatttatatatttatatgatatatttagtgatcagaatacaattttatacagttatatatgcataatgtatttatacagtggctagaatttctcagctaactaaatgtatatgtaagcaaattctgttctttggaaagttgttatctgtatgaaaataattttatgtttttatattatttaattatataaacaaattaatttcccccttctttctcaaaaatgtttatctccttttcctcctttctcctcttctccttttccttatgtttttgaaacaaaaacacaaaattcccaaatccccccgtcctttcttgaaaatccaggtggtggaatgggtagcatgaacagtgtgactggaggaatggggatgggactggaccggatgagttccagctttgatagaatgggaccaggtataggagctatactggaaaggagcatcgatatggatcgaggatttttatcgggtccaatgggaagcggaatgagagagagaataggctccaaaggcaaccagatatttgtcagaaatgtaagcaaataaatattaaggataattcaaattcttttttttcttgtatatatgttactaatacctcttttcattctagctaccttttgacttgacttggcagaaactaaaagagaaattcagtcagtgtggtaagtatgcaaatgactgcaga

SEQ ID NO: 13840 - DNA, 2300 bp, Homo sapien
atttatatcaatgagaaaactaggtaatataatatttgccttattcagtgttatactttcatggttattgactttttagtttgatttgaaccatttaaaaagtaattatcaaattttaagtgggtctacaaatttgggcaagatactcattttcagatatgtgtgccatatataaggtgatatgatattattcaaaatcctctaggtattttattattcctctcagtgtacctttaagtggggtataaggtgtactttgtattatatcatgttttatttcataaaacacttctcattaataaatggttttatagtcgggcttcagtgtgctactttctagacaaaaacaagaaccagtgcttttatatgaaaatttgcagaaattttacagatactactacaggtatatagctttttaaaaaattttattgccaattagttaatcatatatggatctttgtaatgattgttctcatttttgttttaggtggtcttggaggcattgggatgggacttggtccgggtggacagcctattagtgccagccagttgaacataggtggagtaatgggaaatttaggtccaggtggtgagtattctaacttcctcttttctttttaaatgatacatatgctagctaataaagcctccattgatgtggtctgtaataatgtttaaaggactctaattaatagttagatatttacggtgtcacttcattctgaaaaaggaatgaaaccttgagcacagctaacatgaaagagataggcagaagtcaggagggtttctttggggccagctatgttgtagctagccttttagcattttggattttgaaatgtcttgaaggcagaaggagaatatatcatctatgaacagtatttatggagtagctgaaatgctaccatatcataggcagctaaaatctgtttatccatttgggaaggtggcttttcaggtagttatttggctgctcacctggaagaactcacagttcatttttagagattggtttttaaactttggtgttaggacccttttatattttaaaatttgttgagaacccgaaaatgctttgtttatgtagttataattaccagtatttactgtattataaatgaaaaattagaaattaaaaaaattacatattaaaaaatgataaactcattacatgttaacatacataaaagttttaagaaaataaactatttttcaatgcaaaaaagaaattggtgaggagagtggcattgttttacctttccacacatctttttaatgtttggcttaatattgctgttatatctgtttctgcactttagttttttgtgatattgtacatcatatagtgtttggaaaattacaccttaaactcaagagaatgagggtaaaacatcaaataatgtcttagtagtatttggtgacttaaatagttttgacctattgaaccctcaagagtccctggaccatactttgtgaattactgttttaattgatggactaataaatgctatcagattcctattttgtcaagatgctgtagtcacactttaaattatgaggctcattatcataatcattctgatccaaacaagttttctcccttacccttagactctcacacctacctaccctctcctaaatacatactatttatattttgaaaatttttactgctcttttaactgcgatgtttagagagtccttacattctggcctgatctctaaatctgctgtaatgctatttctgtgtctatgctggaaaaaaaaaatcattgatagtagtatttctgtgtttattgtggaaaaaaaagtgaatgattacctagttcaagatattctctaactgaatgttgtgggtgttactagtgaattttgctttcttgtctgataaatgttcaaagaaacccttttgaagattcatgattagacagctgctatggcatagcactttaaaccatgcctcctgtaccctaccgcttctctagtgtttcattgtggttataccagtggtatctattttgctataatgcattatatcatcttttagtcataaaaataaaatatacttaaagtacatactgtgtattttatttgaggtatgggaatggatggtccaggttttggaggaatgaatagaattggaggaggtatgtataaagatttgtttttttgtatgtacccatcaccatttttaataaactagaaactgtgttgagaattccatgaaaaaaaagtcatggtttattgttggctcatgttctaaaggctgctagcagaaattgagcctggtacatacttaa

SEQ ID NO: 13841 - DNA, 2300 bp, Homo sapien
acagaatattaatagttttttctttatcttttgcaattaatagcaagaaaggaaggaaagatcaatctattgagcagtcagatggaatggtaaagattaatcattctcttcccttcagaagttgccttaattctttgtcttttaagatccagctcttttataaggccctcaccaatctctcagtaggaattaacctctgctctttatcaggactagaaccaagctacagcgggtgaggcatttgtcttgggtacaaaagttaaaactcagtaatcaagataaatattttaatggaatattttaattggcaaactaaggcatgtgggccagtctcctgtttttgtaaataattttttaattatactttgcttttatttgtattatagcacttaaatagtactttttacattagccctctcccaacagggctgtactcatttttgtattcctcatgtacctactactctgtttgaagcataaaggcctcttaaaaaaatcttgcattgagttgattaaaggatttttgcaagaatatattgtactggtgatggtggggttcaattttcatactgaattcaacaatagcaaaagaataacagaatgatgactattttgaaagtacttataatttagtgctgtgggaaaaatcacttggcttgtctttgactaaaaccctgctgagcttagggagatagagaattgtaatattacattatgttcatatagcactttttcctacataaagtgctttcttttaatcctcacctcaatcctgtaaggtcggtattgctatccctatttattgtagagagattgagaaatgaggtgacttgcccagggagttatgggcaaaaagaggcagagctggggttctaacccagattttgtctgtcacaattgaatgccctttctgcgattataaatcttatgtctcagagttgaatgagaaacaatttatacagcaactacaatagcattcttatcattaaaatgttctgattatgtgtgtgtgtgtttgtgtatgtgtgtgtgtgtatgtgtgtgtgtgatgaagtagctgaacttggtatttttcggtagagggtaggaaactacacattgaaaagccgaagatgaaattatgttatttgagtattactttctaactataactttaccactgatgtgtgtatgatattctgcaaagtgactaaactgtacgtgtttgcttcttcatggaaaaaaaatttgggaaggcatttaaacttttcagctgaaaaaggttatgtcaatgtgaaagattatagtactcgagaattaggagttgattaaatttaacggtttccttttcatacttagggggaaaaatctacgactgtattttaaaactccatatggcaattaaatttgagagcgtataactaactacttcactagaatttccatcagtatacaataaacacacagtcaaaacctcaaatgtccattattagcccatctagtagacgatattttataattatggattccccatattgattgatgtccagagaaaaactgcagtcttctcttactaagctgatagttgagttcctgggaaatcctcaccccctaagaacaaataattctcaaagaaattcaaagtcattccttttggtgaattgcaatcagtcatcaataactatttatggaatgtccgaagggtgcctaggcattgaaatggcaagagacttatatttgcttaattcaaaggatttctaaaggcagtctgaggacttgcaagaagtctttaaagatgcaaagtggtgtgttctttaactgcccctacctggaatgaattgaacagtctgggtgttagggctttgatgtctaatcccgctttgcaagcgaagactccactggtgccaagcgacaggcgggctggtgggcagacatggcaccaccaccgggggctttcaggactggtccagccctcccaggcaggtgtagggccgactgcagcaacagcggccctgaccccagctcccatggctcccctccccccgcactcccaccccccgcacccggcacacaccatctcccagtcacccagtctcgaccggttctcgcgagatccgggttactgagcgctcggggccttttcaaatcgggatccgttaccgcttccccggcagccgccattgtcgcgctcggagcccctcagctcaggcggccgaggcggaggcagcggcggcgggatggcggacgccaacaaggccgaggtgcccggggccactggtggcgacagcccgcacctgcagcccgcagagccgccgggcgag

SEQ ID NO: 13842 - DNA, 2300 bp, Homo sapien
tggtccagacaatgtcaaaatcaaaatcaaaggaatcaaattcataaaaaattgttcatactgtacagacaaaatgtttacatgattagtctctgaactaattttgaataaattatttttgtaacagtttggaaacatacatagaataatagatggaataaaatgatctcctttcccacaatctatgactgactgcattgccagaattcaatatctctagcatcttgctactttatttttatttatttatttattttgagacaatgtctcgctctgtcacccaggctggagtgcagtggcacaatctcagctcactgcaatgtccgcctcctgagttcaagtgattctcctgcctcagtctcctgagtagctgggattacaggcacccaccaccacacccagctaatttttgtatttttagtagagacagggtttcgccatgttggtcaggctggtctcaaactcctcacctcaggtgatcctcctacctcggcctcccaaagtgctgggattacaggcataagccaccactcctggctgcatcttgctactttaattggtcccaaaactagtaatctctggcatcacctaggaaattgtcagaaaagcacaatctgagacccaaccccacacctactgaatcagagtctgcattttagcaagatcgttgaagattcatatgcatgttatacttcaagaagcactgttccagcccagagtgctaataaagaatgtggcccttggcaagtttaaaaagggtcaataaaaccatggccatggaaatgtccctagaataagatatgtctttcagtctttcatagagggcagttagttcacctacattttaggacatcttaatagtttaaaatcaaaaaacaacttttaaaaaatgtggtcttatatgaactctcagttatacattgcccatttttttgtaagaccattacatttcctaaatcagtaaatactctaaataatcatgaagtttgtcttcactttgttattgaatctagttgcagttacattacgttttcaaagtattttctttagatgagtgtcccaattctgtatctacatttcccccaacgactcacagtccagtagttataaggtgaataattaagattgtagggaatctaaaagtgcttgcaacttgtaggttctggatagagtcgcaaaacataaatagaattgggaaccctgtaactgagtttgttgaaacggccagacccctaaaataaggataaagagcaaggtttctgttgttgtttttttgttttcctttgctttgctttgctttaccttgctttcaacgtcggttaggtttagaatctacatattcaacactgtttagaaaacgtacctggcagctatctagagctttatcagagcgtttcctggctgctattttgttgtcttctagcttgtgttggggagacaggtctcaccacgcaccatttcagcactacggacagcgcctaggcgccttctcctagaaacggaaggggattcagttgtgtttgtgtggaagagagaagggaaagagtagaggaaaagaactccaaacgacacattcagtctccagttaaatcaatacacctttcactcctgaattttccttaccggataagaagaaacgtgtaagaatttagtgcctactgttctactgaaaacggctgtcaccaaagcacagcaaaatgcccgcagcacagccaggaatgcagcaaagagagcaaaacaaggatttcagcagtaaatcaattaaaccctcactgccttagtaaacaaagataatgatgaaatctaattgctaaccttcagggtgtgtcgtgagaaaaaaaaggagtgtctatttttttcttcctctcttcctctttcttttagcagaactgaagaatagagcctgttgctgctggagctgattcccttcccctcctcatctcccacctcctttcagtctcacatacacacacagatgctgccacagacacacgcgagcgcaaatatttacacactgccacaccgaagaaatccatgcacgttttcctgcaaacgcgcgcgcgcacacgtacttcggcgggcgcccacgtcctctgtctcaccaacagacacagacatttacacttctaggccaggaaagcgctaaccagggccctgtgactctacgcaggttccagaacacgccttctacatttgttactgaaccgatcagcgaacacagacaaacgtgccaacacttaagtctactggctggacttcatctccatggcaacaagcatggaaggtgagacatcgctgtc

SEQ ID NO: 13843 - DNA, 2300 bp, Homo sapien
gactttcatttcacagtgagagataaaaggcttagaatgaaaatgtctggttgatataagaccaagactaaaacaaattcataccactctgaagtcaggcagtcagtcagcaagaaaaaggaaattgactggtatcagaggtattcacagtcattggtagaggaaaaaggttgtagagtaaataagtggctccaaaaagggttggaggatgccagcttatggctcctgtcctggtctggtgaatagaacttattttgggtgccagccccatcctagctgttctttgtcttgatctaaacaaccagccccacccagctgaatttgaaatcggacactcctatgccaaaacactttctatatgaggaatcagaaccctttgttgaacagataaatgccttgtactggtgacctttaagagtggaatgagttataggtatatacttgtaattctgtctctatttctgatatagcctcacgacattagcctgactgattagcatgacatttacttaacgaagaggatctaaagggttttacttaggtgtctctagacacttctataatcctgtatcagttcactaacttacctttacacttattttttatagacaaaatatctatcccaatctctaatgattcacctcacaatcttgtatgtgctaagtaaaaatccccagctaattgtaaatagcgctaaaatagtgaaagcaagcactaggtacaaattgttgctgttctaaaccccatacacaaactaactcatttattcctcaaaataactctacaacaaggtaggtacaattataatccacaactgcatttgcagatgagaaaattaaggcacagaaagattgagtaacttgactgagttcacacagacagcaagtggcagggccacgacataagttgggccttctgacttgagtcttgctcctagccactatattacaccacaaccgagctactcagacaactggaaatcacttaaatcgtttcttataagaaacaaagaggactcattcaatcatcctgattgataatcagtgacagacttgagggaggaattgtttgcagtgttaataatcacctacttgcagatctgaaaaagaaaaaccttttcctcaacaaaactcaaaaactgagttggacaaaaaaatgtttttctagttggagacagaaaggtcatttagtagtgccactgagatgcttacccacagtttggttcctgcttaaaacagttttccctgctgggcgcggtggctcacacctgtaatcttgacactttgggaggctgtgccgggcagattacctgaggtctggagttcaagatcagcctggtcaacctggtgaaaccccatctctactaaaattacaaaaaaatttagccaggcgtggtggtgggcgcctgtaatcccagctactcaggtggccgaggcaggagaatcacttgaacctgggagacagaagttgcagtgagctgagattgcaccagtgcactgcaacctgggcaacagagcgagactccatctcaaaaaaaaaaaattttcccatatttcccaaaatagaaatattttcaataaatcattgattccactcttaatctgcttacttcccatgcaaaagagtcaaggtaatgtctactacaagcaagataaaatcatttcagacactactttctagttacagagtatagaaattgtctctggagaactatattttgatacacatgctaaacaataggaggtcactaggactcatctgtaagacggtggaactcaatttatctattcccaaatgactaatggcaatgctcatattttttggacaattgctgttaagggatccaattctccttatgaattaaagaaactctatgttacttcctgtctaaaaggattaatggtttactactagttaccagttgatgtggtacttaagtttcctcagggctaatgacctggtggggcttacagtactattccaggccaatcattgcacagtcatctctttcaagaaagtttctaaccaataagcagaagcctaactttctggctgaaagctaagtgtcccatatattcctgggtgacgctgaagcaggttacatttcctcagaagaaggctccttggtggtaagttgaacatttctgggcagggtaaaaatcatacttaatattatgtcataaagtagattctgaggagtaggtgagggtgtcaaggactatgaagagaagtgttttgtaaaaactaaaacgataatagcttcatttataatttccccaggaaaggttacttgagaaatg

SEQ ID NO: 13844 - DNA, 2300 bp, Homo sapien
aaacagttttccctgctgggcgcggtggctcacacctgtaatcttgacactttgggaggctgtgccgggcagattacctgaggtctggagttcaagatcagcctggtcaacctggtgaaaccccatctctactaaaattacaaaaaaatttagccaggcgtggtggtgggcgcctgtaatcccagctactcaggtggccgaggcaggagaatcacttgaacctgggagacagaagttgcagtgagctgagattgcaccagtgcactgcaacctgggcaacagagcgagactccatctcaaaaaaaaaaaattttcccatatttcccaaaatagaaatattttcaataaatcattgattccactcttaatctgcttacttcccatgcaaaagagtcaaggtaatgtctactacaagcaagataaaatcatttcagacactactttctagttacagagtatagaaattgtctctggagaactatattttgatacacatgctaaacaataggaggtcactaggactcatctgtaagacggtggaactcaatttatctattcccaaatgactaatggcaatgctcatattttttggacaattgctgttaagggatccaattctccttatgaattaaagaaactctatgttacttcctgtctaaaaggattaatggtttactactagttaccagttgatgtggtacttaagtttcctcagggctaatgacctggtggggcttacagtactattccaggccaatcattgcacagtcatctctttcaagaaagtttctaaccaataagcagaagcctaactttctggctgaaagctaagtgtcccatatattcctgggtgacgctgaagcaggttacatttcctcagaagaaggctccttggtggtaagttgaacatttctgggcagggtaaaaatcatacttaatattatgtcataaagtagattctgaggagtaggtgagggtgtcaaggactatgaagagaagtgttttgtaaaaactaaaacgataatagcttcatttataatttccccaggaaaggttacttgagaaatgaagttgagggtttttttaattcaaatacacagctttaataactgcatgagagagacaagtttttatttatatttatctcatttttctagaacttcccttgaaaagccaaattttaaggtatcaataaggaaatataattctaaagcaagtgttttaagacaggccagtactatgaaattgcgaaaattattgtgaagtctattcacctcacagtcaaatataaacctctcaattattgaagacatttcattaaaatgagtcagtagagcatgattattttacctaaacatagcagaggacttttttaaggtatatgacttatttcttatagatatatgacttatttctatattcatatttttttaaggtttcatgttagtatttgcaaaacaaacaaatgtatgagcaaatgaaacatttggatcttgtaaaagatctaagaattcacagagacatcatcttgatgggatgtattttttaaatgcatattctaaaacataattttttacttgttgcataggtaacaaaatttggaatttataagttgaacatgtacagatttttataaactagcaagaatatattttttagaagttttgtttttcattttatatgttgtatagtatatattcctaacaatcaaaatactttgcagtttcagcatttagtactgtcagtgaactgtgtcttaggctgagaatattctcatcagctcttactgtattcaataagtaaagttacatcttttctaaagtcacagtgaactccagtgcactgaattcaagcaaatactacaaacacaggtaacattttaatgactgcattggaagttctgtttgctggaacagttttccagttatttattatcagatttaattactcacatgactaaggttcctggacagataaattttagtgaaatgagtttaaaattgtatgtcttgtaaaataaaactgttcccttatatcccacccttacctaaatatatttgtattacttggaacaagtttaattttctttttcaatgacagctttgaagaacatcctgaagattatatcggagacaatatatcaagaatctatttattgaatcatctagaacaaaagccaggagctccctaatggaagcacattagtgtttattttgatgaagaaatatatagattttttaaaacaaccacaaagtagatagctcagtaaaaaatcaattttggaagatgtcactgaacaa

SEQ ID NO: 13845 - DNA, 2300 bp, Homo sapien
cgaaactgccaaactgttttctgtggtagcagtattattttccattcctacaagccatgaatgagagtcctagatgctccacgtgtttgtcagcatgtattattgccagatgattttttaaaagccattctaatagatgtgtagtgccacctcattgtggtttaatttgcattttcccaatgattaacgatgttgaacatcttatttgccatccatatatcttttttagccaagtgtctgtttaaatctttcgctcattttttagttgttttattattattcagtaatgagagttctttatctattctggatgcaaatcctttagtatatgtgttttgcaaatattttctctggatctgtggtttctctattttccttacagtttgttttgaagagtaaaagttctaagtttttgtgaagtctaatttatcttttttttttaatggcttaccatattgcatctgatctaaggtatctttttcttatccagagtcacaaacttctagaagttttaatgctttggaaagtatatttaggtctattatccattttgagttaatttttgtatatgatgtgaggtattgttcaaggttcactttttacatacaaacgtccaattgacaagtagagtttttatccctataaaaataaacagcctaaggtatgcttaatgcctgatgcacaatcaacacttaatcaatattgatcttctttatctccagataatcattgttcacccatttccctggctttctagaacaaggctaaggagaataggttctgtttgtcatctggggtgtatctgtacattcttgtcagggacttcctctcataaaccttggaagatccatttaatacttaaattcgtaaaaaaaaaaaaaaaaaaaaaaaaaaaaaaaaaaaaaacccaaaaaagaccgggcacggtggctcacgcctgtaatcccagcactttgggagggtgaggcgggtggatcacgatgtcaggagatggagaccatcctggctaacacggtgaaactccgtctctacttaaaaaaatacaaaaaattagccgggcgtggtggcgggcgcctgtagtcccagctactcgggaggctgaggcagaagaatggcgtgaacccgggatgtggagcttgcagtaagcccagatcgcgccactgcactccagcctgggcgacagagccagactccgtctcaaacaaaaagaaaaagcggaggagggggaaggggagggatggtagagctgacctcccttatgatgaagattagggattaggttctcaaagatccatctaaaatgtttgctaaagaatcttgaccctcttcatagaattcccatgctattcagttttactattcaaaatataaagattactgcacactatctgtgtatacagaaatgctgcttctccttccagtttaagaatttgggccaggcgcggtggctcacgcctgtaatcccagcactctgagagaccgagatgggtggatcacaaagtcaagagtttgagaccagtctggccaatatggtgaaaccccgtctctactaaaaatacaaaaattatccagacatgttggcgggtgcctgtagtcacagctactcaggaggctgaggcaggaaaatctcttgaacccgggaggtggaggttgcagtgagccaagatcgtgccactgcactccagcctgctgacagagtgaaactccatctcaaaaaaaaaaaaaaaaagaagaatttgtgaagacgctttgaatttattcagggactgaccagtttcccaagtctatatgcctgcaatgtggttatcgcacagcctctcccaccaagcaagatttctaggactgcagttgtacagtctgatcctttgctggaatgaagccttagcttctgaagattcacgtagtattcatagaaggatacaaagtgctttttaggaaatcccacactatattttctctaatttgggcactcatctttgctggcatagccaaggaaaatcatagaagggaatgacttgtaaaattattcatggtgcacagaggaaaggtcagtgttttttatgccaatttcctcctttatccacagatgtgaactggggctcctccacacaggctctttcctacgtgagtgctttagacaatgctctggaattaaccacagtggaagaccacgtaaaaaacttcaggtaaagctggtgtctcaggcatcctggtgtttttccaccctagaagtggctctcctttataagagacaagggcattcaagtagttataagctttaggggtacattctaaaaata

SEQ ID NO: 13846 - DNA, 2300 bp, Homo sapien
gccaccacgcctggcctcgagttaatattttttaaagcacttagaatacacctgacataaagtagtaacaatgtgtatctttgttaaaatgagagagaaatccccaaaatggcaaagataggaaaaacaaccatgcttttcaagtactgacttgcattttcagaaggttcaaattggcactagacttaggtaattgaattaatcagcatgactgataggataactatagtctgataaagaaaacaccatgaagggcagggtgcggtggctcacgcctgtaatcccagcactttgggaggccgaggtgggcggatcacctgaggtcgggagttcgagaccagcctgaccaacatggagaaaccccatctctactaaaaatacaaaattagccaggcgtggtggcgcatgcctgtaattccagctacttggaaggctgaggaggagaattgcttgaacctgggaggaggttggggtgagccgagatcgagccattgcactccagcaaggctctgtctcaaaaaaaaaaacaaaaactatgaagtaaattatggttgaaacatgtttagttcttaactgcagtatcttgcatttaaggtgtatgttcataacaagttatatttctattgtcataaagaacgttctattaaatgcttactggctcagaatcctattactttttgccagttagattatggccgtttctcttttagtctaaaataaactcagctgaaaagtaacaataaacactttatgtatacagattaacaacaaaaaatagaaggtaacctgcttggtgttagatattgtaataagccaaacaagtaacttttgtgtaaacactgaagtaagtgctttgaagaattcataaaagtttatgactctaattcatgtgagagataaaatgcatatacatcagaagattacacaatgaaagtatatggctaacgactaatgaatgatatagtaagtgttaaaagagataagatggggcagaggtcactactgattgtaaaaagtttcatgaatgaagcgagacttttatctgggtctaggaaaatgaagtcgttacaatcattacatcttagtacaagcaaggaatcaaatagtatgtctctcatgtgaacattttaagtaaataactggagaaagtacttcaacaaaataagggagcaaaataatgttggctcaaaatgaggtcgaaaagttgcagggctcggatcgtgttgctaaaggcataaatttgggagtcctcaagctgtagctaatagttaacgtccagagaaggtagtgtatattccatagcctcatgcaaaggaattccaactacgaagacgaaccagttaaggagaccgaaaagggggggcctgtatggaaaggcatagcaacgaatgtaaaatttccccaataatactctaaaactgccccacagcttttttaattttgaaaattcaaaaccattcaattcagctcgcagatttttgtgagaaataaggagatacttgcagctcagaaaaaattattaacaactatctagaaagttactgctttatcccccactgtaaactatactaccacgacccgggatccttgttcgactcctagccaaggggttcccactgcgtttctgttgggttatcccaaacctgtgataggatagtagcgccctccctgcctccggtcgaataaacactacaacgtctgacactcggtgctgaaaggaaatcgggcgcggtgtcttgcccacagcttggggagcggccccgggcgcaataactgtcaccggcgccgagatgcggttccggcgcttagggcgccgctaaactcagagcccgggagtcatggctgcgggcggtgccgccccaggtaaatcagtccaggagcagggcccgggcctggcgtacactctcggaaaaatgggggccagagcaaacaagaagagcgaaagcaagagggctaggcagccagaggcggcagcaagactcaagacgccaacggcgccgtcttcctggggccccagggcctgcgccatccctgggctgccggggcaccgcctctccacgcccctcgtccggcggcggctgcgactgcttccgaggtcatgttcccaggacgggcgcgtcttcagggtggaagcctggcgcacgtccggaggtgccgaggacccaaccagcccaaactctgggggaaatgactcccctctgccctcgccccgcgctctgctaccatttccttacgtctctgcttcgctcagcgatgcaaaacgcgcgaggcgcacggcagagggccgaagccgcggtact

SEQ ID NO: 13847 - DNA, 2300 bp, Homo sapien
actttatgtatacagattaacaacaaaaaatagaaggtaacctgcttggtgttagatattgtaataagccaaacaagtaacttttgtgtaaacactgaagtaagtgctttgaagaattcataaaagtttatgactctaattcatgtgagagataaaatgcatatacatcagaagattacacaatgaaagtatatggctaacgactaatgaatgatatagtaagtgttaaaagagataagatggggcagaggtcactactgattgtaaaaagtttcatgaatgaagcgagacttttatctgggtctaggaaaatgaagtcgttacaatcattacatcttagtacaagcaaggaatcaaatagtatgtctctcatgtgaacattttaagtaaataactggagaaagtacttcaacaaaataagggagcaaaataatgttggctcaaaatgaggtcgaaaagttgcagggctcggatcgtgttgctaaaggcataaatttgggagtcctcaagctgtagctaatagttaacgtccagagaaggtagtgtatattccatagcctcatgcaaaggaattccaactacgaagacgaaccagttaaggagaccgaaaagggggggcctgtatggaaaggcatagcaacgaatgtaaaatttccccaataatactctaaaactgccccacagcttttttaattttgaaaattcaaaaccattcaattcagctcgcagatttttgtgagaaataaggagatacttgcagctcagaaaaaattattaacaactatctagaaagttactgctttatcccccactgtaaactatactaccacgacccgggatccttgttcgactcctagccaaggggttcccactgcgtttctgttgggttatcccaaacctgtgataggatagtagcgccctccctgcctccggtcgaataaacactacaacgtctgacactcggtgctgaaaggaaatcgggcgcggtgtcttgcccacagcttggggagcggccccgggcgcaataactgtcaccggcgccgagatgcggttccggcgcttagggcgccgctaaactcagagcccgggagtcatggctgcgggcggtgccgccccaggtaaatcagtccaggagcagggcccgggcctggcgtacactctcggaaaaatgggggccagagcaaacaagaagagcgaaagcaagagggctaggcagccagaggcggcagcaagactcaagacgccaacggcgccgtcttcctggggccccagggcctgcgccatccctgggctgccggggcaccgcctctccacgcccctcgtccggcggcggctgcgactgcttccgaggtcatgttcccaggacgggcgcgtcttcagggtggaagcctggcgcacgtccggaggtgccgaggacccaaccagcccaaactctgggggaaatgactcccctctgccctcgccccgcgctctgctaccatttccttacgtctctgcttcgctcagcgatgcaaaacgcgcgaggcgcacggcagagggccgaagccgcggtactctccgggccaggcccgcccctcggccgcgccgcgcagcacgggattccccggccgctgtccagcgctggccgcctgagccaaggctgccgcggagccagtacagtcggggccgctggctggaagggcgagcttcctaaggcggggggaagcccggcgccggggccgggtaggaaaggcgggggaggggctccggccgtctggaaggaatccacgcggcttgaggctgtgggggaagtagggtggcgagcggtccttctgcgcgcggggggcggggggggtggggtggtccattagggtcccctggcgagggggcggctttctagtgtgtgagggcgacgccctagaagctccccttcaaagttggccccacgcgctgaatgtggaaagttgactgggacccagtagtttcccatcccaaacctgctttccgagaagggcttcaaacccaaaatgtgaatcccgcctcccctctcagccagaactgtggactcgtcccggggaggggcggtgggtggggcggggctggcgggaaatttcggttttggcgcgctccctgcggcgacgctcatcgtgcgctctcctcttcccccggtggtctcctcgctcgccttctggctctgccatgccctgctctgaagagacacccgccatttcacccagtaagcgggcccggcctgcggaggtgggcggcatgcagctccgctttgcccggctctccgagcacgccacggcccccacccgggg

SEQ ID NO: 13848 - DNA, 2300 bp, Homo sapien
aggaacagttctaattggtttacatatattaacccattttattctcacaatgatctgtgtgattagggaaaatatgcagaaggaaaggagaaaaacgggtggacaaaataagagataaagaactgtgttgtatctgtcaggcagggcttggtagtttaccaagcttaggctatgaatttcctggctgagggagacagctgatcaccgtgaacggcccctggagatggaccttgcttaggaacagaattcctctaaagtccacatagcaaatgctgctactcttgatattactgtggccctctcctgggtagaaatttaagagattttacaatgagcagaaccggaagtttactttggagaccttaattaactctggtaaagcagtactaccccttctttcactgaaatccctctttaaacagttaagccctaatttattgctgatccattatttccatgtcaatttcagtatacagaaagtcacctgtgtttattaggagtctacttaaggtatcttaaatcaaggactcccctaggactcaagaaagtgctccaaaatatactttggaaaggtctagtcaaactatatcactctacttttattcatcaaaattaagagactgtagtttttccagctacaattgtccatacctactttccttttccttttttttctgttgctatcatcaggcactactttctcttctcctgtgcttagactaatagttctcatgtttgaattatctgagatactttaaaataaatcccaatgcttgggatttagtataaaatctccttccctctcagcattacttttctcctaccttaatggttctaagaactgggcacagtagtcagatgaaaaaaaaaaagcccaaaattcgggataaaaaattatatcatcttcaagcctctggggaaatcaattcagctcttcacaaactcctgcctgtgtaaaaagtaacacttatctagttaaggattgttgtgaggactaaatacaacagcatacggaaagtttttagtacaggtaaaacgtgctgtagagatgaaagtgtggtagattacaggcagctctgcctttcgttttcagatgccttctcaaattccgccctgggccggatgaatgtatagaaaataactttttaaggcagatgcatcttcgttcatccttcttaggtattttcacgctcacatctaggctctcaccttggtttttctattgagcacagcatcaccctcgggccactcgaaagccaccatgggccttcctctctatcttctatttaggaagggcacaataaacgttgcaaagtaacgccttgctagacaccgtatagctattttacttattctgcagtctttgcccaaatctctatttaatttatgccaaagatgaaagctaaaattttaaacacgaaaaaggcagaaatcctatttatagctagtgtgttcctgtgatctctccggtgactgtttctagctgtggcagcggacggccggcccttcccagcctcctcgccggcaggtccccgctcacctgtacaggtcgtagcccgcggcgcgcgcggagccccgggtgggggccgtggcgtgctcggagagccgggcaaagcggagctgcatgccgcccacctccgcaggccgggcccgcttactgggtgaaatggcgggtgtctcttcagagcagggcatggcagagccagaaggcgagcgaggagaccaccgggggaagaggagagcgcacgatgagcgtcgccgcagggagcgcgccaaaaccgaaatttcccgccagccccgccccacccaccgcccctccccgggacgagtccacagttctggctgagaggggaggcgggattcacattttgggtttgaagcccttctcggaaagcaggtttgggatgggaaactactgggtcccagtcaactttccacattcagcgcgtggggccaactttgaaggggagcttctagggcgtcgccctcacacactagaaagccgccccctcgccaggggaccctaatggaccaccccaccccccccgccccccgcgcgcagaaggaccgctcgccaccctacttcccccacagcctcaagccgcgtggattccttccagacggccggagcccctcccccgcctttcctacccggccccggcgccgggcttccccccgccttaggaagctcgcccttccagccagcggccccgactgtactggctccgcggcagccttggctcaggcggccagcgctggacagcggccggggaatcccgtgctgcgcggcgcggccgagg

SEQ ID NO: 13849 - DNA, 2300 bp, Homo sapien
catgtccatcatcaccattacaaccctgtgtggtggacactacaagtcccatcttgtatttggaaagaagttgaataacttgcccaggtctctctaccctactgtctgggcccctttacaaacggttacaaataaggaaaatccctttcaacaagatacattcccagggtacctgtttgtgctgagcttttattattggcttgacagcaggctggtggctgcttgcaggggatcttctgggggtctccagttacagcagccaggacccagtgtgcgacttcaggccttcctaaactgttacagggtgcaggcatcattgggcattatccatataaggatgccacaaatactatacctttcaaagccactaaattcactgtgccgcgcatatcctggggagaggcagctgtgtgtgggggagggcgaggggaccgggagggtgtaagtagagtcctccagatgaaccccagtcttaatctgggctgggcaagaggaccatcccttcaccgctcccatcctacatcctaggttccaacatttacaggcccctgggttggacaccgacttagagagagcaccctggattcaggcctgggtggcttgaattgagcctcagaagagccgcgtctggagtgggctctcgacacccagggcaagtgggggcggcagagccctctcctcggtcggcacagcagcctctgccgcggtcccggcctgcgacgcgcccagtcttagcctcccggcctccggcgtctgctgagtgtccggcgggagaggcgcagggagcgcgctaccgggaggcgcgggcagcggggactggttttctctcgggccagggcctccggggcaaccgtctccagcgcgcattcttggtgcaggtggaacagctttctgctccggtagggcttcacctatcgcgggagaggttaatctcggatctaaacctcgcagccgcagagcgggctaaaaccgctactccacctcttcccatttctcccctccccacctcaagacaaaaagtcccaggccgggcaggacctgatcacctctgcctcctcccactgcgctaatcctgcgagcgagaggccccgcaccgaggcggaggctggcaaaggggagtggaaagggaggatggatggggccggggggtggggtggtgatgagggcgacgaaggagggggtgtcattttctttttctttctttttttaaaaaaagtatttctctcgcgagaaaccgctgcgcggacgatacttgaagaggtggggaaaggagggggctgcgggagccgcggcagagactgtgggtgccacaagcggacaggagccacagctgggacagctgcgagcggagccgagcagtggctgtagcggccacgactgggagcagccgccgccgcctcctcgggagtcggagccgccgcttctccagtgggtgcagccggggtcccgacgggggtcgggcggccaccggggctggagctgcggccacggaggcttttgcgtttgcgccgcgccgagggcagggacagggactggggtgaggggctgtcccggaacgtccacagctggcgctggccctcccctgcctgacagcttcctggcccggggctcttggtgccgggctccgcgtcagatgttcggggggcggtggcatcgcccggagtcggcggggacggcgcggctggcttccagcctggcggagagggcaggctgaggagtggggcgttcagagcgcgcatcgcgcgcaattcgtgccgctaaaaaaaataaacccagagagctcgcccggggcttaggaccgctggggatatgggtactttgcgccgcgctcttctggcggggcccgggaggccgagggatcggccggggctgctgccgccgggggcctgggctttccagccagctgtggaccaaacggtcttcccttacccaaattaactgcgccacgcgcaggcggcgcacgggttgggcttgggaatggggaccgcgaggcttcagcatcccgatgccctgaaagtctccccgcctcggggatttgtctctgtgttgcagctggcaggggccgcctgaagtgggagcagcgcctggagaaggcgggaggagcccggcccgggggacgggcggcgggatagcgggaccccggcggcgcggtgcgcttcagggcgcagcggcggccgcagaccgagccccgggcgcggcaagaggcggcgggagccggtggcggctcggcatcatgcgtcgagggcgtctgctggagatcgccctgggatttaccgtgcttttagcgtcctacacgagcc

SEQ ID NO: 13850 - DNA, 2300 bp, Homo sapien
cagagtttcactctgttctgcccaggctgtagtgcagtggcacaatctcctctcactgcaatctctacctctcaggttcaagcgattctagtgcctcagcctcctgagtagcaagatttacaggcatgcaccaccacacctggctaatttttgtatttttagtagagacagggtttcacaatgttggtcgggctgctattgaactactggtctaaagtgatccacccgccttggtctcccaaagtgctgggattacaggcccaggcatgagccaccatgcccatcctggtgtcagaatttttttaaagcctcttattattttactgcatagccagggttgagaactgctatcctaagtagagtctagttatgttttagacttaagttaaatatcacttcctcagggatccctttcctgatcagccctagcctaggtcaagtccccttgttatatatcctccaagcaagcacccagtacttatcctgtttggcgcttaacaattggtccattatttgtttcaagtctgcctttccttgttgactacctgctgtgtgaggggagacacatttctgcccttttcactaaattgttgaagtcagtcgtgttcaaattgttgaacctgccttgttaaaattgttgaagtctagttcaacaatgcactaagtagtacacagttcgtgctcagtaaaaacatcttgaatgaatgatctcctttactcagccaggagtgtgtgaccaaggctctcattcatgaatctgctaagagaccttttgcaggtgagaccttaaagtacaccacatacatacttacaggactatggctttagatcagctcatagttcccacagtttttctgtttcatcttcatgtatcacagcagttcagcatgtccatcatcaccattacaaccctgtgtggtggacactacaagtcccatcttgtatttggaaagaagttgaataacttgcccaggtctctctaccctactgtctgggcccctttacaaacggttacaaataaggaaaatccctttcaacaagatacattcccagggtacctgtttgtgctgagcttttattattggcttgacagcaggctggtggctgcttgcaggggatcttctgggggtctccagttacagcagccaggacccagtgtgcgacttcaggccttcctaaactgttacagggtgcaggcatcattgggcattatccatataaggatgccacaaatactatacctttcaaagccactaaattcactgtgccgcgcatatcctggggagaggcagctgtgtgtgggggagggcgaggggaccgggagggtgtaagtagagtcctccagatgaaccccagtcttaatctgggctgggcaagaggaccatcccttcaccgctcccatcctacatcctaggttccaacatttacaggcccctgggttggacaccgacttagagagagcaccctggattcaggcctgggtggcttgaattgagcctcagaagagccgcgtctggagtgggctctcgacacccagggcaagtgggggcggcagagccctctcctcggtcggcacagcagcctctgccgcggtcccggcctgcgacgcgcccagtcttagcctcccggcctccggcgtctgctgagtgtccggcgggagaggcgcagggagcgcgctaccgggaggcgcgggcagcggggactggttttctctcgggccagggcctccggggcaaccgtctccagcgcgcattcttggtgcaggtggaacagctttctgctccggtagggcttcacctatcgcgggagaggttaatctcggatctaaacctcgcagccgcagagcgggctaaaaccgctactccacctcttcccatttctcccctccccacctcaagacaaaaagtcccaggccgggcaggacctgatcacctctgcctcctcccactgcgctaatcctgcgagcgagaggccccgcaccgaggcggaggctggcaaaggggagtggaaagggaggatggatggggccggggggtggggtggtgatgagggcgacgaaggagggggtgtcattttctttttctttctttttttaaaaaaagtatttctctcgcgagaaaccgctgcgcggacgatacttgaagaggtggggaaaggagggggctgcgggagccgcggcagagactgtgggtgccacaagcggacaggagccacagctgggacagctgcgagcggagccgagcagtggctgtagcggccacgactgggagcagccgccgccgcctcctcgggagtcggag

SEQ ID NO: 13851 - DNA, 2300 bp, Homo sapien
atttatctttctacgtaagcatcttgtaactcagagtgttggtaccttgagcataggggtcctaccctgcacctaggccaggacttaaacaggataggtggtcaaagaaatttagttgaatatatccataactccaccaaaaaccatttttagaggcatggcaggatgggaggttgatttattctttattttccctctttgtcacgtatatgctagtctcactaaaatattttgtatgtagtgatgagctctgggtttggagataaaggacctggtttcagattctgtctgccttgtattagctgtgtagccttggacaagtcatttaatttatttttatgtaagtttcttcaactggaaaatgggtaggaatacctgtcctaaccccccacagtgttgtagtgagaaccaaatgagatgatgcttgtgaaagaatttaccaatctgtaaagcactgtgtaatggattataaacactgcctcctcatgtgcttaccctgacacgttttatgctttcatccttctaagaagcagttgtttgtgcatggggatcacctggcattcttgctgcagcactccatcataaccctcagcacagaatgcaacatacagtttgccaatcgacttcagtgggatgtgaaaagtgaaaagtgcatttaattctcactaagatgccttggctcagattcaacaaatgccatttacttgaaggccttttatttgctttttctgcctgcccccctgccaaaatcttcatctatttgttcatttattcatttactcatttaacataattgttttgagtgcctaccagggtcatgttagacacccaagaagtaaagtgagtacttcaagatattcacgttgtactgagtgtaagacacacaaaaacttacagtagataaaagaactataataggatatataggatacactgtgtacagaggtaggaaagatcatttttgcgaagtgagggagtgtgtgtcatgaaaggcttcaaaggaggtgctagtctgtcttcaaaactaagtagcaggagaaggtagaggcgatgcaggtgaaagaaacagctttcacagcaggtgaaagaaaaaaagcgctctgggaaccattgttagctcaggctgtgatttcgttcattctattacagtgggttaaattacctgttgtttgccaaaccctataccagtttatggggttacaggggtcagtgtaggcatcatgggggcggacggtgaagtagcaaaggaaaaccagccacagtatgaagagcctcgaacaaccattttactccgtgccagtacacatgggaaagggttgaaaggatatgtgaacctgccgccaccaattccttgattattcactggaaccctttcagccagagaagatagacacagtactgggctttactgaggactgggtggcgctgtctttaggggcaggttaataatatacacctaagtgacaagaacactcacacccgaggaaattagagtagtaaatagacacgtggaaaaatgtgccatcttatcagtaattaaagaagcaaaaatgtaaacaaagcggcacctagtaaggtagaagacaaagcaaaatatctaaggctgttaaataatggggaagcaggcgccttagaaaacaagggcaaatgtaaaaaacctctaaggcaagagttcggtggggaatctgcgggattctgtgtgctgaagcgcaggaggcacgagtcacctttgcagtctccggtaccaaacgggcaaggggtccccgtaagactgctgcaccctggccgaaggtagcgggtgaagcgcctcggcgtctctaggcaaccgatcagcccgcccactccggggtgacttcctcgtaattggctctcgaatccaccaatgggcgcacagggggagcttcccgccacctctggcgcccgctttcaaacagccgtactttgcaactgcaggtggacttctcaaccaagcttgaggaaggcggagacttctgcctcctcgctctgccctgagctggcacggctccgcccaccgggcgagcttctagtcggcgattgaaggatgcgagtgctccttaagggcctccgccccgtgagttcggttgtgactaggaaggagctagtggactagagccagggtaaggggatctgctagaagttggtcttccgccaggactagagtttcctcgcggtaacagcctccgtggcctccggtaagttctgattcacgggtgagcttggacctggggttagaggagttgcggggtcctcgggatgctggctgagggttcctggggggg

SEQ ID NO: 13852 - DNA, 2300 bp, Homo sapien
aacttcgccttctgtgtagattagtgccctaagcataatctatattgaattcaagagctagcagttaaacattagtcacattattagtcaaatcagtgtgcttttgtaaaaatgtggcccccaaatccctgccttgagcacccagtttgtaagtgttggatatattttgatgtaaaatttgaatctttcttctctttgattcatgtgaaatgtgaagtattctttatatcatttcatggctgcagagagcttgtaatcctgctcccttttattcaattatcagttcatggttttgaagtactctgattttatgtaatcttctctttctaaaaatttattataatattattttttgtatgtcctcttgcagcctgtcacatattggaatgccacaatggaatggcccaagacgtcataagtaccatagggcaggcttttgaactccggtttaaacagtacttgaaaaatccttctttgaatacttcttgtgaaaggtcagccaagagttttataataatttgacaatatatatatatgtgtgcatttatctgtatgtatttatttgtgtgtgtatatataacattaatgtggcattttaaaatgaactaataaaattagtaatttttttcttgcaaatagacacagtctcagtacaaaataatattttccttccattcatatttatccagttatatcctcttgctttgtaacaagattaaaagagatcccttctcactaaaagtaagaatagattatctctgttattctagcactataaagagctttgaattaattaattgaaatcaaaataataaacatcaataaacttctcagatttgtttcaaccccagatcctttacatatcagttaaaaaaaaaaacacagcaagaacaaagagcaaaataagaatcaaatgtctcttgtaggaattcctgtcagttggtttgcaatgtaaatagataggcttcagctaaactgtggttagagtggaacacggtgggacccaaggatttggttgttctaaggcacagaaagtctgcaatgaaagctgaaccctttcaggcctgtcagacctcaccaagtgtggaatgcagtgatgcctctggctcacacaattcatgccggagaaacaaaactcttgggtactttaaaatgcattttcctctggtatgtcactttgtgtatcaacaaatactaggtttggagatctccttttatgaggtagtctagggtagcaaaggagagggtgttaccaggaggccttgatgctgaatttttcccaggatagcacttctgtcttagtgctatcattttattgacatgtaatgaacctaacaaaactgtgtgagttgtcagttgaatcagttcaatccaaatagacttgatttattcttgtttttttttttttttttagtaagaaactttccctgattccaatttggaagaaaagtctgtttgtttgtcttgccctgtttcaattttaaaaacaattccatgtttatataaatctacccacttgccacatatggttctaatatttctgtgttaatcccatgtactcctccagatctgtgcagacaagatagctggccatagctctcttattttttttttcattttggtttaataaactgggacaggccctatacccgaagaacaatatttaaattttatctgggcaaaactttccaaaatggaacaatcaaagtgtgctggagatactcaagaatactttgtatttttatgatcttatgacaaaaatatcttacatttaggaagttcatatattgttattatcattatttttatcactggaggagacacaaaagcatcacccttggcactttctattggcttaccccgttttgtctacagaaagctaaacaactcaaccatctgactgctcccatccaaatgtttaacatcacttaagcacagctataaactgaaaacatgaatgcaaagtttttcaggatgatttgcttggttctgatccccttgcatcccttacagtatttgaattttcgcccagcctcttgaggattcttttttccttcacagtgaggaggtgcatattgatagccatgccgaggagagagaagatcatgaatattacaatgaaattccagggaagcagccaccagtaggtggtgtttcagatatgcggatcaaagttcaagccacggaacaaatggcttactgccccatacagtgtgaaaagttgtgctatttggtatgtaatgttttattgttgttggaaccagcaatgcaattctgcccttatcactagagcatttact

SEQ ID NO: 13853 - DNA, 2300 bp, Homo sapien
cacagaagtgagatggctttctaaaggtagatcactggccagagtttttgagttaagagagctgcttcagagatttctttgtagaaaaacagtcaccattggcggcacatttcagtgacacagaatgggtcacaaaaaaacttgcttacttgtgtgacatattcaacctgctcagtgaactctgtcacttcagggacgaacaacaactgtgttcaacttggcagataaggtggctgcattcaaagccaaactggaatcatgcgggtgacaaatgaacactgggatttctgacatttcaaacattagcagagattttgaaagagactgagccagggtcttctttctcccagctggtgcatgatcacctatctcagctttcaaaatattttgagcattacttcctgtattagtcatggttctctagaagcacagaactaatggaatatatacatatatatatacacacacacacacacgtatatacacatacacacatacatatacacatatatatgtatatatatgtaaaggggagttcactaagtattaactcacatgatcacaaggtcctacaataggctgtctgcaggctaaggagagaggagagccagtccgagttctgaaactgaagaacttgggaatccaatgttcgagggcaggaagcatccaacacaggagaaagatttaggctgggaggctaggccagtctctcttttcacatttttctgcctgcttatattctagccaagctggcagctgattagattgtgcccaaccagattaagggtgggtctgcctttcgcagcccactgactcaaatgttaatctcctttggcaacaccctcacagacacaccaatgatcaatacttgtatccttcaatccaatcaagttgacactcagtattaaccatcacacttctcatccacaaaagacggaatggatctgtgacccatttgtgaataagccaggtgaatccactttgtccacgctagaagaggatcaactgcttgatattgcaaatgacggtggccttaaaagtatgtttgagacaacttcaaatctccatacgttctcgattaaagtcaaggcggaacatcctgagattgccacaaaagtactgaaaagcctccttccattttcaacatcctatctttgtgaggcaggattttccacagtaacagcaaccaaaatgagattacagaatagaccggacataaggaacacacctcgggtgtcactgtgtctcatcacccccagatgggaccatctagttgcaggaaaacaagctcagggctcccattgattctacattatggtgagttgtataattctacataactataatgtaataataatagaaataaagtgcagaataaatgaaatgtgcttgaatcctgtaagtatacacagtcatataattcatataagtatatacaacttaaaacctgaggcttttaagttgaaggtaaaaacaggtaaaacatgtttttaaaaaacacacaaaatagtattttgctgtcaatacataaagatacatgtaaatgcaaataaaaagaattcaaagaatacacaccgcattgctaatagtggaaagatacctcccaggcgaaaagaaatgggaccaagtatttcttcactataactaaaaaaaaaaaaagtacaatatatctgttgtttgtgaatttaactttttaaatgaaaacactaaaaggacaaaatggattagttcttaatatgctgatctgtggttatggatgttgtctggtttggagacgtggatttacaagtcatcagtacatcggtaaattgcccaggggaagaggaagggggggaaggagcattaaatgttacgaaggccatgtaaggttattttccggtttgcagcattacaagcagcagtagggttaagtaacacagaaactgttacgctcttgcatgcagggtccctagatacgaagttcgaatcgatggaaacgtagctcaaaaggcgacgccaacaccccggagaaaacactgagctactccaaccacagtggcgcgccaagtaggaggcggtacctgaggaccacgcctgcgcgcggggttacgcaagcgcgcagcctttgcgcacgcgcacgaacgcacggccgcgcagcatctgtcttgctggaagctttttcctagaggttgagcggtttgcacaatgtcggaaatggctgagttgtccgagctgtatgaagagagcagtgacctgcagatggatgtgatgcctggcgagggtgaccttccgcagatggaggtaggcagcgggagccggga

SEQ ID NO: 13854 - DNA, 2300 bp, Homo sapien
tcaactaaagtccttcatctgtcaagttaaaacagcaagcaaaacaaaatttctctagtatataacagcataagcaatggtttgttttctttgtacattcacacacatttagtgtctagatttgaaactttttaattaaggatgtcttaatttttgacttttaaaaatggttatgacaatggattttcttgatttatagatcacagtggctttataaatgatcaagatacatgtacaaacaaaatttcagatgctcttggaaacacatcttaagatacaaagcacacgtgatacatatttgagtttactcatccatttatcttacactgaaaatgtagcctttgataactgtggcttgactagatcacaaaatagaattttccaagttttcttaagctttcagtccaaataactcaaaagatatgtgtcctagttggatacatttttttctcattatataattagtatcagtgggcttttgtattggcagtttgtcttggtcatgacttattcttgcaaaaccatctttacagcaaacaaatatgaaagatattttccccaatgcaaggaaaataatctggatcaataacaaagtcaaagccataggtgttttaggacgttcttgataattgatttcaacggtcttaaaatcttttttctttttctttaatgattctcttcctttttcacaactgtgcagtcactgtcctattgtgttctattctgaaaaacaaatttttttgaaggtcaagtttttcaatggcacaaaactatttggaatgaacccaaaagatagcggaaagttgggtccctcctcaagtagtttcctcctcttttaacagcatctaactactctctatcaataatctcatcacagccgagttcttcggtcagacgattgacaaccatcagtgaaaaaagctcttcgataaaagctaactgatcaaacggggtcttctcataatgcatctgaaacccgccatccagggctggttctcttgttctcagaaacatcttgtcggcttcttcaagagcggctgatactctgtagccggcaccactgagctgctcctcttcgggatagtcgtagtcgtcctcccagtcatcaaattcctcgccctcgtcctcgctctcgaagtctgcgcccgccacctggcctggctgctccccagcgttgggcccgttagcaaggctccgtttcccctctggcgccgccattggctgggcctcctcctcctccattgggccttcctcctcgagctgttgggccccgctgcgggagggacgcagggatagctcccggctcccgctgcctacctccatctgcggaaggtcaccctcgccaggcatcacatccatctgcaggtcactgctctcttcatacagctcggacaactcagccatttccgacattgtgcaaaccgctcaacctctaggaaaaagcttccagcaagacagatgctgcgcggccgtgcgttcgtgcgcgtgcgcaaaggctgcgcgcttgcgtaaccccgcgcgcaggcgtggtcctcaggtaccgcctcctacttggcgcgccactgtggttggagtagctcagtgttttctccggggtgttggcgtcgccttttgagctacgtttccatcgattcgaacttcgtatctagggaccctgcatgcaagagcgtaacagtttctgtgttacttaaccctactgctgcttgtaatgctgcaaaccggaaaataaccttacatggccttcgtaacatttaatgctccttcccccccttcctcttcccctgggcaatttaccgatgtactgatgacttgtaaatccacgtctccaaaccagacaacatccataaccacagatcagcatattaagaactaatccattttgtccttttagtgttttcatttaaaaagttaaattcacaaacaacagatatattgtactttttttttttttagttatagtgaagaaatacttggtcccatttcttttcgcctgggaggtatctttccactattagcaatgcggtgtgtattctttgaattctttttatttgcatttacatgtatctttatgtattgacagcaaaatactattttgtgtgttttttaaaaacatgttttacctgtttttaccttcaacttaaaagcctcaggttttaagttgtatatacttatatgaattatatgactgtgtatacttacaggattcaagcacatttcatttattctgcactttatttctattattattacattatagttatgtagaattatacaactcaccataatgtagaatcaatggg

SEQ ID NO: 13855 - DNA, 2300 bp, Homo sapien
tgggaagttacgtgtgatggggacagagtaaaatatccaaaatgtttcttactagtgtgatggggacagagtaaaatatccaaaatgtttcagtactagagatcccaagaggagtgtaactgagtgtgactaacaggagtctggatgagactggcagggtgattgtcccggccagcatgctcttcccagcaccaggctccaggcagcactcggtgcatcaaggagttctacctgcacaatctgctcagaaatactattatacagcaggatgcggtggctcatgcctgtaatcccagcactttgggaggccaaagtgggcagatcgcttaaggtcaggagtttaagaccagcctggccaacatggtgaaaccctgtctctactaaaaatacaaaaattagccaggtgcagtggcatgcgcctgtaatcccagctactcaaaaggctgaggcaggagaattgcttgaatttgggaggcagcggttgcagtgagccaagatcgtgccactgcacaccagcctgggtgacagagtgagactccatctcaaaagaaaaaaaaaaaaaagaaatactattatacaagaagtgtttgggtaggtgcccctccccaccagctcctgacatcttttgacagtgtttttgccattcccaagcatagagaggctggaaagcctccaaaggaaagctaaacagggagcatatcatttccgaggagacaacagatcactttcaattggacctcttagctctagtaacatttctaaggcaattctcaaagaagcactctccctcctcaaccaaagctcttctgggaggattgactctcacagcctcacctggcaaagctacacagaagactactaagtccacgtccctaggctgaatcctctcaggtctccagaatccaattttcagctgccagcctgttatttcctggataccccaccggtgccttaagtcaacagctcccaaaccaattcatcatcttcccttctcctggctttcctgtttctgttgatggcatcactgttccctctgctaccctggctggaaacatctgagtgagtcatccttgactcatccttctctcttgttctccgtatcaaatcaactgccgaattctgtagtatctgtttccatgatgtcacttgaatctgtcccgtccttcctattgacaccatccctcttcagtgtgggctgtcgttacttccctctccacagggtcatcctaacttattccctcaccattaacccaccttcatactgccgctgacttaagcctcctccaacacagatctaatcgcatcacgcctgccatggatcctcactgctgccacactaaatataaaccatctttcagctttataagtcacaattccctttgcaatacatggtgttcgagctaaccatactaatcactgatgcagcacatgacttttgtcctgtcaagaacccccttaatatttaaatcagctgcaaaggatgataagatcttatattactaagtttggtattctatgcatttatatgcttgttctatccacttagaagatttgacattcctgtattctctatctcacatttatttttgcttcctctactatttaggcctttgtatgtaccaggcgttgttctaaaagctttatttatatgtaggaaataatttcactctcctaacaattcctattgtatccccattttaccaatgacaaaactgtgaggcacagaagttaacttgctgaggttcaggttccataactaagaagtagcagagccaggatgcaaattcacatgatctggccccagagcccatgatcttaaccactgaacccacatttgtctttgttacttgcattatctatattatggtttggatttaactggtgttttgtaactgaattgaacctttaggcatgtgtccattaacagtcagaaataacagttgtaggcagagggtgcaaatgtaacttgatagcagaagctgattttaggtgcttcccaggaagttgccgtgaagctaagagacagcttcttggaatttttgtcctacttcttcttttttttcttcttattgtagtacatgggctgtgttgaagtgctgcaatcaatgagatcactggattttggaatgagaacccaagttacaaggtaagaagccaaaaatgggaggggctttgaggagtatggtttaaagtcacaataatttctcccacaggaattttatgcaaaccttccaattcattatgcacttttattcacgcgactggagtgtagaaggctcgcccagtgaccttcaatgagt

SEQ ID NO: 13856 - DNA, 2300 bp, Homo sapien
tagatgagctggctcccctggacaccccatcctgcagtcatgagacctctgtaaggattcctatcagccaggcaggcccatgtcctttccagccttctccaggcccacctgatttaaaaaattgttttctttggacaatgttgagtttcttagcttctcccactttgtactaatttttctttttagttgcctagaatgatgtaaactctgcagtgtgagggttaagaatatgagcttcaaggggaggtagctctggttccaatggccattttttcatactgcccacatgtacttagtgagatgggcactgtatggagcattgggcctcgtaagccctcataacaaccccattagatggctgctgccaacatatgaggacattcaggcacggagaggtaaagtaactttctaaagggagcatataatgaggtcatcatagcataacagaagcaacacagggacccagggacccaggggaaggcaggaaaaatgagaggaagaaagcagatgaggaatgaggaggaatgagaggtaaatattcttgcccagagcctgtctcctcagccccagggatgtggggtccaactgatttagctacttccctcagttttgccaggaggagatgtagggcagggaaaaggaggtcaacaaggattgaagggaagatttatgaagatgcagaaaggcctttccagggaaagaaatgtctgaacaggcttggcagacaggatgtgatgggtgctttatttccctgggggaccagggagcttgggaggaggatgccgctttcactggtcactctcaaccatttaattcagaacctgtgtttggatcccaagggagctcaggctcccaaagtcatgaatatacataagcctaatccagcattagggacaataagataatgaaggtggcacccttaattcctttggttgccagtttgtcttaattttttaattaatgaacaatttcagatgtcaaagccttgagacacggagtaatgcaatcttttctgagagttctttatctcttcctatgtgtgatttccaccccaccccgacaccccacacccccagtgtttcagcagtttcctcttctccattcctgaagaacctgcatttccttttcccagctctggttttggcttcctgtgtgctaagcctttgcagttgtcatcatgtcttcaggatgcatttgataggtacaggaagtcgcaccagacggaagatggaaccaacaatcaataaaaaaagaactatgtttctaagaaaaatgcatcatggcttcccacaggagttgtgaaccatatgtcctaatatccctgtaacaatgggtctaatttttagctcttctgctctgccctcccggccatctcaacaagaaagaaaatagatcttttaacctgctgctccccggctaatgatctgtagtaaagattgcctttccttttaactcattcatcagataccacaaaataaaatacgtccctcctctcccgctagctttatttctctcggctactagtttagtatatttatggtgtatgagtcatcaagctgcctcctgattggataaaaaccaagcacctctgagaccgtcagtcaattacagctattctcagcttcattcacagatttattagcttgcacacacacagagaaattcattcggcaaagttcattcataaaaatttcaacacgctgcgtatcatcctgcacatctcagctttcggctgcaaatgggcttctgaaaaaagctccgagaggaatccaggagggagggaagctctgagcgagggtaggcaggctgggaggggatctgaggaacacggacccatcacaagtcagtgaaacaatgcggagcagcgcccgtcagtagtactcctggctggtggcccagaacgggatgcaagacaagatcttccaagagagggcagcctttggaatcaacgaacccaggcaaaagggcctttggttcatagatacatttttttttcctttttaaatgaacaatcactggaacaaataaagggttaataggccagtcatttgccccgccctgtgagagccgaagggagcaggttcgaaagttcctgtgtgcagaacagaaggctggggtgagggtgggagtcgggtgctaaatatttctactaggctcctgcaaggctagtgatgcagcgggccccccgaccggcgctcgcccgggttctgcgcctaagagttggccgtgagcgacccgcgccgccgggagcctgggtctaggctctcccgacaaggattccaaggcgagaacactggtgc

SEQ ID NO: 13857 - DNA, 2300 bp, Homo sapien
cctataatgtggaaagatccttgggaatcctatatttaaatttcctcagatcattcctcagaagaaggaagaaaagcaaaagtactatagtatttttatgagtgcattgctattatctttttactcagatgagggtatattatggctatagaccaccagtaggaagacaatctgaaaattcagttattttgtctttcaattgtgaaggaggacggtcatctgttagtttacataactactccttataaataacttagtttttctgagcaaccaaccctaaattcattcagcattcactgaatcccagctaggtgtgtgataggcaccagggacctaacattacgttaattgcacatatatttacaaatgttacataaatttgcagttcaaatacacatgcattgatattaaatttgaggtggcagaaaatttactaaaattaaataaatatatttaaatgtaaatataaatgtgtaaatataaatgtttctcctttcaagatgtttctattgccagccttgatataagtcttgctgacacaatatagctcctttcagcaggccaatatataatacaggttgaatgtcccttattttgacatacttgaaaccataagtgtttcagattttggattttggaagatttgcattatacttactggttgagcatctctaaactggaagtccaaaatctgaaatgttccagcgaacattatccttaaatgtcatgtctgtgctcagaaagtttctaattttggaacatttgggattcaagagggtttggaatttcatagtttccattagagatacccaacctgtatcaacataagtacagcaaggggccttcacataacaagcctcatattggagtctaataaccagactaataacctagactaactgaaaaggcaattagtctttactgatatctcctgaagcatgacaaagcaaatttcttaaaatctctttcccattcctagctgtggatctccacaccagtgccccaaacagcagccacctcaactctaccttcacttaagtgtaatttagcttatacagttgtccctaagtatcccaggggggatattggctccaggatccctgctgataccaaaatccatgagtgctaaagatccttatataaaatggtgtagtatttgcatacaatccatgcatatcctccgatatactttaaatcatctctagattacttataatacctaatacaatgtaaatgctgtataagcagttgttaaactgtattacttgtattttattgttgtacttgatatttcttttttcctcaaaatatttctatccgcagttggttgaatcttcacagagggtgtgggtgttggagggtgtgtctgaggagatgcccagaagaaatttgccatgctaacggtagtgcccagtttcaagacagtctctgcccttaaggagctaaggatctgaagataaaataattacccgttgggtggtgttatacagatcctgcataaaattaggatttctgagatgggcgaggtcagcctggatgtgagcctagaagtgggcatgaacctggataatgaattaactctcaataaatatttgtggggagcttcctagcgggcctcttccagtcattctgtgtatgcgttttacatatgcatttttctagggcaagactccattattttcagaatattctcattcctttatagtcatgactccctttatttgcgtaacataaggaaggagcagatgtacggtgggcagatgaaagcttttccaacatcactaagaggtggtttcagatcctgaagaggtctttgaagtcccgggagacctgggtcccaagtggtctgacacttctcgtttaacagtcgcaggggtggcgtgtggttcggggcacctgctcctgggcgcctccacctggccttagcctccaggccaggccgggttcctcctacccttgctgaggccatttgctgtcactccgcccactgcccctctctgcctcctccccactccttttccttccgtgcgcctccatttctaactacgcctccagcccattcgggccctcctcggcttccgtcccagatgatccctccccgaagctgccaccgcctcctccatctcccggagctggagccgcctcctcggccagtggcgtagccgaatcggtgtcgcggccagccagataggggcggaggtccggaacccagtctggacccgagcggggggccatggagaaagcggcccgaggcgctgtttacaccgactagcgcgggcccgttgcggctgcaggcacca

SEQ ID NO: 13858 - DNA, 2300 bp, Homo sapien
tatatatacataatggaatattatttgactataaaaaagaatgaaattctgtcagtttgcagcaacatggatctggagaattaggttaagtgaaataagccaggcacagaaagacaaatatcacatgttctcactcagatctgggagcaaaagaagttgatttcacggtggtagagagtagaatgataggaagggtgttgtggggggaagaggagtggggaagtaagagaagttggttaatggtatgtacaaaccaacagttagatagaaggagtaagttctaatgtttgacagcggagcagggtgactatggttaaaacgtattttatatttcaaaatatctagaagagatgactttaaatattccctagacacagaaatgataaaaacacaaggtgatggatatcctaaataccgacttgatcactacatatcctgtgcatgtaacgaaaccccccataaatatgtacaaaatactatgaatcaattaaaaaaatacaagcacatataaaagaaacattttgataacaaaacacctgtaatataaataaacaggtaataagtaaaaatggacagatacatattcttaatgaactgaagtcactgcctacaactggcttgcacaaactaaaatgtaaggtagaaaccataactattagcgaaactacatttaactttaaaaattataaaaatctctactatgactttcaaataatagcgagaatttcctttctcccttttgcaaagtgtgccttattttaaaatgcaaaaaactgaaaatatatacgaaaaagttatagactaattcaaaacaatgtattaatattttgacaatctctggcacttaaaatgagtcagacgtcccaaaacatctatttcgtaactttatgataatgcagcatcaccataaaagaaccatatgaaacacccccaaaataaagaaacacagcaaaattgacgttaattctggatcaagataattttctgagtttccacacgatgtttttgaatagcaaacgttattcaaacttgcaaatccattaataaatgaagctttgaatctttaaaaatctccattcggtcagaaaaattcgtttatttctatgctgttgctgttttaaactttgtatactgggaaatttctaagggaaaagccatgggttcaattatctttcacccgtcctccaaaaacaccacaagcaaaacctcctccccagcttttctttataaagaactgaaaaagtggttcgactacctttttttcagttatctttgctctgaactctcccctacacacttacctcggaccaaaactggccctggcaagactatttaagctatgtctccaggagactcacaagttgcgtttcgcagtcaggcctgggagcagtaaggacacccccgttttctgacttctcctagcatttcgcacccgctcagttccagtgtgaagaagtgggggcccggaacgctgggcccgaaagggcaaagccagggcctacaccgcagcatggtcaccgaggcggctagcgcggtggggaggcagaagacagagaaccgaacgcctgggaccaggggcatccgtgtaaaccgaagaggcgctcagactcggagggcaaggcccggggcccccttcgctgcctcctttgccctcccttcccccatgctggagaagcagggcccgggcccggtgcgggaacggggaggaggtaaaccagtcctgtcaccgcactgagagaggctgtaaacggcacatgctctacggggagaggccgcgggcgccccggcccggaccccgaaaacaagacacatcaccaccctcagagttccattccctgcgcctcaccaggtcgtagtcctcctcatcatcgcacatgaaatcatcctccatgtcagacatcttggccgggagggggaggagaaattggagacaacctcctcccacaatcctccgcggctcagaggcgtcactctcagcttctttccgccttccagtccctcttagaggagctgtttcctgccggaactaattatctcgacttgtagctgattcgctacgactccaaaagagactgcaccaccccccgtttcctccgaagtggttggtgccttagcaactaaagctggcaactgggacatcgtccggtgctgcaggtctcagccgaagggcgtcggaaactgcgctcgcatcgagcagtttccagcctcctgggtaaaggagcagtctcctcccttgcttgggactctggacgcatctcattccggtgaaagtaagggacagcttaggaccagaagccttt

SEQ ID NO: 13859 - DNA, 2300 bp, Homo sapien
tcaactagcattaacatccaaaactatatataatcaccaaatttcatttaccatggttttttaattattctttaaatttttctagttccatgttaaatccagagaaatgttactttttcgaaagtttctactactgcctctctctctgaaggccatgggacttaactatttgtcaaagcagaaattcccaacatttcgtaaacaccactaattactttttataactgtaaagacaattattccatacttaaaaccaattcaaaataaaataaatcctcaatacttcttattccctggggtagtaattttaattagattttattgattctttattttctcctatgtgcctttatttgggaaatactgttagtctaccttactatcgagtctctttccctagcaagaaaatgtcagtcttaagagtcaggaaagcttttactttcactatcacatatgaagaatgaactaaacacctaaattggataggaaaacttaaatgagggattcaggacacttcccaaggggtcatatgaccaatttaaaagttggtatgatgtgtctaaaataacaaattaactcttttacttataataaaggtacagatgtgctgattagtcatgctaacatgtacatatgaaatatgcctaaaccaaattaaaagaaaacaaaatacagtctatggcaatcttgaaaattcagggagctcaataaatattaagaggatgctctcacaatgagagcattaaacacttggtaattaacataatttaatatgcaaaaataagaaaatatacaggatgagggatgaggagtacacataggaaatttttgtgattttcttcattttgattgtattgctttcttgtcttcaggagggaagattttgacttcaaaagtaacaaaatatttaagaagggaattcacatctttctgttctaaatgatattcttgcgctattttctcagcagttcatgtttctggataaagtttatgattattgaaaagtgtcaatgcttctacagtggaaattttgcctttgggaatgctcttaatatttatcatatcaaagtgatggcctttcggcaatctgaatttctttggctcctgacgtgtttcagcagctttcagctgcacggaagacacaggatctttggaatcaacacacacatattttagaaatgacagcagcttgtcatctttacgagcaatctctcccttaatttctggatagagactaatctgctctggcaggaggctgctggtagaggggtgcctgggagcgagagagggcttcatgttgcggatttccctttccgctcggttctcttgaaattcctgatcccgcgagtcaccgcagcccccatctccttacaacatgatgccctcaggttcacagtaatgtattttttaaaaaccagtcgttgttaccttaatttggtcccaagggctgtaaaggtcagtttacaactcgttgaacaactgagtaagatttaaggcaactcaactgatagctgcatacctaatttaggatatccatagaattgttttgtcaactacaaatataacaagcattaagtgtaaactgtgttgctgaaaagtactccaagtatcttaggaacacccaccgcaatgtgtgggctaaatgcacacgtacaatgatagcagaaataatacctgtcatataggacgggcatgtcagccttttctccgcgaaaggcttctggtcctaagctgtcccttactttcaccggaatgagatgcgtccagagtcccaagcaagggaggagactgctcctttacccaggaggctggaaactgctcgatgcgagcgcagtttccgacgcccttcggctgagacctgcagcaccggacgatgtcccagttgccagctttagttgctaaggcaccaaccacttcggaggaaacggggggtggtgcagtctcttttggagtcgtagcgaatcagctacaagtcgagataattagttccggcaggaaacagctcctctaagagggactggaaggcggaaagaagctgagagtgacgcctctgagccgcggaggattgtgggaggaggttgtctccaatttctcctccccctcccggccaagatgtctgacatggaggatgatttcatgtgcgatgatgaggaggactacgacctggtgaggcgcagggaatggaactctgagggtggtgatgtgtcttgttttcggggtccgggccggggcgcccgcggcctctccccgtagagcatgtgccgtttacagcctctctcagtgcggtgacaggactggtt

SEQ ID NO: 13860 - DNA, 2300 bp, Homo sapien
gctttactaattgctctgtaaggtgctttctagtctgcatcggttttgttgagactgcaatagcaatgtatccaaggtccaaactaatgatttgccatctggtttcatttagcaaagttaatgttcggtcatcaagtacatattcagtaggaagtattctttttcgaaacagtttctacagtcatttttttttaaccctgtataaaatgagtttattttggactgttaaaaaaattcaaaactttaaaatttgttatttttcaactaatgcaaaagaatatattagaaacatctgaataaaaaatgattctgggctgggcacggtggctcacacctttaatcccagaattttggaaggccgaggtgggctgatcacctgaggtcaggagctcgagaccagcctgcccagcatggtgaaaccccgtctttactaaaaatacaaaaattagctggtgtggtggcggctgcctgtattcccagctacttgggaggctgagacgggagaatcgtttgaacctgggaggtggaggttgtagtgaacagagatcatgccattgcactccagcctgggcaacaaagagcgaaactccatctaaaaaaaaaaaaaaagattctgttcttttctgtatttactgatgtccctaaacattttacatttttttttaaaatttaggttatctccctattaaaactatttacaagtgacagtgatgactcctgttactcaaaattaaaccaaaatgaacatcaaactgggatttattggggcccagaaacaagaagatataattcattcatttgaaaatgataaagagggactgaaataatagtgagaaagctgccctgagaccagagtaactttgtttctttgatgtatcatttacagtaataacccaacggggtgccaaggggctgccactctttggctatgctttattgtccattcacactttgtctccatgtttccttcccccttcctcctgtatacatgtatacagaagggggaaggaaacatggagacaaagtatgcatatacatatagaaattctggagcagtaacttactgatgtatacaacttatcgaatctctctgagttatgctactacccctagtgtgttgggcatgttggctcaaacttccttaatcaggaaactttggaatgggtttattgctagctgtctttgcttgggtttaatctcaatatttctgaggtgcaaagtgcactagattgagagttaatagatctgaattttaattccagttttgttcccaatgatcactgtgacctcaggcacatcatttcacctttcgtcgttcattcagtttatcttacctattcattaaaaaccaatctgcctgcccccagttgctttctagtggtagtgatgatggaggtggtgagagacacaataaatacataagcaaataggagaactatgaaggaaggaaaagttagtgatgtactagggatagtgtacttttgatagggcatctaggatttctctagataagtgaaaaatgaagaggtttaactggatgctaaggggtcttgcacattaaaaggcatgtgtttccgtcttttcactactgtgttctaggaaggcccaccaatgcctctaacctgtaaataaatgcaaatctatttaaatcaagtgatacatcaattttatgttgcttgatttggaagtaatccgcaaagaagcaatagctaaacattttagtgttgtttggggagtagctgctgaacaataaagaccaaaaccataactaaaaaacaaacaaacaaacaaaaaaacgcagcccgagacagatcagaaactaggtgtatgtagggcgccaggttatgacactgttctctgacatccacagggcgcaaaaagaaaacctcactagtcagcttcgcacgtgctctgcgcaggggctcctgcgaggccctagtccctccctgggagctaagagcaggacggaggctgtacctgactgctgcttggagggaaccctggctgagtccagggaggaggagccagaggaggggccgattggaagcagccacctcagcgaagctgcaggatttccgcagggcgggagctgtttatctcccggaagaaaacggctcctgtcacagaagtctcgtgattgctctgggagctttgcttagacacttgaaactacaggagaaagaaggatctagcgaaatatggctacagagagccctgctacgcgtcgggtccaggtggcagaacatcctaggtgggggagaggagacgccgggctttgggatctgctgggttggctacgt

SEQ ID NO: 13861 - DNA, 2300 bp, Homo sapien
ttatttttcaactaatgcaaaagaatatattagaaacatctgaataaaaaatgattctgggctgggcacggtggctcacacctttaatcccagaattttggaaggccgaggtgggctgatcacctgaggtcaggagctcgagaccagcctgcccagcatggtgaaaccccgtctttactaaaaatacaaaaattagctggtgtggtggcggctgcctgtattcccagctacttgggaggctgagacgggagaatcgtttgaacctgggaggtggaggttgtagtgaacagagatcatgccattgcactccagcctgggcaacaaagagcgaaactccatctaaaaaaaaaaaaaaagattctgttcttttctgtatttactgatgtccctaaacattttacatttttttttaaaatttaggttatctccctattaaaactatttacaagtgacagtgatgactcctgttactcaaaattaaaccaaaatgaacatcaaactgggatttattggggcccagaaacaagaagatataattcattcatttgaaaatgataaagagggactgaaataatagtgagaaagctgccctgagaccagagtaactttgtttctttgatgtatcatttacagtaataacccaacggggtgccaaggggctgccactctttggctatgctttattgtccattcacactttgtctccatgtttccttcccccttcctcctgtatacatgtatacagaagggggaaggaaacatggagacaaagtatgcatatacatatagaaattctggagcagtaacttactgatgtatacaacttatcgaatctctctgagttatgctactacccctagtgtgttgggcatgttggctcaaacttccttaatcaggaaactttggaatgggtttattgctagctgtctttgcttgggtttaatctcaatatttctgaggtgcaaagtgcactagattgagagttaatagatctgaattttaattccagttttgttcccaatgatcactgtgacctcaggcacatcatttcacctttcgtcgttcattcagtttatcttacctattcattaaaaaccaatctgcctgcccccagttgctttctagtggtagtgatgatggaggtggtgagagacacaataaatacataagcaaataggagaactatgaaggaaggaaaagttagtgatgtactagggatagtgtacttttgatagggcatctaggatttctctagataagtgaaaaatgaagaggtttaactggatgctaaggggtcttgcacattaaaaggcatgtgtttccgtcttttcactactgtgttctaggaaggcccaccaatgcctctaacctgtaaataaatgcaaatctatttaaatcaagtgatacatcaattttatgttgcttgatttggaagtaatccgcaaagaagcaatagctaaacattttagtgttgtttggggagtagctgctgaacaataaagaccaaaaccataactaaaaaacaaacaaacaaacaaaaaaacgcagcccgagacagatcagaaactaggtgtatgtagggcgccaggttatgacactgttctctgacatccacagggcgcaaaaagaaaacctcactagtcagcttcgcacgtgctctgcgcaggggctcctgcgaggccctagtccctccctgggagctaagagcaggacggaggctgtacctgactgctgcttggagggaaccctggctgagtccagggaggaggagccagaggaggggccgattggaagcagccacctcagcgaagctgcaggatttccgcagggcgggagctgtttatctcccggaagaaaacggctcctgtcacagaagtctcgtgattgctctgggagctttgcttagacacttgaaactacaggagaaagaaggatctagcgaaatatggctacagagagccctgctacgcgtcgggtccaggtggcagaacatcctaggtgggggagaggagacgccgggctttgggatctgctgggttggctacgtgtagatcgggtccacagcacttggctcctcccttggggcgctgcttttggtcccggggagcaagtggaacccttgggattctataaggacacgtggctgggcttgcaaaaaagatcacgccgcaaacacattctaccttgactactacgaagggttgtatgtttttttcttcatccatgcagattcttcttttccttttcttgttgtaattagtgtactctttctactgggcttcagcagaaatgcccatatc

SEQ ID NO: 13862 - DNA, 2300 bp, Homo sapien
gagaacagaagaagcactaaaactataatttgggggaatattaacatttttccctaaaactaatcaatgggttagaggaaaaaaagctaataaatataggcattttaatgttattgattagtcatcatatgtagatgagtttctttgcaatttttatttgactgtttttctccttaaattgttttgctttactattttgccattgccttactcccagcttagacaccttgcctcatattaatgtatactactatctgttaagtagcaattccacaattaagctcaggtgatttgaaaagtaaactttttattgtgtgtacagtgaacatggagaggttcttttatttttttaatgatactggttcatagaagactagaaattaagtaatatcatatatattaagtattatatgtgtatttaagaattttcaaaattgagcaaattttgaagaaaaaaatatggtttattacttttcttgcccattctaattctaaatctaatattctttctactcaaaatgtttaaatgtaagttccttgctaaccaattctttaatccctggtggacataaatgcttacctgcctttagtatttcaagctaatgcctaatatttcctaatgtctaatgtcaaaaatcaacccaagtaactttctttaactcttaaaaggtttgtcatcaacattacaatcactagatctgattagtctacctggtaactgataatcagtgccagagtctagaacaaacctctcagatcaccttttttctcagatgttaagatacacttaatacctagcttctgcttttaggctgattgacatacctgattaaatcacatggctctcttttcctttaagaagtggcacgaatccctctgtaccctcatgcatattcatgccagttgaaaggaaaggtcaccaagtctcctcttatctgggtgtattgtcagaatatggaaaaacaggactctgacaggcagaggcccaggttgcttattgcatttaattagagggtcattgctttggacttagaagcaaaagacccaatttatgtcctctccttctactacttagtaaatagtagcttaaacaagtcatagaacttgcactttagtcttctcaactgtaaattatggaaaatgtttcttagctcactgaatggtttgcgaggatgacataatgtaaataaatgaattttatttcatttatttataagtgaattttatttcatttatttataagtgaattttatttcatttatttataagtgaattttatttcatttatttataagtgaattttatttcatttatttataaatgaattttatttcatttatttataaatgaattttatttcatttatttataaatgaattttatttcatttatttataaatgaattttatttcattgatttataagtgaattttatttcattgatttataagtgaattttatttcattgatttataagtgaattttatttcatttatttataagtgaattttatttcatttatttataagtgaattttatttcatttatttataagtgaattttatttcattatttataagtgaattttatttcatttatttataagtgaattttatttcatttatttataagtgaattttatttcatttatttataagtgaattttatttcatttatttataagtgaattttatttcatttatttataagtgaattttatttcatttatttataagtgaattttatttcattatttatttataagtgaattttatttcatttatttataagtgaattttatttcatttatttattagtgaattttatttcatttatttataagtgaattttatttcatttatttataaatgaatatttacaataataataaagccctattgagtaaaaatatgaaatatttatttcctctttgggacaagttgtaacaatgtcttaacactctttatccatgtttgcctttctccatgtttagggtgcattgttaaaaggcgaaagaggtatcatgctttttctgtgaaggaaaaaaataccagaattttaaaaagtattttattttctgttttaggtatcgacttcaatattataaagattctgaacaacccaagagcatatacgttgcccatatccaaggaagaatcaagattatcaagactagcaacaaaggtttggagtataataattatgaaaaaatttcttacttgtttaatttgcaatatatttgcaattgactgtgctgtacataggcaatgctggttactacattcttaccatatattttg

SEQ ID NO: 13863 - DNA, 2300 bp, Homo sapien
ggttgccaatgtataacttaaaacatccagagggttaccccatctacagttgcctaaagttattcttagttcctggagaattcatttagaagcataagcataataagggcacagtgaaatctaagtttggttctccattatagctgtggtcctaatgaattgtgggcccatcctgaattaataattctccaataaaaatgataatcaaagaatttaaaccattgatacagttcccttgttgatattaatctgttcattaatattacttggatcatatttccaaattacagagtgtaatagcatctaatgcactttcatagatcacaattttattcttttgtttcccattttacagttaatcctatgtagcagatattaaggaggcactaagcactctttgctaacaaactatccatttctttcatttaagtatttagcacttagttagcaaatgtggacttctcacttactgatttcttggtttaaaaactgtaggttcagtatggaacaaatggatttagtagctcttgaatatctttacactgtaaacttactattgataacttttatttctttagaagcaatatctaagtcctaggaattctgagcctgctcattattgttacctcccaaactagcggagtgtgattcagaacacaataacattatattttctttcctccttctcttcctccttttagagaatacatgataggatgttttcagctttctagctttcaacagatgcaatgatcaaagagtctgtccccctctgctttaataaatgtggaacattcaacatttggcatatgaagagtaactgggtacatctgaactattctgtgctcttcattctgttccctaaagggacagatacaaagagaaatcacataaactataatccagttgagtagatttaatttccttttcctatttggtctacatgcaccacctggtggtaaagtagtgcatttcacatagagagagagagagagagagagagagtgtgtgtgtgtgtgtgtgcgcgcgcgcgcgcgtgcacgcgtgtgtgttttgaggagtatataacatgaaaaagataattttaatatactttcttaatactgatttagatagacaacacaattattctacaccaagaatctaatacaacacttgagcactacttcatgtataacagaacaggaagtaaaggagagaactcatgctggaaagtaaaatagctttcacttatttaccttagcaatacatattataattccatctctaaattaacatttattgttccaatattcttattgaggcaaaaatcaaacactgataatcaatgtgaaaccatttcctcctttttaaagaataacagcttttaaaagtaggtgccctgttccttatattagtagtgagtataagtcacagatcacagaattgtaaagcaccatagaggcattagaccaatacaccaattttacaaatgtagcagctgagactctggaacagcaggtaacttgcccgaagtcatactggtcattagtggtccaacacaaataagaatctagatcttctcactttcagcctaggaatataatacataaaaattgtacttatattcatattcaatgaattgtctctgtatgatgtgataatattcaacttatctacacagtgctttaaggcactcatatgttagttaacacataccagttttgttctaacattctgagcacaaagaagtaattgaagaaatgcatgtatcataaagctatggaaaagattttctaagtattaaaaaaccctatatatatgttcaaatgaataattttccaagtataatacaactgctatattgcaaagaaggtttaaaaaattccctttccccttctaactgcttcagaaccagagatctgtttctacaaagtaggtacccacttgtagatttaagcataaaacatgttcatagctccctctcatgaccattgaatactatacaagcctccttttattctcgctgttgtattcaactaacagctcactggctaagttttaattgcttccaatgaggtcagcaaaggtatttatcgaaaagccctgaataaaaggctcacacacacacacaagcacacacgcgctcacacacagagagaaaatccttctgcctgttgatttatggaaacaattatgattctgctggagaacttttcagctgagaaatagtttgtagctacagtagaaaggctcaagttgcaccaggcagacaacagacatggaattcttatatatccagctgttagcaacaaaacaag

SEQ ID NO: 13864 - DNA, 2300 bp, Homo sapien
ccccggcagttaaagtgggggccttgggactaaattctggccaacagaatgtggccaaattgatacatgtcatttttagagttaaccttgggtaatttgccatactttctttcttgtcaaacaagctagtcctagaaggcagcagaaccattaaaaataaaaacatctggccttgaatttaacatttcgtctgcctagaaatagccacaatggatcttttgtgaggaaaaaaaaaagtgtattaaaccaccgatattttggggttttctgttacagaagtaaattcactatgctggttttaaaacatggacaagaaatctttgccaatcctttgagaagagggatctatgtctcctttcctaaaatggaacaggactttgacacatttgtaagcaaaagaaagtgggggaagtagcaccgcgttactttttgaggcaaggtcagaaaaggtcaggcaatttttgccttgttcattgcaacactccctttggagctctgagtttaagctaagaagtctgactaccttgctgccatactgtgaggaaaccccggccatatagttacagaagctctgctagcatgcccactctagtctttctaattgagttaccaaagaaaagctgatgactatgccctattgacaacaccacctgtgaacataataaaatggttgttttaagccaccatattttggagtaatttattacatacgatagcaacccaatgctcaatctaacaagtagtattatttgctttttaatctgtgcaatttaactactttgataaaatttagagttaaactaaaaaggaaaatggttgtgaattcttcttggcttatagactttgctattctactttccctacccagaaaattcacctttctccctaaatcactggctttcaaactttttaaggtttgaaatacagtaagaaatacattttacaaacaagccctagtgcacacatacacgcatatatacaattaaaagctccataaagcagtactttactaactaacactaaatttacttacatgcgctgatatttccaatctatattgtttcttttttttaagtttaaagagatttccttgcttacaaatgggtcaagacctccactaatgggtcccacacaatcccctttccagttgaaaaacactgtcctaaacctaaatcattcttcaaggccttacccaagtccgaaaaagaagcctttattgaccactccattctcagctttcttgaaattcctgtaatttattaaattccattttttatctcagtagtaagaatattgcattttctgtacttgaatttaacatgctttacttgatatcgtgagcacttctagggcattgtaatgtcctttatctaccacttgataaattcagagtagtcaataaaacattgctcaacatttgaccattgtgttttaaaatcttagttgttagagtgcacttccgtttgcgcattgtttggggagaggcacggacaaatgttctaataacttatccacatattatacttcaaagtggaaaaacacaaagtactcttaactctatatgcgtgtttttatgcaaactaaatcattaagatacaaatgatttttctaatagctttcattaccacacagcacacgaaataatgatattgatatagccacgaaagactaatgtaaccaagttctcacaatcaaaatatctttgaggtgggcaaaatgcaaacttttctctgggatcaacatttcttcacaactcactgcaactacgccttgacagtatgtttcgagaaccgcttcccaattttgttgtcccagcaagaatcgggaggaaactgggtgaaaggctgcgaggcttgaggcgggtcccggacgaacgcggccctgcccctcgccggagcctctcgggagaagtgcgacaccgccgctgattgagaggctgaggcggaacttcccgtctaaccccccccccgctgtcgtcccagcctgttgcttaagccgcgcggtgtgcggtgtgcgcggcccctgccttagcaacgacgctagtaactgcctggctcctccctctggtgtctcccggaaagcgctccgtctggtccgtgcgcgatcacggcccggcgcgtggctcgggctcgggcggagctggagacgtgtggagctgttcgaggactcgcgggtgtgcaggtctgagtaccactccgatccctggtggaggtccccgcgcctctctggagaccagtggtctggccccagaggtgcggccgcgggaagtggacattctttgtcaggaccctagcggaggt

SEQ ID NO: 13865 - DNA, 2300 bp, Homo sapien
gtgcattcctcctagagatacctcagaaatatcactttgcagttcatggacctgctatccacataactaaatggatattagtgaagctttatataaataaccttcctctagaaaaatcaaccaccacaaatacctgtaagacagtaaaagagaaatgtttatggctccacctcttagttcacctatatactctcacttatggctgaggtggccacgtagaagaggccagcaattgtaaatcatgggcagctccctccagtggtctctgaaactacatgatcagggcatctgtcctaaccgagccaacagcctgcctcgactgtgagaaaatcattgcaaatgattttattgcaaatggggttatttaaaatttttaaaacatacttgttaacatcaaatatgtgcaaggaagtacaatttgagtcatgggggctaaaaagacttagaaaacataaagactgttcctaaggaactaacaattttaacaccttgatggtgcgtccatcattctggaacttaaggctaaaaatacattaattttttattcctccttctacccaatttccaccccaaattaattatactcaccaagttgcatctaccttgtatataatcctctatcttcactctcaaagtcaggattctaattcagttccttattaactcatagatgggccacagcaatgtcttaaacctctttgagtacttattattagttccacatatttgacatggaaaaatgcatttattgtggaggtactttagtgaatctatcccctccagcattcaactctgtaagagcagattccttccctgatctcacctattcctgattcttatgcaacagcaggaactcaacaaacacttgttaactaaatcaaaaccattctgcaaaacacatccagtaagcatctcactactgaagtatctgacaaactacctttatgggccgtctgcagcctagcacaagtggcaggctggcaatttttttttctccaaaataataacaaaaagcttctacctcttccattattgtaagctgactcacctcccaatggaacactatacagactcccctgtcctatattgtggaccaattcagtattagaaaaaaaccacttccaattttctttagagtgtttttaagaacttggtcacataggacctacaggtccaacattcatttttcataatccaaggtagtagtaccctttttcatataggatcaatggcctctcccacaccacccgccatatggtaacaaactgtcttgccttcgttttcatggtgcactgggttagtccttacatgctgcgatctacagtattgattttaccatccaactttgtgggcctggcgactgaaaatgttaatatacttccttatttgtcctacattcccaataaataatttagacgtaagaaacaggctcttttgcttattatgtaaccacaacctcaatattttaaatacactgcatggcatcactaattctacgtctgtactacgcttccccttccgtgataaccaaacccccacaaaccactccaaatactaaaaataaaataaaataaagtatggggttcctagggaactgactttgccaggacatacttttcgttggggcggaatgcaccgaaaatcattggtaggaaaaataattttttttttgaggaaaaatttggaaacctttttcccaaagggcccgcaagatcctaaaaaaagcaagagaccgcgcagaaaccgaggatccccctcacaggcgacacccagcgcgacctccgctagggtcctgacaaagaatgtccacttcccgcggccgcacctctggggccagaccactggtctccagagaggcgcggggacctccaccagggatcggagtggtactcagacctgcacacccgcgagtcctcgaacagctccacacgtctccagctccgcccgagcccgagccacgcgccgggccgtgatcgcgcacggaccagacggagcgctttccgggagacaccagagggaggagccaggcagttactagcgtcgttgctaaggcaggggccgcgcacaccgcacaccgcgcggcttaagcaacaggctgggacgacagcggggggggggttagacgggaagttccgcctcagcctctcaatcagcggcggtgtcgcacttctcccgagaggctccggcgaggggcagggccgcgttcgtccgggacccgcctcaagcctcgcagcctttcacccagtttcctcccgattcttgctgggacaacaaaattgggaagcggttctcgaaacata

SEQ ID NO: 13866 - DNA, 2300 bp, Homo sapien
tgaataatgttttaattatagggaacaatatgtgtgtgtctatatatatatatacacacaaaggtactgaggcagcagtatacttggcatgtttgaggaataacaaggacactagtttggaacagtgtgtgggagggaaaaaatgatagaagatgacatcatagggagtaatggtgtggagccatggtaagatgttaagattttactctgagtgatgagataggaagccatcagagaatttaagcaaatgagtgacaggatctgacttatatttttaaaggattatttggcttctttatgaaaaatagactgcaagagagtaagaaataaaataggaagatcaattagaatgctatttcagtagtccatttgagagatgatatttgcctggacaagggttgtgatcatgggcgagtggtacagaatgacaagatcctgcatgtatttttaaggtagagccagtatttgcagatagtttagacattgtggtagatatgaaaatgtgctgcctatatcccccttctaggaaggacttgctaattagctgcagggagtgtgaagaacagaaatccaccagtatcagcacttcatctgcaacagctatagaaaaagcttcacctgaggttaccctcgtcttagatctcagggcagccctcagtggagatgtaaggccttgctacttcagcctcatttattacactgtcaggcaaaaccttcctcagagctccctctattacaacttaatttcttcttctgcccaatcctgcttcctccccttcccctgaaaggtgacactttctaataaacatcttacaccccaaactccatctcagcattcctctttagaggactcgacctgtggtaattgttagtaggagtgatctgagctgccaatgagaatcccatcacatgtggcacatggaacaaaagcccatggctcaaggtggtaacttttattagtggtaaaatgagaagatttacccacggaagagaatgtgccagcaagtgcagtatatcaggtatttgagactcatgaaggaaatagtaaatttaagaataacagaattgaatggccaagtgccactaatgctctgtagaaagagggcttctttggttgcatacaaatctcatctagaatttaatagtccaagtagccaaactggtatttgtccttaagaataaatactggaagatcaagcacagaaagtctagaatagaggcatgtgaatggacatacttgtgtcaagtatgtacatgaactgtgaaggtctctgtattacgtgcagtgcccaccagagagcattcagtactgaagagtctctaaacaataaagcaaactaaacacattgcctagttgacgtcatccttcctgcttcagttattcgccacccagtgctagcacagtgggcacatgaatggaatgtccactgtggaaaggatgaagactaagcatagggttcagtagcttgagtttcaacttaccaaggctgccttagctgctgctgctgttgaatgtccaacctacaagcaacacagacaatactgcacccctgatataataccattcttcaatatcaagttggttacattgggccccttccacactggaaggaccagcatttccttgtcatagaaatagacacaatttccagataggagtttgcttttcctctttgcagagcctcagtcagtatcaccatttgagtttacttagtattgtattgaccagcatgcgatctcacattatatcatatcagatccggaaacctattttatggaaaaccaagcgcaggagtggacccatatccacaggatccactaataatatcacttttttcaccacttggaatttgtcagcttgatagaacattggaacaacctgctgaaggtacagctgaacaccagctcataggcaaattctacaaggataggatgccatactccaagatacagagtatgtactggatcaattatccttatatagcatgtgccccaatatgaagaataaatgggtcttggaacccatttattcctaggggtagatgcaaagagagtagaagaagaggtgcctcccctccgtgccatcacttttaatgacccatatggtactttgcacctcttcataactctgaactctgcagtgagaggtcttggtcccacaaggggacacagttttgctgagagatatataaaaaatctcactgaaaaacataagctgcagcagctacctggatactttcggttccttgtgtctgtctagggagcagcagccaataaaaggagtcaagatcagttgaccc

SEQ ID NO: 13867 - DNA, 2300 bp, Homo sapien
gccagtgggagaggaggatgagaagctccatggccaaggaaagaaagagcatggatttcttttgtcccagcatcaatgtgcttgagtggggagaaaggagaggatcaatcacaaaaatggtagatccttggcatactcagagccttggaagggacttcctggaaaggggaaaaagtctggctgcctgtggggaagtgaaagactagccagtggaatttccgtggcacaattagagtgtcttatttttaaaaagactttttgttttttaaaaaagtatttttaaggagaccacattttctccaggctgttgttagacctatttgctaggcctcattttctgggccaaagccgtctattgcaaaatataaatcttcacattatgagctcactccagtctcccatttggctggctttgtagtcagttgttaagtctcccttctcatatgtaaaaagggcagtttgcgaaaggcatattttctggaattatacaaaaaagtaatgaacttctgaagaccttagatgtaaaggattaagcacattcatttctcagcgcccatgtttacaagtgtttcttttcttggagctttgtagctgcccagaatgtggaataaaataataaaaataaagcagtttctgggaaaagatggttattgtgcaattcaaaaaaaatataataaggcttcctattaccatcaagttgagtgtctgctcctctctcctttcctgctttgtcaaccttggcccttaaactgatcacaggatcgtggaatgctatgctggacaggcctcagcaatcatcaacagatctgctcattttttaaggcagaaaccaagccttggagagtcatttccctaaagccacacagccaataagtgacacggctaagactagaaccaggcctcttaactttgaggttgctacattattgctattgttgttattatcattattttattaattgttatttatagaagcatctggcatatttattacttacgatgtggcaagaactctactaaatactttacatactggtttaatcatggcgatagttccatgtgggaggtgttattgtttgcatttctgggcatgaggaaaccaaggctcaggcggattaagtaacaggtttaagataacacaccagctaaacccgttaccagggattgagctcatgactgtcttgtttcaaagcctgcgcacataaccctcagtcactgaactaggggaacaagcatccaaaagcatctaaaaacaggactttctaaagagaatatgcctgtgtttttccatgggactctgtttggagagacctgggccatcccacaagcaggaaggggaatgttcctctcccacaatagttcaccacctgtgttgcttccactttcgcctcttctcctccacctgtggtcctctgatgtcccctgtggttgattcttgccatcctttttggtttttggcatttggctttggtgctcactgtggttatcagcattactttggagctggctggaaatgcagtcttgggccctcagccctattgaatcacaatctgtttcccaggcgatttgtgtgcacattaggtttgataagcatttagtttctcttgggacctggttggtgtcaaatgtgccaccttctcattctgtctatattctttctttgtcctgaacacctggtaactgctgttaaaattctcactgggtaggatcctcatcccagcctccttctcacctggaatcccaaatgcagtttccccttttccctgctctcttcttcctgctcacttccctccaaagtcatgagctctgatttgacaattctgactccacagctctctgctgtcatctcctggtcactaccactcactaccttgacaattaacttctggggcccattggctgcacatgatgtgctggaattctgggagcacgaatgcttctgacagcctgcaggagagtgtaggaaagaaacttcaatttgaagccaaatagctaggctcaaaccaagccctggttctgctacttacgagctgtgtgacctctcatgaatctctcttggagactcaagctccttctctgtaaagtagagatcattttattatcttctggtttattgtgggaatacaaacaagataatgtcctgttctggcccagtgagtagtgcattttaggacatgtttaaacaggcatttgctatttctgaagatagggaatacaaggcctctctgactctttttaatccttctccactgaaattacactctgtttacaggatgtgagtgaccagaacagcgtggact

SEQ ID NO: 13868 - DNA, 2300 bp, Homo sapien
cacgtggctgcagctgtcttgtatcactttgctcccagcatggacctaggctgtggtatcttggaactggcccatactgattcacaagagctgattgttaaattttcatgaattttgtgagccagtggttaaatacagccattattaaacgttatataaatttacaatttaagttatattaaaaataaaagacagttaatatactcaaaatgaatcccttgctaattattttcccatgttttactatttatgctcttgagattatattgggtctgtatagtagaaatactatataatggtgagtatgtctcaactccacattcagtggcatcattgcttgaaatcagtcatggaggaatatttataccatggaaattggcaaatgctacaaatcaaggcttttttttgtttgtttgtttgtttgttttgagacggagtcttgctttgtcacccaggctggagtgcagtggcgtgatcttggcttactgcaacctcagcctctcgggttcatgccactctcctgcctcagcctcccgagtagctgggactacaggcgcccgccaccatgcctggctaattttttgtatttttagtagagacggggtttcaccatgttagccaggatggtcttgatctcctgacctcatgatccacccgcctaggcctcccaaagtgctgggattacaggtgtgagccaccacacctggccggcttttttttttttttagcctgttgttaaacatttatcagcatgtcattggatatagtccccctttctaaatccttacagctgggtttagaccacataatgaaaataggaatcagagagtaacaaaggagagttaccatgaagagaacttaaaatttgttattagaaatagttattctgagtcataagctttcccacttccaccattgtcttcagtttcttctcagcatagcatccagagtaatcctgttaaaatataaataagaccaggttgctcctttgcttaaagtcctctaatgtcttctactttcacttaggtaataagccatgtttagttacataggattgttcttcttacctcctgacatccattattcttcctacaggtcactctgctctacccaactgggccaccttgctgttctctgagcatagtggatgctttcttgccttagggttgtttcatggggcctacttgcagtatagaatgctgcacgtcccagcatttccagctgtttcagaaagctgcatgttagatccatttccttcaggtcttatctcaaattcacttctcagtgagactttcttcaatctgctgtattacaattacagccctcccacattccctatcccctttcctctctagcacttactaccttctaactaattaagttgattttaatttttgcttttgcccataataagctctgtaaccgaaaggttctgtttccacaactgtgtgtactcataggcaaaatggggatatatgcctgcttcacatgcctcattgacttttagtgaggcccatgcagggaattcttgtgtaattagtctacaaaggtgtgaggggatatttttgttgttttgctatttatgcccatcttgctttaaaccactcccccgcaaaaacctctccattttaacacaggatagaaataacaggcttattactatatttatctctgaagattttagtgaatcctttgtttaccacttggatcagataattggactcattataagccactgaaaacctggagaataaaatggcaacccaccacaaggtcaggggctcatacgtgtcccgcactatgttaggggtactgctgcatgtattattttgtcctcactgccacactgcaggaagggtatacatcactttagagataaagaaactgccgtttagagagatctagtatcccattaaggcaccagagctgataagaggcaggtctaggaaagaattcatatttgtctgattccaaaagtcaactcccacccacctcagaaaacctggttatttaacctaaatgtgaatattctcactactatggatgatgtttctcacttatatgttatatttcttttcagactgtttatgaccagtggttcatcaccctttttaacattgtttacacatcactgcctgttttagccatggggatttttgaccaggtatgttttttttccatctttataacttagtttctcttttatgccttttagttttttgtgggttctaagtagaaaacacaattctaagtagcagccctaggaatgcagttgttttagttgcttttgcatggatcac

SEQ ID NO: 13869 - DNA, 2300 bp, Homo sapien
ggtcccatttcatgaactctaataatgaaactggttcagtggttgaacatcttaaaggtctctcaggtagggtagtaaggaatggaactgggaattcaaatcaaaatttcatgtactttctccctttctctactgttggcagggtagtgctgtcccttaaaactgtccctccagcactgtgtcttagtccaacctagaggcagtctgtggctgactctatgtgtaaaccagcttggtgcagtagaccaagaactgtgaatatgaagacgtaggttccagccatggatctgtcgctggctaatcaagtggctagaggtcagataactcaactgtggaaacaaacataagatgtcagaggcagtctgaacccaggtttccaggttccaagctcaaagctccagctttcatatcaaagtccagattttcttcttttaaacaggatgtcatggtttcaatccatttccaacagatcgatttttttttttttttgagacggagttttgctcttgttgcccaggctggagtgcaatggcgccatcttggctcactgcaacctccgcctcccaggttcaagtgattctcctgcctcagcctcccgagtagctaggattacaggcatgtgccaccaagcctagctaattttgtatttttggtagagatgggggtttctctatgttgttcaggctggtcttgaactcctgacctcaggtgatctgcccgcctcagcctccccaaatgctgggattacaggcatgaaccactgtgcctggccacaacagatcaatttaacctttcaatatagagtgccttaagaggactgactaaacgactcttttttccaaccatcctcttttcttctttataggttgtatgcaagccagtatgtgcctaactatgctttgctgtgcttgtagtgacatggggctgtgaatgccacagttgcctcaactgttaatgcgattctgcatgccaagaattgtaataaactgcccttcattacgcagcttggaaaaaacaggcactcttttgttttagcatttgttatttgtattatgtggttaagcattgtgtgtacgcttcaaaaatgtatagctcatagtcattgaagggagttatgtgtagctttttcccttcctaataaatcgtttttgtgagaaccagctggtgtttgaagagctaaattccaggaagaaaaagaaatgacagctacagagcgtgggcaaaggtctaaaaatatgaaagcccaatctggccaagagacgttggcctgtacagagaaagtgcagtgacaatttcagcagagccagaaaaactgtcccttttctgcctggaaaagggttcatgtgagatgttaggaagacagtttaaggagaaaaaaatcctaagtaaatagaatttcagccaatactttcatgaacttcacccttctttggaatgtttttactctctaaggggaaaacagattgagtcatttatacagcgagtgagaactttactcaaaaggagtactcaggagatgttttccctgtggtgctttctgaagtcacaatttatgagctctgcaacattgtcagagaaatgttcatttccaaggaacttgtctcccttgctttctttattatttggcactgtacattttcatgactgtgaggaggattccctgacatagttatctgatgggaaagtctgatcctctcacttacaacaatgatttttcatgtctgttctacttccctctcccctttgtaactccctaaatttcacacatagcactctgactttatacatctttttctttgattctgcaaactgattgttaaatgtgtgatatgattcttggaaccatgtgacctctgggttcctaaatgcagatgtgattttggtcttggacagcagaaggagatattgagctagaagttaatgtatctttttgtatcatttttatttttaaacttagtatgtaaacaattggtgttacattttcaaataattagacagctgagggctaaaacagttgttttggtaagtggacattctcttctttcagaggagcctcagcataaaaccattttaataaatattttctacacaggatgagtaatttcatttcgccaaaagacacaatattcactttctggtcttctctcactctccatgttctcctgagtgctcattttgtaaatgccagttatgacccatgctggatagttctctggtcgtggttgaagcttctgtaggtttgtcagcttgccttatgttacttcaaagcctgcactcaactgttcttgaagaggaatttc

SEQ ID NO: 13870 - DNA, 2300 bp, Homo sapien
gtgaattcttcagttgcaggatttctgtttggttcttcgttatgatatctacctctttggtaaatttctcaatcatatcctgaattgtttttttcatttctttgtattgtttatctttgttctcttgtatctcactaaacttccttaatatcattattttgaattatttttatgggaatttcataaatttcctattcattggaatctgttactggagaattatggtgttcctttggagttgtatttcctagctttttcacgtttcttgtgtccttacgttgctatctgcacatctggtataacagtcgcttcttccaattttgtggatttactttcataggagaggacttcctcaatatgtatcttggtattggttgggtagggcactttggctttgattctggatgtgtgcagtagtatagtctccatataatttatttggctttcttttttttttttttttttttttttggtaaacaaagccaatggtgtctgtgacttcctcagtggcttagggtgtggttgttaatggagactgtagtgaagttttattgggcatggggacagcaggtgggacagtccttgggccccagtgggagcagtggtaggctgagcctgcctgtctttgggtccaagggtagcacatttggcactggcattagtgtgtcctggtgggatgattcttgggccaccaggaggcttgctcaggtgacagcagtagaaacagtgggctggaccttgggcccctgggctgcaggcatggcataggcaatggcagtagcagtggttggacaactctctggctcccaaatagcctatgctggtgttggcagtggctgtgacaggctggtcaggccattccccaggtccacgggtggtaagtgcaggtgggtgctagctgtggtggtagtggcaggctgggttagtctgtcttccagtctctgggaggagtggtcatgatggtggatggagccacggcagtggatggtggatggagcagggtgatccccaggcccctaggtggtatgctcaagtactggggtggggggtatggagtgcggtcaaagccagactggacagacctgtctgtatgttccccttctccccgctgtccagtggtatgtatgggtgctggctgtggtggcagggacagggttatcccaaggcctctggtggaatgctcaggtgggggtggcagtagctgcactctggccgtgctggctgctggggtgagtgggattgcttttagtagtagcagccttaggcaggtggctgggaagtgtgtgctttggctgtaggtggcagctatatgtaaggtagcctatccttagggcatgtggaaatgtgaggaagtcctgttgctggaagggtagtggggttgctgtcagcgtcttgcactttggccatggtggcagtggtggcagtggtggtggctgcaggtggggaatgtcagtggagctccaggaatgtggaaagccaagtactgttgggccctcaggcaggatgcagtctggtggggctgggctctcaaaatgacactttgctgtcattttgtggtatgtgggacccagtgtgagctccctctctggggcaatggcactgccttgtcttcaggcagctccctatgttaatttcagggtctgaaagggttgagaggctctcctatggctaggagtggagtctgtggtgagattgtggaccactgggcatccctcacttatactttccctacacaggagagcctttctgggctcccagccagacaggatgccttgtttccctcttcttcttttaggtgtttcctgtcacttctctcttgaactccaatattttctcttagatgacatatttgaagtatgattatctactctctatcttggtgcttctttgtggaggaggcaactgccagatgcctttagtcgtacatcttgaaggaccactctcattcagaacttgactcttgctgaaggaagatagatgcaaacagatctagattttaataagcctgttgctaaatgttttgagacagtgcctggaagagtattgtaggcagtacacatgtattacctcattttgttcttaagaaactcaatcgtaggcattactgttttccctgttggacatatgaggaagtcgaagtatatagagggtaagtaacttgcccaaagtagtccgtggttcaggtgggatgtgaatctaggcagcttggtcccagaggctgtgcacttgccatgtgtttccctaaacatacctcagatttatttttattccctttaataattaacctaaaaatatagttg

SEQ ID NO: 13871 - DNA, 2300 bp, Homo sapien
ctccatagttctccatccctccttctaccatagccctgcactcatcatccttttttaaaatttttatttatttatttattttgagacagggtcttctgtgtcacccaggctggagtgaagtggcacaatcacagctcactgcagccttgagcttctgggctcaagtggtcctcccactttagcctcccaagcagtgggactggaggcatgagccaccatgcctggctaattttttgtaaagacagggtttcgccatgtttcccagactggtctcaaactcctggactcaagtgaggagatagagggcatctgcccaccttggcctcccaaagtgttgggattacaggtgtgagctactgtgtctggcctacactcacgattcgaatggtcttttatgtttctgtctgctctcatcttccccagactgtgggcttttgaaagactggaaatgaatttttgcctccctcatgcccagcccatgttagctatagagtaggcacctgataagtctttgataattgaatgtcagtagagggaggacatggttctcaaatttggtaggaggttttttccatgtggagagttaaaaaaatacattttaagaaaaataaaaataatcatcgctttcccttattgagtactaactttgtggcagcaggcattgagctaatttctttatggagatggcttggtttagttttcctagtgatcctatgagttactctgattgtccacagaggagaaaactggagcttagaagggaggggaacttgcttgagattctagggttaacaggagcaaacttgggcggcctaacgccagcactggtggagcaatagggaagtgagaagaggaaggaagatggccaaagcagggttgagagaagagggacaggatgaggacaaggaggggaaaatgagaaagagaccagcaagagcagactaggaaaggaagagaagggaaggagaaaaggaaactagaatgcatttctgtaagtacttccaatgttgcctgaagttttgattgaagtaactcaggaatggaaaaccaaacatcgtatgttctcacttataagtgggagctaagctatgaggatgcaaaggcataagaatggcacagtggactttatggactcagggggaaagggtaggaagggagtgaggaataaaggactacaaattgggtgcagtgtatactactcatgtgatgggtgcaccaaaatctcacagatcaccactaaagaacttactcatgtaaccaaactgtttcccaatagtctatgaaaattaaaaaaaaaaaaaaaaaaaaaaaaagaaactaggagaccaagaaggaaaatgaacaggggatatgtgagaggacgaagagaagctttgaaatgttgtggctgggtaatggctgcatgactagaatataaagagactcctgtatggacatgacaactcacaacaattaacctgctgtatgttatacagtaaatataacaataatttattgttgaggcacggtaattgcatatacctgtagttgcaagccatttataaatttggctttttttttttttttttttttttttttgagatggagtttcgtgttgttgcccgggctggagtgcaatggcatgatctcagctcaccgcaacctctgcctcccgggctcaagtgattctcctgcctcagcctcctgagtagctgggattacaggcatgtgccaccacgcccagctaatttttgtatttttagtaaagacggagtttttccatgttggtcaggctggtctcgaactcctgacctcaggtgatccacccacctcggcctcccaaagtgctgggattacaggtgtgagccaccgctcctggccttataaatttggcttttacacacacccatacgtacacacatacacacatacacagattggcttaattttttttttacttctacttttgtacagttcctacaatctacaagcactgtggctattggcagctgtcactgataccaaatagaattatctttagctcccaccctcaccctcacactcaaaactgcacacatgcaggacagaagcctgggcttgttcctttttctctcgctgtctcagctcccaaggctgagattactctgcttcatctggatcgcccatctctggggtctcatggctgagtttcagttccccaatcctacctgctcctcagggggccagcactggggctgcaggtaatattttgggttggcaggcagggatgcctgtgggacagcaaggtcacccctacatgggtcccagggtgggaggactct

SEQ ID NO: 13872 - DNA, 2300 bp, Homo sapien
gtagcctctactctttctgtctctgtgaattcacctattcttcttgctgagccttgctgttatcattattcattcgacattattcattattcatgagtgcttattatggacaccaggagttcaacagtaaacaaaagtccctgctctcaaggagcttttattttagtgggagggagacaataaacagcgagcacatttaaaatattttttaaaaatgagattatcttatacacaattcttctgcaacttgatcttttcacttgacagtacatcttggacatctttttctatgtcagtctgaagaggcctatctcttatttataatagctaaatttattgagtctctactttgctccaggcactgttttagttgcaacaatcctatgaggtaagttctataatgatcatctttttacagatggcccagataagtgtaggagcttgcatagtcacctggccagtcactggtggagacagaactaaactcagatgacctgattccttactccaattctaccctcttttgaatggctacatagtactcttttgtatcaatataccttaacttatttaggcagtctcttatatgtaagccatttttaggtgtttttttgttgttgctatcatagtgctataattaacatatttagagatatgtttgcacgtgtgtgtggttttctataaggtaaattcctaagaaataaaaacacatacacatttcaatacttgataggcactactatactcagtttcctttaaaaaatattttaccaatttatattcccactaacagtataggaaaaggaaaaggccctgatttccttatatcttctttaacaaagggaattaccaaacttatatttgccccatatgataggtttaaaaatggtatagaggtgatacttaaaaatgtttttcacttaaaagtgttttttattttaaatattttaaagagatgattgcttcctgctctaagctgttcttggtcctcttttatcatgtaagaaagaaagccatctctcttatttccagaaatctgtagtttcttgttactgtggaaccttggtaggaaaaggcccttgtttctgtgaaaacctgagggcccagcgtgaggatgttccaggagagtggagttgatggtgcgcaggggattagcttgctctggttatagagacatgattaaaatctatttgatttcagtacttaactggcaaatctgatgcaacttctggaaaattcctagatggctttaggcatatttaaaagaagccatatttttccttttaaaaatagatatgcaccaaaatattttattttcatctaatcccgctttaacaaccagaatccccttaaaagcaattccaaactaaaagatgtaaatccatttcctatgtgcatttgttctttggtaccatcagggttaatgtttgcatcctctgtgctgaaattaaggatgttgggaaagaagtgtcattgctttgcctactaaatgtcacttgagtatgcttagctttcatccataagagagctgaacttcccctgtaaaaaaaaaaaaaaaaaaaaaaaaaaagtgacaaaaacccactgctgattctttcatctctgcaaaagcaggtgggaactgcaaacagatttgcttatcttcctcagtcaagggctggtaaaagtttggtaagtaggcctggtagccggtgtccccttccattgttcattttcatcctcctgaattcttgattcccacagaggaagccatcctcagaagccagcctcttgggagtttccttttgtttccccaagattaaccagttctgtcctgtcagcaggagcaggcaactaggggaggagaggctcttcagggctttcagcatttttccaaggagtgcttttctccctcaattcctcactgacagtgaagctgctttcttgtaaggtcttcctcttcttctgatgagatgctgattctgattgccatctagcagcttccggtggtggtaagtggtcaagagtgtttttccaggagttgatctcaggtttttgagaatgccccctagagacccagtttgttttctgtatcatccctcaagctttcagagtagccttgcttttctccttggcatggtcacggaatggatacctgtttgatcttcctgcactgctgagaaatcttccttttgggggagaggattaagtctgggttgaggtgagtagatgggtagcattcaatggttagtgagatgaagtggaaatttagctgtgggctggttggaacgatctgtttcttttctccagatccctatttt

SEQ ID NO: 13873 - DNA, 2300 bp, Homo sapien
cctttttccccaggacccacagacattggttcagaaatgggcgcataatccagtcagggatttttttttttatgagaactcctaagaaaaagattcctgtacttctctctgaagttgagccagaaagcatgtacccctaagggctgttggcagccatctttggacaaaaaccagagagcctgaatgagaacagaggaggtgcagaggagaaatagtgaaagcaaaactagatccaggtgtcagcatttaaaatccttgatgtcttagccccggactctccagttactacttaaattcctgtttctgcttcagctagcttgggtcttgttttcttttacttgtaactgaggttaaagtgatcctcagaataagaggggaaaaagtggacccttgtggtaatctagcactctgggtagacagtagctgttcaaggaaaagagaagaggggtgcaggtggctacacagaagcgattagccatcaagggacgagggtggcattgggatgaaaaaggaagggctggctctgagcttcaccatgaaagaagtgcacatgagaatggtttctgtcgggccctcactttggttaattctactgctttctcctcagggatgatgaaggcccccagctcatccccagggaaatgatgcaaccaggtagctggatcagaaatgaaaaagtcaggaaaagggaaaggttgcttgcgcagttactagggatacgaaaaggaggctaaaaaacggcagggggtggcctggagggaatgtgaaacatttttgtgtgttttacacacaccgaaaaaaaaagaggacatggacagaaacctagagaataggaggacagcatagtatagttactaagaataagctaagagttggttccccgggaccaaacagataccatttccaaaacccacgaattacttaccggctgtctcaattcacctaagcttccctttcttgtctgtaaatgagcatgaaagtgccacctgtataaaataactcaggctcccaaaatgtaacatagggaagctcctagcagcgtgtctgggaggaataagcattatctgtatttatcgtatcaaattaagatagaggaacacaggaggacagtagaggatgaaaataaaacactacttagatcctgaccctcctcagtggcaagtagtgagcattcacttcgtacagaagtagcactaaggcaaattaaaagaaaggttcacatttcctctaaaagaaatggtttttgagtcatgccaataccacttactcaatgtcctctgtactatactattctctgacagagccacttattaaatgtgtgaactgtgctgacaacacttgacaactttcaacatgagggaacagcaggatcacttaacagaacaaaatcgtaaaataatgtcaaagcttgatttcaggtggtgcggtgtagcactgctcttcacgaaatcaggactcccccgaccaggcagggccgactaggttagagtgtcctgccctcactcacctggcagggcttgggatgagctggacgtgactgccacaggcatttctgttcaaccttgaagccttcgctacaggagaccgcctggcagtcgggctgggaagcaaatctgagaaacaaagagagaccaggcggaaagcccttgggaccaggaaggagagatgagattctggtttggcagtggcacctggtacccgctattaataaataataggactgtctgacatttataaggcactttatcggtaataacagtgtcatctccataagccattctattagtggtaacaaataatagccccacgcctgcaatatctcctttaatattcccaacgtccgctaagcgcgtctcatcaccatttaaagaaaccgtggctcctagaggtaaagtacttcggtcacaacgcgaggaggtccagacttgaccccagacctccagactcgagctgggaagtggccgaggctcctggtgagccgcagggcagcctgcccagccccgggaggaccgcgtgggagggccgggagagcaggtggctgccccccacaagggggcgggctcagccggccagtcctgcccggaacccccggcaacgcgcatacgactacacctgctccggagcccgcggcggtacctgcagcggaggagctctgtcttccccttcatctcacgcgagcccggcgtcccgccgcgtgcgccccggcgcagcccgccagtccgcccggagcccgcccagtcgccgcgctgcacgcccggggtgaaccctctgccctcgctgggacagagggccccgcagcc

SEQ ID NO: 13874 - DNA, 2300 bp, Homo sapien
agtgagccaagatcacactactgcattccagccgggatgacagagtgagactgtctagataggtagatagatagatagataaatagatagatagatagatagatagatagatagatagatagatagatgcatacaaacatacatacatacatacatacataatggatagataatgtctgttgaattaatgggttccattattctggttgattgtgacaggctttctctcctgaagcttaaggaccactgggttgggcatgagggcctgaaaaatgatgtaacaaaatcagatgtgaaaaaatccatttaaactcaatctaccccaggcccagccttaccctaccacaggcttacttacctctcaaaggtcctcctaatcaatgactctgtccagctctctggcagtacatggtaggacagcggtgctctccttgggtctcagtgcagcaagtaagcaggtggtgagcacaggatgggctggaaaggacctgtgagtagggtggtggaggaccctgtacaaggacagaaacccagacaccaaatgattaatatatccaagggctgggattcccagcctagtagcccaaggaaagatagcttaaagatattctctaagatttttcttctctccctgctcttaactaaagcttgcaaaggaggtgattgtacatctccatccaagaacaaaactagcactttgctggcatatatgggaatgcactttattttcttcagaaacagggactgaagaggtaaaaacaaactctgaatcaggtgttgttattgaatctgaaagagaaggatagagttcagattattctatataataggtgctagtatttgaaaaggaccttcccacagcctctgagaaaagggaagtagatcattggtagaaagatgacatggttgcttacagatatcaaatgctaacaattatgtaaggccttatgtgacctggtaactcatgataaggaattacctttgattccagggctatttagaaagcaagagttcatataagcaagaactttaacttggagaaataaaaattaacatcaaggagattactacttaattacctaaatgtaaaatgagtatgtatttccttgttaaatttttgcttactcctggtggaacttaaacatttttatgacctccgggtgatttgtgtggggaagaaggaggagcacatgcatgtctctctctctatatatagtattataatgtgcatcatcttgctgtacaaaatactgtcattccaaactgccaatgattgagatgcaaaattacagttacaaatggcattttaggaactatttttaggttgtcttcaaggactatgttattaatagcaccagtttgcatttcagttgcttttctgaatgaagaaaagagataaatcttcaagcttgacttgctcatcaaccaaccatttcatgatcagagtacatttcctttcactaccttccttttggaccttaccttcttggtaaatatttctggggtgttttgtttaatccagtcagttactcattcactgaggcagtctagtagcagaacaagctactagactgaatgttttcctattggaaagctgcaggtttagcctgagcacctgacaccttagtaatgaagattgattcagctcaccacctacccaatctctctgccttctagcaatggacttgtttattcagaaaattcttcctttttccttaaaaaaaaaaaaaaaggcaggggcagacttaatatgctaccttaattttttaaaattttctttgaacagactttaaaggggatgggggagtagtgttgtaatcacttgatttttcaacacccaagtgtgtgctctttctctgtgggtttatttcagtctacaacttaaaactagactgatgaagaaccgactgatggagctgctctacacccttcaggcaactttctgtgaccactgtttctcatactcaaacttttaataaagcttgaggttttgctcttcaagaaaagatcatccatgttactcattaaatgcagatccacatgattgaacaagcactgagcagaaggccaagcagccagcctcttccaagaaataaggcactttgctagaacttaatctgaatggctcatacaaggaggtgggaacctcagaagcccagaatgattcttttcattttgcatgtgaccctccatacactgacttggtgagcctcttctcatttgtagaaataagattactggtatctatatcacagagttgttatgaaaattatgtgaagtgatgtatgtaaaactatacc

SEQ ID NO: 13875 - DNA, 2300 bp, Homo sapien
ccaggcatttttagcaggattctatcagctgtaggtcacttgaagatttcaagaagcaaagacatcaaagactgggtgaatgaatgataaggaaccataaagactcctgtgaagttcctgaggtggccccgaagatttccacaatcatggccagagcaaaatcctacccaacccttgtttggataatctatactcccatcctgggaagcagttaaagggatgctctccatttcatagacagaaaagagtcttctggaggggaaatgttagcccaaggtcacaagagctattgacaactaaatgggcccaagtcaccagcctctcacacaggccaggatcctctcttcctggggactcaaactccatatccatttgtgtaataagctgagagttcttcttttaaatatgttttacatggggagcaaacacatccaggagggacagaacattctctttttggtttctgtggcctctgtaatagagaggctggtattaggtgcaaacttattttagaaggcagaataggaatgaaagttggggagggacatgggcaccctgggcaggaggagctgtgtatttccttctgtgaatagctatgacacacacatacacaaacacatacacacacagagagagagagagagagagagagagagagagagagagaaaaaactagaaagcctggggaaatttggcaagagaatacagaaaggctgccatgataatccttttcccctgcagagcacggtcagtgaatccactttgattgccctgctggcagcaaggaagaacaaaatcctggaaatgaaaacgtctgagcccgatgctgatgagtcctgcctaaatgcccgactcgtggcctatgcctctgaccaggtgagttgcccgacgcaggacagcccttcgggttggtgcttggcttctggaatcttggtccttgagcaatttttttctagacgtgagtacgctggggttctgagcagctcagacatgggagcttgtctccagcaactgtagggaagacaagcttccaatgatcatatttggttcccgagtcttaggcttcagcagtttctggggggtgatcattccaggatgactctttgctgacaggtttctgtggcccttctaggctcactcctctgtggaaaaggctggtttgatttcccttgtgaagatgaaatttctgcctgtggatgacaacttctcactccgaggggaagctcttcagaaggccatcgaggaagacaagcagcggggcttggtgcccgtctttgtaagtcaggatatatgcctaagcttagaatgatagaacttggatgtgaggaaggaattttggcagaattcaggtaagtaacatgctgcacacaaaagcagaaaggtcctcccatacagtattttacacatcatgaggtgctatccataggtgtgttatggaataaattttgtgggtcataaccagcattaaaaagaaatatagtataaaatattagagtgcacacatatagccagagtatgtattgttttatgaaacttttttttcaaatacacacgtatacatgtactagattgttatataaaatgtgtttcttacgagccatggtaaaacacagtctgaaatatacactgttctggtgggatggatgggagtagatcacgtctgtggtgaaatctttctcaggccaaatgtgtcacacgagcccaccctcctgtgttaacttgccttaattttcccctaggtctgtgcaacactagggaccactggggtctgtgcatttgactgcctgtcagagctgggccccatctgtaagtatcttccctctgtggctaggaagacaaggaatacatttttaaatgtctcctaaagcaaggacctgaaaccagctctatgggattattcttgttcctctttggtcaatgcagagacatgggaagaaccaccaaaggtcatgagggtctcttccagggatccctggacattgcctttcccagtggtgtgacaagagttagaggtggcctaccttgcctcctgtcctaggaggcgacagtaggagagccttcggttttctcatcctcttacttgtatgttgaactttacttaatgcaggctatatccaaaatacagtgtgaattaggctagaatagaaatgctttctattctaccttcagaaaaggaaaagggtagggtaggggaaatcatgggagagattaaaggcagagaggaaacccagatgggactgtttaatccccaagcaagaaaccactaggaaagagagataccttccctctaacttttgtat

SEQ ID NO: 13876 - DNA, 2300 bp, Homo sapien
atggctgtgccattttacattcccaccagtaaagtatgagggttctaatttttccctgtcttcaccaatacttgttgttatctatcttttttattatagtcatcatagtctgtatgaagtgatttctcactgtagttttttcagtagtaattaaaaaatttcctacctattttagcctaaaattactttcctgactctcttcaaggagcctgccagagaattctctctctcgtgctgtctcccttatgcctgggcataagctctgataatgccctgtctgggaaaactcttttggccttctcaatttctattacattgagagcccaagaacccatggtcagtaacaggccaatgagaagcctcctgcattagtctaggtgaaggataatggtggcttggaccggaatagggtggtagtcatggaaatggggagaatttgacagactagatttattttggaaatagaactgaatctgaacagattgaattgggcagggagcagggaaagtgaaggggaaggaagacaccaggtttatgccttcagcatttgggtggatgaatggatggatgaaaggatagatggatgcatggatggtggttggatggatgagtggttggatgaatggacggtcaaggggtgaatagatgggtggatggaaaatggagagatgatgaactgagatggggaagactagaagtggggcatatttttggggaaagacagttttgcaatacgttaagtttgaggtgcctcagagtcataagagaggatttgtcagaaaggcagttggatataagattttgaagctcaaaagacagggagggcctgatggtatgtttaaacctatacggatatcacataggtaacatttcaagcctaagaaatgggccgggcgcagtggctcacacctgtaatcccagcactttgggaggctgaggcgggtggatcacttgaggtcaggagttcgagacaaacccagccaacatggtgaaaccccatctctgctaaaaacacaaaaattagtggggcatggtggcacatacctgtaggcccagctactcaggaggttgaggtgggagaattgcttgaacccgggaggcagaggttgcagtgagccaagattgtgccactgcactccagcctgggcgacagagcaagactccgtctaaacaaaacaaaacaaaaaaagccttagaaatgggcaatgccaccaaagcagaaagatgaaaggagggcaatgccctgaggtgtgccagcattggaggaaacaaacagccagagatgtaggaggaaagcccagagaaactgtgagctgcaaggatgaagtagtaacaaataaaatgccaccaagagaaccagaaggacgactggaaacaaataaacaagaaagactattgcatttagcaacgtgaaaacgttggattactttttactcagaaatcaaaccccaaggatagtgtttcccctccctacaggggtttctgcaggtccctttacacgccccccttctacttctttaagtgctaaaagtgattaatttggggtgatgttttaatttctattctttttggcttataactgtgttttttcattctttgcaacaacagatagtatgttgtaatagaaaaatccattgtggtcaatgataacttctgcctgttcctgggcacagggggcatcactattagtgcctgttcctccctccctactgctgataaggaaacaggggcaggaataatactaataatttgtgctactttttctgcatacccttggccttattctggtctactgagctgggagcttgtctgaggctggagctctattgtctgaatccaggggcagaaagaactgagggctcttttacggcatccacctggaggctgcctgcaggcttgggttgctaagtgcactgcttaatttagaagcgccttttatcctggctctcttgaccagtcaaagttgtggtcgctgttttctacaaggactggggaaagaaagggtggaattaattaaacctggaggaagggactttgaagggcggagctaaggtcaaagaaagaaccctttaaataaagggcccacactggctgccagggagtgcgcaggactggcaagagggaagccgggctgctccacgcctttcacgccttccacctcctgcgtgtccatctgtgagaaggagccagagcccaagggagatgatggagcctgaggagtacagagagagaggtgagcaacgggcatccctggccctcttccctgctgctactcctgcaggaacggctgctggtgggtg

SEQ ID NO: 13877 - DNA, 2300 bp, Homo sapien
ttatgcattaatcaattaagtataattgtctcccaataagtataattgtctcccaacctagaaaacccagaatgattcagagagacaaagaactctaaggatatgtctctgcaaactgttcgtttcaccaaaggattcactgcagaattaattttctgtaaaatctgtacctcctataattttcaacatgttctatctttaaagataacatttacacaagtgttgatagcatatgtggaattcacgtgttacttgtgtaaatcattataaatatgtaatagaattaaatgttttaatcacttaagaatatcttcgaatgttcctgagtctccgagatcataggcagattatgcagtcttcatctgtgattttgtttagtcacctaaattccaacttttaaaaaagttagagcccagtaaaaaaagtatgggaatcaatcttattcagtcttgttaaaatgtgtcttgcataacagcttgatttgacttgtatggtgaaagcacggtaagaatgacacatttctgttttttggttttttttttaaaaaagtatgagtgtacagtggagtgttccagaggttacatggtgtgctaaccacaacagtctgacgtagatctgagaatcttctattaaaccaggcattaaaaagatttgcaaaaatgcaagatgtcactcttatcatctatgttaacatgtaatggatttattttttgtttttggaaaaaaaaaaccaagagaaaagaaaataaagtcatctttagtttccttaaattcaaagtctgagcctgaaaatggaagtatcaaagctgatggttatacgtcagtgagaaaaaaatttaaaccaagctgggtgggtctttacatgagataaactatctacaggaaagaatgaccactaacttctgcataataaatgagagtggatcttttaattctgagatggcaatgtactttacaaggaccatttacagactacatcaaacctttttctagataaaaaacgtacttcagtaacttgcctgaattgagagagcaaaacagtccggagagaaaacttaaaatgtttccacattatcaagcccccttcagaagtactgtggtctcggcccctcctttgaacagatgtccgctcgccacagtccaatcaggtttaaagcaagagtatttgtactgaaaacaagcttaaagtgggaagacacacacaaagcaggcctgtatcattcctttggtttcagttttcacgatgcacccttgaggctaggcacgctgattcaacacacttggagagcttcaccgaaacacactaaacacacagtgatgaactgtgccctggcagagatgacctggcaaaattctcaacttcttccctgaggcagtgcacccgcagttctcggcggcgaagtctttggggcagaagtcccgagccttcagaacggcaggcttctccccctcaggactccagtccccgcggccaaggctgtcgctgcgggggccccgcgcgggactggccaggctcttccattaaccctgtctggtccggccgatcccgccgcgacccgagcgcctctcggccccgcagcacagggcgcccaggacccgccaccctcgccgcccgttcccctctccggagagcccggcggggccgtcaggctgccgagacaaagggtaccgcggcgccagaggccgaggcccagccgcgcctgccttcctctttctcccgcccactgccaacctccagtcgcccgcagaacctccgctgcctcggcgcgaccccatcgccaccccggggctgccgctcgggaccggcaagccgggtagccgcgaggcggccgcggcatgctagggccgaggagggggcggcggccgccaccatgtctgcccgcccctcccagaagcagtgtgcccagcggacaaagcgcagcggcggcgcgggcgcccaggccgaccccgccgacccccgcggaataagcggggccaggagccccggaaacccggcgccttaatgcaataaacaggaaatcgcggggatgatctgggttccgggggaagtggaattattttttaccagcgaagagatcaacttccacatccggtggtaacagggccctacacagacccgcactgacctggaaaagcttcgggagcggcgacgggaaggcagcaggaggtggtgcggggacccgaggcgcctcgtacccggccgggctgacgcggccccgctacacacaaagcgcttcagctgcacagggcgctattttccgaaaatgccgcgtctggtcggcgcccaaaatccccaccga

SEQ ID NO: 13878 - DNA, 2300 bp, Homo sapien
actggctcacagcctactgtttactccaaactcttctgtttgcctcaaatttttgtgtaacagtgatctgtctaaaatgaattcaatcctatgattcttctacttaaaatctttcaatatcttcttcctggttctcagaagctgacttctgcacatagcattcaaggccttcacaagtagacctccagcattgtcttctttacccaacaatctctctagtgtttgcctccaaacatctgtacttactgcttctcatctagaaagtcttccataatacccttattaaagctaattgcttctctagtcccattccattttattcctccctcttggtttagtaaggggttcctcctttatttgattccacagtattaagtagcttcactctcatcatactgatgatgcctatttacttgtctacattctacagcctaagattaatgggggcaacgattctgtaacaattagctgaatgttcactcaaataaacaatgctcattcaaataatgctacagaaaaacatcagaatttggcaaatttctattaactgaagaaatgaaaatattaaatcaaaagaaaacacagcctatggttcctatgctttttttctattttaggcacaatgctttaataaattacacaaagactacaaacctttattacatcaattgttacaaaaggctaagtggagaaagattacttatctgaagctgcacaaaatcagtgggcaatatggatttcatttaagcttgtcaattctcctggattaaattcttggcgctgtctcacatattcccaagtcctacatgtaggatgctaaaagttgcagttactaggttgggaaagccatgcccagacgcccctgtgaaaaacatatcaatatattaagttccttagcaaatcacatctagattaagttcataatgctttttttttttttaactttgcaaatctccaaacttttgctactttcttaataaaatacaacaaaatttttggcattccagccacggaaaaacagatctctacctctgaggtggcagtaatccaagcagttactaggatctacgaaacatgaggcataattagaatgttggggaaaaaatctacagaaatatctatatcttcgtcatgaacctgactgttgagtttatgaaaaagtggaaaaggaacctcactcgttccttccctggtaccttcacagcgtctcccgtcccagtctgcctagttgaatctagggacacttaaaggtaaatcctagcctcttggctgtccttccgtctcccaggattctgctaggccgcacagttggcaagcttaaaactccaaagattccgcactctccgtctttcaacagtcatgtcacagagacacgaaggttagcacaggaacattagtttccaaactcctacccaccgcagaacaggcgggaaggttcggtggccacccggcctctccgccgcgcacatggccgtccgcagctcccacccccgctgccgcgcaggcgccgggcgagccgggacttgcggtcgccgagagcggatcattccgccgctttctttgtgtggctgaagcgctagaaatggcatattttctttcccttcgttaaaaaatcagaccctctttcccctctctccccgcgggaacacagctagggagtgggtaggagcaggatctgccgacgagggcagaggcggaaaatcctcgggcgatgagctgaagagggccgggtccgggagggatgctgggagcttgactcactcgcacaccatgtgtccctccgcgcgcagcacgggggacttttcggtggggattttgggcgccgaccagacgcggcattttcggaaaatagcgccctgtgcagctgaagcgctttgtgtgtagcggggccgcgtcagcccggccgggtacgaggcgcctcgggtccccgcaccacctcctgctgccttcccgtcgccgctcccgaagcttttccaggtcagtgcgggtctgtgtagggccctgttaccaccggatgtggaagttgatctcttcgctggtaaaaaataattccacttcccccggaacccagatcatccccgcgatttcctgtttattgcattaaggcgccgggtttccggggctcctggccccgcttattccgcgggggtcggcggggtcggcctgggcgcccgcgccgccgctgcgctttgtccgctgggcacactgcttctgggaggggcgggcagacatggtggcggccgccgccccctcctcggccctagcatgccgcggccgcctcgcggctacccggcttgccg

SEQ ID NO: 13879 - DNA, 2300 bp, Homo sapien
tacctatttcagtgtgtagaacagtaccaggcacagagtaggtgctcttccaacagtgttgaatgaatatctaattgcacactacacatatatgactggttggctcacatgcacttcaaattttacatggtcaaaacaaagacttcttccttccctaacatatattctcttattttgtttctaatctcagtgaagacattactatcctcctagctgctccaccaactcacttgggagtcacctgacatctatctccctcagtcattttcagttaaccaaatctcccaataaccactttattttcttcacacctacctgctaccaactcagtccaagtcattactggctcacagcctactgtttactccaaactcttctgtttgcctcaaatttttgtgtaacagtgatctgtctaaaatgaattcaatcctatgattcttctacttaaaatctttcaatatcttcttcctggttctcagaagctgacttctgcacatagcattcaaggccttcacaagtagacctccagcattgtcttctttacccaacaatctctctagtgtttgcctccaaacatctgtacttactgcttctcatctagaaagtcttccataatacccttattaaagctaattgcttctctagtcccattccattttattcctccctcttggtttagtaaggggttcctcctttatttgattccacagtattaagtagcttcactctcatcatactgatgatgcctatttacttgtctacattctacagcctaagattaatgggggcaacgattctgtaacaattagctgaatgttcactcaaataaacaatgctcattcaaataatgctacagaaaaacatcagaatttggcaaatttctattaactgaagaaatgaaaatattaaatcaaaagaaaacacagcctatggttcctatgctttttttctattttaggcacaatgctttaataaattacacaaagactacaaacctttattacatcaattgttacaaaaggctaagtggagaaagattacttatctgaagctgcacaaaatcagtgggcaatatggatttcatttaagcttgtcaattctcctggattaaattcttggcgctgtctcacatattcccaagtcctacatgtaggatgctaaaagttgcagttactaggttgggaaagccatgcccagacgcccctgtgaaaaacatatcaatatattaagttccttagcaaatcacatctagattaagttcataatgctttttttttttttaactttgcaaatctccaaacttttgctactttcttaataaaatacaacaaaatttttggcattccagccacggaaaaacagatctctacctctgaggtggcagtaatccaagcagttactaggatctacgaaacatgaggcataattagaatgttggggaaaaaatctacagaaatatctatatcttcgtcatgaacctgactgttgagtttatgaaaaagtggaaaaggaacctcactcgttccttccctggtaccttcacagcgtctcccgtcccagtctgcctagttgaatctagggacacttaaaggtaaatcctagcctcttggctgtccttccgtctcccaggattctgctaggccgcacagttggcaagcttaaaactccaaagattccgcactctccgtctttcaacagtcatgtcacagagacacgaaggttagcacaggaacattagtttccaaactcctacccaccgcagaacaggcgggaaggttcggtggccacccggcctctccgccgcgcacatggccgtccgcagctcccacccccgctgccgcgcaggcgccgggcgagccgggacttgcggtcgccgagagcggatcattccgccgctttctttgtgtggctgaagcgctagaaatggcatattttctttcccttcgttaaaaaatcagaccctctttcccctctctccccgcgggaacacagctagggagtgggtaggagcaggatctgccgacgagggcagaggcggaaaatcctcgggcgatgagctgaagagggccgggtccgggagggatgctgggagcttgactcactcgcacaccatgtgtccctccgcgcgcagcacgggggacttttcggtggggattttgggcgccgaccagacgcggcattttcggaaaatagcgccctgtgcagctgaagcgctttgtgtgtagcggggccgcgtcagcccggccgggtacgaggcgcctcgggtccccgcaccacctcctgctgccttcccgtcgccg

SEQ ID NO: 13880 - DNA, 2300 bp, Homo sapien
tctgttcctaagtagggtgctatggcttgagtttggtttgtctgaccctaccaagtctcatgttaaaatttcatccccagtgttggaggtgaggcctggtgggaagggttgtgggagtggatttctcatgagtggcttcgtattctgtaaggagtgagttcattaagagactggcacctcctctctcctttctctcgccatgtgatctctgcatatgtcatctcctgtctgccttccaccgtgagcagcctgaagccctcactggaagcagatactgctaccatgcttcttgtacagcctgcaaaaccgtgagccaaataagccgaacattctaagacactgggattacatgagtgttagcactctatgacttaatgagaagtaggttttttggagaaaaatgtactttcagtatgtatattatatatttcatggttatttttaaaactcgtgagcaatgctggatacacactaccaactattacttccctgactgagccaatttttctgtaaatgcatcacaaatgtgaaagataaggtaggcctgaattctggggaatgacaatggtgaaggaaaggcgagacaggtgcaaaagacactgcagaactcaggctcaaaatctcatccttaactccttccctcatcccaccatgttgaatcagatgtcaatagcaattttatatggcattttttaagcttgcaaaaagttataaacagaaaatgttcattttatcactccatcacagacgaaaaacatgaaattaagctaggaaacatgttcaggtgattagagtagatagaacatagactaaaaaccagtgaacttataaaaaaaaatcccatgatgtggacaaaaaaaaagaacttgtggctcctcactccaactcctgtgactctctcaccttacccccactgccttcaagttttttgtagaaagagaaattttgtatggattgagtttaagatgatgccagaatatcaaggtagaattattaaacacacaaaagctaaggtttggtactctgaaaaaaggtcagaattggtgatagaaaattagaagttacccatccatagaagggtaataaagccatgagagtgaaggaaaccagtgagagagaatattgagaaaagtactgaaggacagagaaggagaagcgaaggaggaaagcaaatcagcatttattgagcatctgttaaactgtatggcagctgctctacatttactatctcatttattcctttccatttccaaggtagccaattttagcctcacttgatagactggctttgtagactcaaaaagcagtaaaaagaaccagcattcaaaaccagcttgactccagtttattctgtgtactacaccattcctggagaggctaagtgtgtgttacagaagaccatggggagaatttagctcaagtaaagataagccctgggaaaagaccattggatttttgtgttttttgactaaggggttcccataacatagcagcacctgcactcctgtcttaacgcgtctgtgaatgtgggtaatccagacaaatgtaaacgcctgtcaataaggggggaaaaagtcaagatagtaaatgtaaaaattagtataatgaaaacaaaccagttattaaattctatctagatactcttgccaaccaagcacttcgaatctcaaggcttgaatgaagaatagctttttttttctctgagacacggtcttactctgttgcccaagctggcgtgcagtggcaagatctcagctcactgcagcctggatttcccatgctcaggtgattctcccacctcagcctccttagcagctagaactacaagcgcagccaccatgcctggctaattctgtgtatttctggtagagatggggttttgccatgttgcccaggctagtcttgaactcctgagctcaagcgagacacccaccttgacctcccaaagtgttgggattacagacattagccaccacgcctggcctgtaaacaggaataactttcttgctgtgtgattcaatgttatttactgctttgttcatgtactgcctatgttgattatcaccagtggtatggatcctgcacattgggaaacactgcagtgttatttaattttgttcactgtgtttacagtgcagttttagtcacctgaaattctaagagaaaagatcaatatggttttgccaatcaaaggtcattaatacttggaatgaaagataacttatcctggtgatgaacacatgccttttgaaaagcatcagtatctccttaaaatgtataaactactgtaatcaatgagg

SEQ ID NO: 13881 - DNA, 2300 bp, Homo sapien
aagctccacctctcgggttcacgccattctcctgcctcagcctcctgagtagctgggactacaggcgccctccaccacgcctggctaattttttgtatttttagcagagatggggtttcaccgtgttagccaggatggtctcgatctcctgacctcgtgatccgtccgccttggcctcccaaagtgctgggattacaggcatgaaccaccgcgcctggccacattttggactttcagtcatgttttctttccccaatgaaatagaaaagttttatttcaaagaggaaaagggtgcaacagctgcaacatacataaaacctatttagttttacttgggagtgggaatcaggaaacctgggttctgtttttgacttagtttggataaagaagggtagttaagctgtccttatgtctcttaccaaatggagaaaatactgctgtagttcacagcaatttggggagttttagattctatggaaaatggaaatcctatttgtaacttagattttttctttggagaaggagtctcgctctgttgcccaggctggagtgcagtggcacgatctcggctcactgcaacctccaccttccaggttcaagcgattcactgactcagcctcctcagtagctgggattacaggcacgcgccaccatgcccagctaatgtttgtatttttagtagagaccaggttttgccattttggccaggctggtctcaaactcctgacctcaagtgatctgcccaccttggcctcccaaagtgctgggattacaggcgtgagctaccgctcccggtctaatttttaaatttttgttttgtagagatgagggtctccctttgttgctcaagctggtctctgtctcttgggatcaagggatcctcctgcctcagcctcccaaagtgctgggattacaggcctgggccactgcaacctggccttcatcacaaattcattgaacacactttctttattttatccttttttatttttaaaaatttttatttcagtagttttggaggaacaggttgcatggaaaagttctttagtggtcatttctgagattttggtgcacccatcacccgagcagtgtacactgtaccatgtggcacacactttcacttaaagcatttactagacctcgctagccagatttcccatccctgagacacctggaatgttcctgaggacttagtgactactgcctaaagctccacccaagtcaattttatgtttacaggcaaccggagcatccaatcacctttctctaagagagtacaaagatcagctcgcgagaaagttcagacgtctcatttcgtttctattacacggggccttcgcccaaccagacggagtcttgctctgctgcccaggctggagtgcagtagcgcgatctcggctcattgcaaccttcgctccccgggtttaagcaattctcctgcctcagccactggagtagctaggattacaggcgcacgccaccacgccaagctaattttttgtattcttaatagagacgggggtttcaccatgttggccaggctggtctcgaactcctgacctcatcatttgcccgcctcggcctcccaaagcgctgggattacaggcgtgagccaccgtgcccagcctcgccggggccttttaagtgacgttaaaaattgtacataaaatatgttttaggataatacttgtttttctttgaccaaaggcttggcttcagagaatgtttagccagaaatagaggggcgttaaatccccttttttctaatttccaatctgaggaggaaaataacgtagtaaagggacgcaagagcaaccttgcttcttccacaacaaggcccaggcgccgccttgcaacccggaaatgcagggtgcagtgcggggggtaagggaccggccaactatgttgacccgactcagagaaaccccgcccttgccgccaccgcccacccataacgtcctcctcgaccctccctcgaccatccctcgccccgcggccctcaccgaaaaggggagggcggtggaagagagaggagtcaagggagcgcacgcgaagccccgcccctgccgtgacgtctggagacgcgacgcgtcgcctcgcaatgcaaatcgggaaaagggggtgagctgggctggcttccgtcctggtagccaaggctaattctccctcgagttcttgggagatgggcatttggcgagaaggctggcgttagtgaagcgcgcccggcgtcacggtgagtgcgggtcttgggccctagcacctgttctctgggaagtcgtccgctgtgaacgatgaacgcc

SEQ ID NO: 13882 - DNA, 2300 bp, Homo sapien
tacaggtgtgagccaccatgcccagccccaatgttccaagtcttttttttttaaatcaatatgtttttttaaatgtgtattttttgttacttgcttgtttaacccataacttcctaacttttacatctctctggatactctcttcatatttatgtatgttgcattgctttactcacgtttgcgttgttatgctcatattatttctttccttccttaaaactttaagtacatttcatatattcttttatatgttataaagcatgatactaaaatgatcacctgtgcacatactacccaatttgagaactagaaccttgctgtacccctgaagctccttatatgtatctccctgattacaactctccctctcccaagaaatataatgttgcgtttaacattttctgctttctttatagttttacctcatttatatctttaagcaatatattgttcaattcaatttgatttttaaactttatatagagtatcgtattacacatattcttggtttttcattcaacattgcgggggatgggcagaagatgatgaggtgagaaggcgggcagggtatgttttctggttaaactatttattcttggagaatcagagaccatatcttatatacccctttaataacctctgtttaacacgaggcctactgttgcaagctaagtctcctgatgatttgcactgacattgaaacattgctgttgtctctataagtatgaggaaacccaggggaaccctgtcatactctttcctcaatggatgcttttagcaagtttgatgaattgttgatgaattagatacctcgctagaaggacatatttgatatcagttgatccatttgggagtgatagtgtggtctagagaccttttctcccctatcactacagctttagacacaggacccagggtggatggtaaagtgtagaaaatgtttgtatattagatcgttgtttctaaatgcatagatctgaaagtacaaattaaagtgtttggttcaacatgtgtttatagatacctggagcaagtatagatagaaaaaaagtgaaaatgataaaaatgaaatactcagaacaaaatggtttggtgactaagacagtggactaatgtgcacagggttagaagggatgagtaccaataaatcacaaagtattaatatttaatataaaatgttactagaattaaagcaaattggggtgcttttggaattttcataggtgagcagcagccttcccatcccctgctccaagttgtactttacttagctttttaggattagatgttcattgatgtccatttgtttaatgatagtgaactggtagaatgaagattattaagagattggaaagaagtagccagacgtggtggcttacgcctgtaatcccagcactttgggaggccaaggcaggtggatcacttaaggccaggagtttgagaccagcctggccaatatgacgaaaccccgtatctactgaaaacacaaaaactagctgggggcatggtggcgaacgcctggaattccagctacttggaggcttaggtaggaggattgcttgagctcgggaggtgaaggttacagtaagccgagattgtgccattgcactacagccagggtgacagggtgagaccctatctcaaataaataaataaataagaggaagaagtcacttaaaaaataaatggatatcaatgagaaaagagaaatatttctagataaaaattccatctacttatgatctaaacattaatgctattttaacaaaagaaacatgtaaacgctttgattattcttactgctagttcctttgacaggtaagattcccaactcttaaggcaaaatgatacaaaaagtaattcatttggttaatgaaaatttgaaaaaaattattacattcttcactcatattctgcatatcttaaactcctgaaatagatattctaaacaatttaaaattaaccctgttagcaaaggatatggtttaggaatttttttttttaaactgctcacttgttttattgtgaatgaggaaaattagtataattatttgtatttgtttcaggaaagaagcacttgtaaggaaatatagcatccattgtgaaagtggaaaagtaaagataattcatcatgcctgctgtggcttcagttcctaaagaactctacctcagttcttcactaaaagaccttaataagaagacagaagttaaaccagagaaaataagcactaagaggtatgatgtatccttcgctagtttgattgaatcaaatattaatttttagttcgtttccatattaa

SEQ ID NO: 13883 - DNA, 2300 bp, Homo sapien
gtcaaataatttatacaatttatttgtttagatctaagattaactaaacataacacataacccattaaaaccatgttgtgtaagaatgatacaatggactttggggacttgggggcaagagataaaagactacaaatagggtgcagtgtatactgctcaggtgatgggtgcactaaaatctcacaaatcaccactaaagaacttactaatggccgggtgcggtggttcacacctgtaatcccaacactttgggaggctgaagtgggaggatcatttgagttcaggagttcgagaccagcctggccaacatgatgaaattctgtctcaacaaaaagtagccgggtgtggtggcgtgtgcctgtagtcccagctacttgggaggctgaggcaggagaaccgcttgaacccaggaggcagaggttgcagtgagcctagatcacgctactgcactccagcctgggcaacagagcaagactccatctggggaaaaaaaaaaaacaacttattaatgtaaccaaatatcacctgtaccccaataacctatggaaaaataaaaacagaaaaaaacacgttttattaaagttcttctaagaacgaaaaataaaatttcttaagatgtgtaagccttacaaaaattaagaacttaagccttagtcaaacagcagtgctccaaaagtgaaacccaaaggagctgaaaatgagttaacaataagagaaaatgaagagagagagagagagagagacacacacacatgccttctcttcttctgacatccttctgttccttttaaagagaaagagtagggattagatgactggaaccacaaagtgaagactaaaaaatagaaagtgaaaattgaggtttgcagttactcccactggtcctgacattctaagcagggcttcacaccagctacagccaaggtctttggcaacattgaaaggaaaactaaagtgtctttgttggccacccaccatcttgccccatctctgcccttcaggaagcaagggtactcaatatatcttctggctgtcttaaatctcatactgtatgatccactctacactcattctgtgtaaaatgccacagacaactaagtattgatgaaatagcattttaaagtaattctcacgcattaagaaggctcaataaaacttactgtatttgctgagcaactactatgtctctagcactgtgctaaatgcttgagggcagtgtttttaaaatccctaaggtcataatcagtataagtataagcctaggtgtggtggcacaagcctgcagacccagctacttgtgagagtgaggcaagagaatcatttgtgccaagggttcaagaacagcctcggcaatgtagtgaaaccccatctctaaactttttttaaatgacatttgcaaacattttctcccaatatgtggcttatcttttcgttttcttgatggagtttcttgaagcacagaagtttttgtggaagtccattctgtcatatttttcacatgtggattgtgctgttggtattgtatctaaggaacattttttctgacccaaagtcctaaagtaatgaagatgttttcttcttaaggtttcagttttggtgcttagatctatgatccatttcaagttaatttttatatacagtgtggtaaggatctaaatccatctttttgcatgtggatatttagttgtgccatttgccttcattttgacagaatttttttccagcacacatattctatttattacatgtttgtattcaacagaatttgtcaccaggcaggagtacagtggcatgatcatagctcacctgaccacctgggctcaagccttgaccacttgcctcaagcgatcctcccacctcggcttcctgagtagctaggaccacaggtgcatgccatcacatcaaggttggctttttttttttttttttttttttttttttggagatggagtctcgctctgccacccaggcgggagtgcagtgacacaaactcagctcactgcaacctccgcctcccaggttcaagcaattctcctgccacagtctcccaagtagctggaattataggtgcataccaccatggctggctaatttttggatttttttttttttagtagagatggggtttcaccatgttgcccaggctggtctcgaactcctgacctcaggtgatccacctgcctcggcctcccaaagcgctgggattacaggcgtgagccactgtgcccggccaaacctggctaattttaaaaatttttttatagagacggggtctgtgttgcccaggccgatctcaaaac

SEQ ID NO: 13884 - DNA, 2300 bp, Homo sapien
tatacttctggcttcgtcccttttggaatcctcttagcttatgactgatagggctatgaggagatgatttaagtctgtgtaccacttctaatctttacttacttttttgggaggaggggggcaataggtggaagtataaataaatgatttttttcccatttattatacacttgtatttgctaaggaattttaattaggctcttttaagcctaatcctaagtaagttgaacacatcctaagaaagttgaaattttttcttcctgagaacttaccctgccaggtgcagacttattcgaaggagcttttaaaaattctattaatcttgttatagattttagagttcattataataactagtgagatttaatttcttcttgaatcattcttaagtgtgttaatttgataatgttttaaggactgtatgctgtttgtgtatttttttatatattgaacagaaaaagcacacgagtacatgcacctgagtacaggtaaagaggagctgattgaaatatagtttaatctgttctcagtattacttttaggggtggaagaacgttaaggattaattaaaaaagaaaaaagacctatcagttaagattttccttatgcttcagcagttctagtagttccacatataaatcaaacacaccatattacagaagtctagaaggcattctctgccccagcactgtccagcagatctttccatggtgatagaaatgtactgtatctgtgctgtccagtatggtttgtgtctactttgaaacgtgattagtgcaactaaggaattttttttttttgagacggaatctcaccctgttgcccaggctgaagtgcagtggcatgatctcagttcactgcaacgtctgcctcctcaagcgattctcctgcctcagcctcctgagtagctgggactatagacgtccactatcatgcccagctactttttgtatttttagtagagacggggtttcaccatgttggccaggctggtctcaaactcctgacctcaggtgatctgcccacctcggcctcccaaagtggtgggattatagacagccattgagcccagctggaactgtatttttttactgtgattgtgtatccatccgtgaatagtcaacacactctagaatttaagtaatagtacccaaataacctctgcttcccttgatatctactccacggtatggttttttttgtttttgtttttatttttttattattcctcatttggcattctgggtgagttcaaacatttgataatgccaaacttccagggatcatttaaaggagtttaaaagagccttctctactagagctcctagttcatgagaagtgagataatctatctcaaggtgtctctaagaaccatgacccacattaagaggttaaaggtatgtgtttcatgggaaggtctgagaccttagtcgtatgactaatgttaacctaaatattaaatgtcctggaaggcccagcatcttatgagttaacatattaactgtttacaagatgcctgtggtacaggtgctacagtttgctgccatttatagtatagaaccttaatttcatatgctcagcattttaagacatcttgtatcctttttcttcctcaggccaacatgttatcctaaagctgagatctcaaggctttctgcttctcagattcggaacctcaatcctgtttttggaggttctggaccagctcttactggacttcgtaacttaggaaatacttgttatatgaactcaatattgcagtgcctatgtaacgctccacatttggctgattatttcaaccgaaactgttatcaggatgatattaacaggtaaatacatgtcatactttttgcattataatgctaaaaggatgatctaaccatatttactgtcttagtccattagttttctgctgctataacaaaatacctaagactagataatttgtaaagaacaaaaatttattttctcttagttcttgactgggaaggccatcgtctaggtgccggcatctggtgcgcttttttgctgcatcctcacagggtagaaggtggaagcgaaagaggacagactcgtcctgtcgagccctaaacggcacctaatcctgttcacccgggaggggagccctcatggccttatcacctctttaaaggccccatctcttaatcctgtcacattggcaacacctgaattttggaatatttgacgtgaatctggtggtaacctatgaataagtaagcattttggtgtagggctacagtatgtgaataatttcatgttgacatcaagaacccatttta

SEQ ID NO: 13885 - DNA, 2300 bp, Homo sapien
gcatagacaagtgaacaatgacagcacagagtgtggtgagtgctacctacagtgtgttgtgacaggacacaggaaagcccctaacctggtcaatcagagaaaccctgttggaggaaatgacattctggaggtactttaagactaaaggtatcaacaagcttttatataagaaacattgttgatacatggaaaacaggatatttatttgatatccccatgtaaagcaaatgcttatgaaaagtaggcctaagttagtcaacagacaactttccaaattaacttataaaactttttaaaaacatactaacaatcctgaaatcctgaaagaatatttaataaaggtatctttaaaaaagaaatttctaattctttctaatctacataggcctaattataaaacagaatttatattgagttttactgataaaaggttttttttttttttttttttaagacggagtcttgttctgtcccctaggctggagtgcagtggcgagatctcagctcactgtaaactccgcctccagggttcacgccattctcctgcctcagcctcctgagtagcggggactacaggtgcccaccaccacgcccggctaattttttgtatttttagtagagatggggtttcaccgtgttatccaggatggtctcgatctcctgacctcgtgatccgcccacctcggcctcccaaagtgctgggagtacaaggtatgagccactgcgcccggccgagttttactgataaaatgtttgtaagggtaaagaccagaaatttacatctctatatccataaaaacagcatttttatccaataaatcattttctctctacttcttaaacttacctgtaatgtacatttacttgtggatgctagtggtagagacaaatacatgaaggcctcaaatgtcctagactttttgtgacatgtgaggcactgtactgtagatttgaattgaccctgaaaaagtgcaacaataatagactcattgagctgcttgtgtttctgccaggcatgttctgcagctttaaagtcatcgagatgatcattattttcttctttatatctcttccgattatcagcctggaaataaaatgatttaagctctatattaatatctcaaagaaaacatttaaattgaaagaataaaagtgaatacaaacacttgccagatttagaaacacctgtagttctcataaaggagttctgatctcactgagtgtggcaaaaaataattctagccaaaaataccaaaaaaaactcactcactttattgaaggaatgtgacttgttgaaatttcccaaatttttatttaaaaagctgaaaagggccagatgtggtggttcatgcttgtaatcccagcattctgggaagccaaggcaggaggactgcttggggccaggagttcgagaccaacttgtgcaacatagtgagacccccccctccaatctctactaaaaaaagaaaaagctaaaaagtttggtttttagaaaagatatcccacatatagctgggaattagggctacaactggacatatataattttgttgccctagcctctctctctctatatatgtatatatgtatgtgtatatatatgtgtatatatgtatgtatatatacacgtatatatgtatatatgtatgtgtatatatatgtgtatatatgtatgtatatatacacgtatatatatatacacaaatatttttgtgtaggtgtgtgtgtatatatatatatatctgttcagtggttaagaatggtgaccccaaaatatgtgagacaaaaagtgctaaaaagaagttgtagtatgtaaatggagggtggtcatttatgtatacatacatgcctttataataactagtcacatgagtcatttggttacatggagtaattttttttttttttttttttagaaagagtctcactctgtcgcccaggctggagtgcagtggtcactgcaatctcggctcactgcaacttctgcctcccaggttcaagcgattctcctgcttcagccacctgagtagctgggattacaggcacatgccactacacccagccaatttttgtatttttagtagagacgaggttttgccatgttggccaggctgggctcaaactcctgacctcaggtgatccaccagccttggcctcccaaagtactgggattacaggcataagccactgtgcccagccaagtaattcttattttagaaggatgtgtaagaataaaggcatgttccactttcagcaagggactgggaaaaagaaaagaataaggatatgtacaataacat

SEQ ID NO: 13886 - DNA, 2300 bp, Homo sapien
ttatccaaagctttctctctgagttaagcaattagctatctccacttctattcactattttactatgttcacaatttttcactattttcactattttactggcagtcctcactagtaaagaagaagtaagactcagaaaaaaattaaactgattttgttgcagacaacttgaatgtgtttataaaaaatccaaagaacctatgtaaaaattagacttaagtaagtcaagttaggccatactcaggggctcacatctgtaatcctagcactttgggagggtgaggtgggaggattgcttgagcccatgagttcgagaccagcctgggcaacatagcgagaccctgtctctatttaaataaaaattaaaaaattaaagagtaagtcaggttagaaaggttcctggatagacaaccaacatatgacaaataattgtatttttacctaccagcatcaaacacaaaatgaaacttttaaaagaccctattgattaggagaaaatgaaggacttgggagagcctcactgacaaatagagcaagtttacaggatttaagtcctgcagaaccaccactgaggtgacttggagagatacctctgtaaatacatcgcaaatatcaaatacctgcaagagaggacagctctacttgccaggattccttatccaggtgtcaaagaatgaatattctaaatatcttcgtgtagcctgagcatatatgtgggttttttttaaccatttagacataagttggggtgcatactatggattcctcaacaccttgctttttttgacttaccagtcatatatctggagagaaatccattttagcaaaaaatatgtgtaatatattctttctttttaattttttttttctttttttgagaccgagtcttcgctttgttgcccaggctggagtgcagtggcgcgatctcggctcacggcaagctccgcctcccgggttcacgtcattcttctgcctcagtttcccgagtagctgggactacaggcgcccgccaccacgcccagttaattgtatttttagtagagatggggtttcaccgtgttagccaggatggtctctgtctcctgacctcgtgatcctcccgcctcagcctcccaaagtgctgggattacaggcgtgagccgatgcgcccggcctctttttaattttttaaacttgcagaagagttgcaagaatagtgctctttagtgggccttcactcggaatcaccaactgctggcgtgtgggtgcactggctttatagtatgtgctttatcagtccccttccttcctgtcctcctgtccctgtgtgcttcctgaaccgtttgaaaataggttgcatatatcatgcccctgtgccccgaaaaacttcagtgtgtattttctaagaacaagggcatccccttgcataaacacagtacaatcttatcaaattcagaagattcaacattaatagaaaaaactatctgcatattatccatattcaaatttcatcaatcgttcccataatgttcttttatggcaattttttttttctgatccggtattcagtccggatagatctagctcctgaatagaagtggaaatcctcgctccccggggtgaggaaattccctcagggctcctaggtgtggtgtagtcgctgggaagggggaatgagtgcccagagcaggcagggttgccgtagtgtccactaactcagtggcggtaaatttttgtgcacatgttaagtgtgtgtgtgtgtatgtgtaatatatatatacacaagagaaactgagtgatggaagaaggaagagaggttatatgtgtagttcattctctggagcctaatctttctaaaacatttcagacaacccagtaacagtgtctcatggcaacatgatagaatcttgaaggtgaatggaaaggattatgatgtacggaaaatccaagttggagtggtgcctgatacaggtgaaaatcagttcgcagctactggaagagagaggagcatatcaattgtttaaaacaaaaagccagcgttaacaggctcagagaaatgaagttgaaaggaatagatgtagctcctgaatagaagcaaaagtccaacgtggttccattaaaatgacttctcagccgtctctccctgcagatgacttcgatatctaccacgtcctgtgagccttgatctactacagctttctagattagcccagtggtgggaaagtcaagctcagaggagtcaggggacacacactgcattcaggagggttctcccaggtgtgacccatggaaggtccccggaaaggaaggaagattgtacc

SEQ ID NO: 13887 - DNA, 2300 bp, Homo sapien
cttaacaatttgatattccctgtttctgtagcttcacctcctgcagttatccctgtactcttgcccattaatttgtagtcttagctgcatattcaaatcatttgtagagaatcatttctatgatgacacatacctacagaattagaatattttggagtgacatctgggtggatgtatgtccaaaaagcactataggtcaatcttcccccttctcttactctgagatagctttgacgtcttctcaaccaaaaggcattaggtactcctatatagtcgtacagtatgtgcacacatgtatgtgtatatacacatttttaaagtatatttttatacagtattaaaactgttggctaacttccttttcctgcaagacagtaggtttctttttatttgtgttctagaaacttagcacatagcagatttgacttgtctttgtcttcttgcaacatttaaaggtcaattccacacacacacacaaaaagatgggggaagggcttttgatgggtatgtttcacattccagaagttcatcttctcatggtagacctgctaaaatatttacatggctacagtccccaacccccaaacatcagaatcaaagagagatttttctttctgaatgggaggtatgggaggagtgagtttatggcaggagttaggatagtgtgcagcataatgtgctcttcacttgtaggtgtctaaatgcacagctgtcactaatctggcataatgaaatagggtaatatagcacagtggacatattttatccctaatttttctgtttttgtgaggaacagttacactatggaaattcaaaatgattttatgagattatccgggttaaaatttttgctgtactagtactttttaaatggtctcgtttgtttatttgccattctaggtctcacttctccatttaagccagctatggatacaaattactattattcaggtcagtaatattaaaaacaaaatttaatagcattttggacctttacagatttaattatttctctctcatttttatgcagctgtggaaagaaataacttgatgaggttatcacagagcattccatttacacctgtgcctccaagaggtaaatccaaaaattaaagaaataaataagtgaaaattaaccctttaatgatttttagctataatatagaatgtgggtgggattacattaagaagtatcaatttcaaataaattcttgattaatctgactaccacaagggtgaggtatgtttgaatagaagaagggaagcatcagaaatattgagtttctccattactggcatattcagaagcaacaatatattctaattctaaaaagttcttgatccactatctagtaatttatataaactgacatcacagtgtccatgaaacagctctaacttctaagtttaattcagaagtgtgtagaattttagttgcttttttaaaggttttctctaaaatgccagaatttcaaaaatgcctaacattacacatgaattcaaagatattatgaaagtatccttgatttcttacctattgctattaaatttctttgtataaaactacatcttggtccattttatcttctgttccttaatcaaagatgcctgctaatttttattttactttgtcgtttttaaaaagtcacaatttaatcttaaactttttccatttgtgttgcaggggagcctgtcacagtgtatcgtttggaagagagttcacccaacatactaaataacagcatgtcttcttggtcacaactaggcctctgtgccaaaatagagtttttaagcaaagaggagatgggaggaggtttacgaagagctgtcaaagtacagtgtacctggtcagaacatgatatcctcaaatcagggcatctttatattatcaaatcttttcttccagaggtggttaatacatggtcaagtatttacaaagaagatacagttctgcatctctgtctgagagtaagtgtcagtgaatatttaatagtggaacataatttaagctttatattttaacttctgaaatatcaataagccaaatataatcttagtttaaatattaaacaagggttctccccaccctcccttttataggaaattcaacaacagagagcagcacaaaagcttacgtttgcctttaatcaaatgaaacccaaatccataccatattctccaaggtaaatctttaatttttttctgggatcttttattatatggatagcagtcccttttgaccttcatttttgatgttgaatatttaattatccattttgtagatcaattagaattttatt

SEQ ID NO: 13888 - DNA, 2300 bp, Homo sapien
actagaaatactcaaacctacctgtattgcagcatcctcatatttcagttttaggccgtatctgttgaccttccactaaagaagacaagaattgaactctcttttctcactctgtattcccagaacgaacatacacacacacacctgttcacccttttccaccaagtatagttacagttttggttaaatcaacactctaggttctctggtatttaaccagatttcttcatgatattcagaatataatgtattctgtcagtttcatcatattgaaaacattttgcccagagtcttctaatatatctcagtctggtctttttgtcctctacacctggaatacaaattttgttctgagattttcctttcttcattctgaggttatcctttgttgtactgtaaaattgtaagctttctctaagttgatttgtaacttaatgacctgactttttttggaagtaggcttaattctaaagttcatttcggataaataagatatgacaacaaaggtattatcataaattggggaaaaggattattcattgcggcactgtttatcataggaagagattggaaacagatcaaatttccatcagtaggagtttgtttaaatacattaatgtgtatccaatatgaaataaagagagcatcgaaagataattgggaaatcttctctgttctgtagaaaatctctaagctggctaggcgcagtggctcacacctgtaatcccagtactttgggaggttgaggcgggtggatcacctgaggtcaggagtttgagaccagcctgaacaacaaggagaaacccagtctctactgaaaacaaaattagccgggcatggtggcacatgcctgtaatgccagctactagggaggctgaggcaggagaatcgcttgaactcaggaggcagaggttgtggtgagctgagattgtgccactgctctccagcctgggcaacaagagtgaaactctgtctcaaaaaaaaaaaaacaaaactctaagcttaaagtttaaaataacaaaaccctccagacatatatgtttctctaccatttatgttaaatattggcgggggtatgtgtatacacatacaaatatcccaggaagaatatgcaagaaatgaattacctttactgtccccagtcagggtgattgggaacaggagggggagaaatttttttttacttcatactctcatttattgttgccttttcacaataaattgaatagtttactcaaaataaattgaataatttatgggcctcatgtaactcttgtgttcagcgtgttgaggaaaggttgagttatcttatgaaggttatactgtgcctagaatactttgtgtttggttagttggtattcataaaacttcagttgtgtagcttttttatattttttaattttcttttagcagaaaaaatcagtagaaggccatctaccgaagacactcatgaagtagattccaaagcagctttaataccggtttgtagatttcaactaaacagatatatattattaaatacattaaacttttttagataagatctacaaagtggtgatatttgggactatatcaaaaattcaaaaaaatttttcttaagaaaactgactttagcatagtagcagttacagaaaagtttcttacagtgaatagtcaggaattttaaagaaaaatttatgcagaataaaggcaggaatctctttttgtttgaattgaagctaattatatgaactcatttccagctaactgcgataatgattgattttgcaaattccctttaaaagcacacactgacaagacaaaaagctcaggaaaaggcagaaaaattactcctttataatcaagtattatatataagtcagtgctcataattttgctcaagaaaatattgacttacattcaaaatatatctgttctggcatagagagattatgttgttaaaatcatgttattgaaaaaagttatttcagtggggaaagaggttagttaacaaagagattcacagtaacaaatcctcctttctggagggactcttcctgaccctgagctgcacaactttgcaacaaattaaagcctaaccgaagatgacctcacaatggcaatttagaactcatgggagtcaacttacataaacggtatttgatttctgataagatagtggaattattggttatagatgacaaaataagtatgtttaaagtgatgatggacataaaaaagttttaaatataaaacatgagaaaagaaggagatactattcaaaaagactggcaaatttgaaaaactagaaataaaaaaaa

SEQ ID NO: 13889 - DNA, 2300 bp, Homo sapien
tatcatatggttgatccaggaattttaccctctttagtgctcgtcaggttaaaccctgcctcgaagggtaaatataacacctaaatatactttcttttctggaatagagttgtaaaacagatagcacccacatttctcacaacatctttttgtgtttgaacactcttaagctggggttcctatgtctccttgcccagatgcttttgctggaatctgtgaaacagatttgtacataatcgaaacttactttaagtaaataaataaccagaaacactcatgaatagcagttactgatgaattactatttttaagttgtttttgtttttttctttttttctctctaaagtgtgtgcaaatgattctgttatccctcaaatctgtggtcctgggacgtggttgactccatttcttcaagcagtctacctctttgtacagtatatcattatggttaatcttcttattgcatttttcaagtaagaattttgttcaattgtttgttataagatgatttaatatgcaattctacatattttgaaggaaatttatagaacttaaaatctaaaaattttattgaggcttaaactactaaaattatatttgaaaaattacaaataggagatgctttttctaatcaaatgagttctaaattttaagtttgattatctttcaacctgcagttttctttataaatttaatcgttatctgggatttttcctcggttgccaacaaatacgcattcaatatagaaaattcatcagtaattccactgttaatatttgggtgtacacctttctatcattttttttgcaaatatatgtaaaccatttttcttttcagaaatagtatttttatttaatttatttatttttgagacacagtctccctctgtcacccaggttggagtggcacaatcttggctcactgcaaccttagttttcagggttcaagggattctcatgcctcagcctcttgagtagctgggattacaggtgtgcaccacaacgcctggctgattttttttgtatttttagtagagatgaggtttcaccatgttggccgggctggactcaaactcctggcctcatgtgatccatccacttcagcttccccaagtgctgggattacaggcatgagccacagtgcctagcctatttttatattttatgtactgttttataactaagcaaagcatcatgaacattatttcagataaacaaatattcttctccagtctatttttaatggctacctgatactccatgatatagaccataatttttcaatctagtatgttgtattggtcaattagattgtaattcttgctcctaaacaccacattgtagttaaatctgtgagcaatacttgcttgtttagaatgtttttctaaaagcagggctgttcagtatatgtacttttagggcttttgcacttaagtctaaataggcctgtttcctcaactcggcccacactgagtattttttttttaatggttgccaatttgatagtaaataaaattattttattttattttttgagacagcctgttgcccaggctggagtgcagtggcactatcacagctcactgtagcctcttccatctgggctcaagtagtccctcctgtctcacctccagagtagctgggactataggcatacaccatcacgcctggctaacttttttgtttttaaatagacagggtctcactatggtgcccaggctcgtcttgaactccaggcctcaagcactcctcctgcctcttggccttccaaagtgctaagattatagacatgaaccaccatgcccagccaggattttgttttttaaaatttgcacttacttgattactaataagtctgagtattttcttatgtcttacccatttacatacaatattttaaatttttttaaattatttttttctgctgaatgttagtctttgccttatacttactgcctgtatcttttctagtttctcatttgctattagttttgtttacagaaggatattttttgaattattatttagtacagaattacaatgaaatcatcagtatttaaaactttaagagatgattaacaaagtttattttatttttattcattatttctctagcaatgtgtatttacaagtgaaggcaatttccaatattgtatggaagtaccagcgttatcattttattatggcttatcatgagaaaccagttctgcctcctccacttatcattcttagccatatagtttctctgttttgctgcatatgtaagagaagaaagaaagataagacttccgatggaccaag

SEQ ID NO: 13890 - DNA, 2300 bp, Homo sapien
cccttttattctactaaagtgaaatttcataagtaattacataaattaagaatatatgtataatgccctaattgtaataagacagaaaaaatgatttataataaaaaataaatatttcagtatataaatgttcaagagtggcaatataaaacacataataagtcagatgcctgcagttataataagaatcagtgtaaatgctgcagttatacatactaatacaagtatgttgttggtaacttaaatatcctggggaacagataaacaccctttgcaagtgtaggacaaagaaagaccaagtgggcactagaataatgttagaatattactgttagagtaagtaataacattaggattatttgtatgtgataagagaaagaaggaaataatcttaagtaaaatagtacgatgccatgataaactacagcctaataatgtagagaaaactaataagtattattttcttggagatcaggccttatttttaagcaagtgaaaaatattttccttgttgtgacagaactgagtattgaaaaatgtcacagaaaacatacctttcatctttaaattccatcatgtaaaaggcatacatttcatcagtatatacttaaaataggactgggtgtggtggctcatgcctctaattccagtactgtgggaggctgagttaggaagatcacttgaggccaggagtttgagacctgtccctattttaaaaataaagaaaaagaaaaaaggcaggtacaggggtcaggggtacacacctgtagttcttagctacgtgggaggctgaggtgggaacatcccttgaacccctgagtttgaggctgcagtgagctatgattgtgccactgggtgacagaatgagaccccgtctcaaaaaaacagaaagtatatacttaaaatatcatgaagactatatccttgctaggtgatgtaaatcgaagatagattggagaaagaaatggtaatacaagttgctctagagaagttgtgtagttgtgtgttaaacctctgaagatagaataagattgaaaaataatgggtaaaaaaaccagtggttttgtattgatttttgccacagagatgtttttaataatgtggtactaaaatacttaaaatacacagaaatatacaaaatattaaaaaatatacagactatattaaaacaacctttattaataaaactcagtgaaatacctatatttcatgtccctactaatttaccaatatttgatttcaagtctgttgaagtttataaaataggctttaatatataaaggacagctacaaatgctgaatgatacagatgtgttatattaagcacaaaggacataagttgtattgctgtcaagtgatttcttttccataatgatgaatgatttcttttaaagttctgaagactaagtacaatcttgcctgacttatctgatggttgtatttttggaaaattcactgtagaacaaaaactatgatgaaatactttgtgttcatttgtaaggcagaattactggtttttcagtcataaacatctaacaggataataaaaagttgtgtgggatgcgggatagtttctttctgagtagaattctccagcatattgcatgatttctgatgtcccttgaccctacccattaaatgttagtaacagcactcaattattgaaataatccttcccacaaaaccttccctaaacactgagagcattgctttaaggtattctttcccaagatttaattgatgatggattctgttttttcccccatgtaacacttattctcctacagaagtagtgtttgtggaatattctttaagaaacgttgttctagagaggtcttttaatctattccctaaacacctaaagtcttattagctttttactgtgttgcatctttctaattttgttctaaaactgttgggaacaaattaaatgtaaatcctaaggacttaacatttaaaagtgtttgtataattagaatatgtgaaatatgtatttattaaatttgatactcctaggttggatccttggaacaagctatgcttgatgctcttgtaatggatagagttgcatttgtaaaacttcttattgaaaatggagtaagcatgcataaattccttaccattccgagactggaagaactttacaacactgtaagtctacattaaaattctttattgactacattttatcttttgggaaatgttactttacctgaatatagccattcctattgataaaacccttaatgtcttccttagttatatgaaaaaattatagccagtcttagtatggattggtt

SEQ ID NO: 13891 - DNA, 2300 bp, Homo sapien
caatacatattttttgaatgaataaattcattctccagaattgattgctgattgaaagtcagcatctgtgaatttcaaggctggttgatcacttgaaaattaaggaatttattttgattagttcaattaaggataaatcctgttccccatttcttttctttttctttttttttttttttttttgagacgaagtcctgctcttgtcccccaggctggagtgagatggcgcgatctcggctcactgcaacctctgcctcctgggttcaagcgattcttctgcctcggccccccgagtagctgtgattacaggcgcctgccaccatgcccagctaatttttgtatttttagtagagacggggtttcaccgtgttggccaggctggtctagaactcctgacctcaggtgatccacccgcctcggcctcccaaagtgctgggattacaagcatgagccaccgcgcccacccaatcctgttccccatttctaactctaaattttccaatttaccaaagagttctggcaagtgccaaggagctcatcttgtttcatttctacaccatccaactaaggagcgaagcattcgtgagtacaaaaagaccagagttacaaagttctaacgaaacaaagcactctaatctcattttattttgattttccagtttgtctgcctctaccttctagattataaactccctacaggcaggaaatgtgtaggcccaactgaaatccagaagataaacatttattgactgcatgcataaattagtcaagatgccttccccaaggctgacaatttagtgtgacacatatattaaaacatttttaagtcttggttctgctggacctgccagatggggaagaaatacacaatacctgaagattgttcacaagctgggggaaccagtgggtggattagttttttttctgagagaagatcctacttcagtgaattgtgggtcataatgtttgagaggcaataattatgctgaatgaaagaagttagacggaaaaaaaaggtgcgtgctgtatgattcccgtatataaaactttagcatgtgcaaacttatctgtactgaaagtagatctgtagttgataagggacgtgatggagagggacgagatgaagggattatgaaggggggggaggaaacttagaggtgaatacgttcatttgattatggtgatttcatgggtgcacaggtatgtcaaaacttatcaaattggacatttaaatacgtgcagtttgtcatgtcaattattttaaaataaagtcgtttttaaaaaagagataagacagtcagatccctgagggtcagattgaggaactctcgaagacttcaggagcagaaagatgttaaagcagttttaagaaaattaaactgattgtggtcttcccagtagataaggaataacatttagtaaaccattgctaatagccaaaccttggcatgtgtgacagcaaaataaatggaaaggtggataggtacatattacatcaagggaacaacccagtttttggtgcagaaggtgtggtgtatgcgtgtatgtgggtgagtatctctggagggaaaaagacagtcccatagttaaacaaagaagaatatttaccggcagcaacaggagaggctagagaaagaacatgattggggtaaaaagatgattctgcattttggacgaggagagagtaacatttaaagcctctactcgctctgaagcacacagagtgtgttgcgacactcgagtttgctggagcgagtcggcacaggccaggcctagttagcggaatgagcccacacagcaactccagactggatccgcaagccttgaaccttaaccctcaacctccgattccccaagttccactctcgtagctgaggctgaagtttgtctaagtcccgcctaggtacccaacggagatacggcgtgaacaccccaccactttctgggaacccagaggcggtcggcgtggcggcgcgaacctgcccagcgcgtgcgcgcggcgcgcagggaggcggcctggaatcgagggagcgcgcgcccttcacgtgacccgacccgcgggcggcgacgcacgcgccgcgccgcgccgctcacgtggtccgtccccagccccgtcgccggcggaggcgggcgcgggcgcgtccctgtggccagtcacccggaggagttggtcgcacaattatgaaagactcggcttctgctgctagcgccggagctgagttagttctgagaaggtttccctgggcgttccttgtccggcggcctctgctgccgcctccggagacgcttcccgatagatg

SEQ ID NO: 13892 - DNA, 2300 bp, Homo sapien
taaattgcagattctactaaggaattgctaatctaaaaaaaaatctacaagtgccaggcacggtggctcatgcctgtaatcccagcactttaggaggctgaggcgggcggatcacctcaggttgggagttcgagaccagcctgatcaacatggagaaaccccgtctctactaaaaatactatattagccgggtgtggtggcacatgcctataatcccagctactcaggaggctgagtcaggagaattgcttgaacccgggagtcggagattgcagtgagctgatatcatgccattgcactccagcctgggcaaaaagagcgaaactctgtctcaaaaaaaaaaaaaaaaaaaaatctacaagctagaagaaaatataatgtattagaatatcaaggtctttccccacaagcctcacatttatttttgctaaactaaactgagacaaaagtaatctacattacaatttgagatagtgatttctgttgataagccacaaaaatgttcaaagggattttctaacttttttttttttgcatcaagaattaataaatacagtgtatcattattttaaagacatgtttagggaaaaaaccagcttctcttccccttaaagttattggtggtgggagggcaagagaggaagagatggcagctttttaagtgaaattttaatcttatctatcttttgttcattttgagtccccaaataaaatatttctgtactttaatttcttaatcactattgtcagcttggttgctacacatttaattacaatataaagttgacattgaggatgaagaaacttaattatactttttcttatttctatttaaccaataagattttaatagcaaattagaacaagattttacctccttaataactaatggttagataaagtagaatttgtatcaagtaactcggatttcagatttctggatgtaccagttactatgctactgaggagatacatctagttgatgaagttaaaatattaattactactccagttatatgaaaccaaattattttgagaaattatcttattttgccaggcgcggtggctcatgcctgcaatcccagcacttggggagtctgaggcgggcagatcatgaggtcaggagctcaagaccagcctgaccaacaaggtgaaaccccgtctctactaaaaatacaaaaattagccaggtgtggtggcacgcacctgtaatcccgtctacttgggaggctgaggcaggaaaattgcttgaaccaggaggcagaggttgtagtgagccaagatcttgctactgcactccagcctgggtgacagagggagactccatttccaaaaaaaaaaaaaagaaattaattatctcatttcgatgtagtaaaaaaaaaattttctttaacattcttcataaaatgtgattaaggctattaaatataaagcttggatgagggtgcagataattttacaaaacagctgtattttggcaaatattttattattataaatgaaaatacagagttttaaaacggcacttaatctgttctctctctcagagtctgccaaataaatcagatttcttggaaaatattcaaacttgatacaatggaggcaaaattaactcttgtcaggtaagtcatttgccataaacgaaaggacccataactgcattaagcagagagggactgactgtcaatgaagcttctctatttgcaatttattcagcaaaagcgaacaatttttaaaaagtctctaatgcaaaatttagttcaagtatcaaaggtctgatcaattttaaaaggcattagttttatttttaataaattgaactggccttagatgaaagatatagttctgttcacatattttatacattatttacagagaaatgaaaaatcctgctgcctttgttatcacttgtcatttgcgaaattcttactaaaataaaagaaaatggaaagataatttgacctctgacttccaggagaatgttcaggccacatctaaaatttaccaaagaatggggaaaaaacttttttcaagttggaaggtaccagagtgattagctggtctaacctactcattttacagattagaaaactgagatatggccgggcgcggtggctcacgcctgtaatcccagcactttgggaggccgaggcgggcggatcacgaggtcaggagatcgagaccatcccggctaaaacggtgaaaccccgtctctactaaaactacaaaaaatagccgggcgtagtggcgggcgcctgtagtcctagctacttgggaggctgaggcaggagaatggcgtg

SEQ ID NO: 13893 - DNA, 2300 bp, Homo sapien
cacgcacctgtaatcccgtctacttgggaggctgaggcaggaaaattgcttgaaccaggaggcagaggttgtagtgagccaagatcttgctactgcactccagcctgggtgacagagggagactccatttccaaaaaaaaaaaaaagaaattaattatctcatttcgatgtagtaaaaaaaaaattttctttaacattcttcataaaatgtgattaaggctattaaatataaagcttggatgagggtgcagataattttacaaaacagctgtattttggcaaatattttattattataaatgaaaatacagagttttaaaacggcacttaatctgttctctctctcagagtctgccaaataaatcagatttcttggaaaatattcaaacttgatacaatggaggcaaaattaactcttgtcaggtaagtcatttgccataaacgaaaggacccataactgcattaagcagagagggactgactgtcaatgaagcttctctatttgcaatttattcagcaaaagcgaacaatttttaaaaagtctctaatgcaaaatttagttcaagtatcaaaggtctgatcaattttaaaaggcattagttttatttttaataaattgaactggccttagatgaaagatatagttctgttcacatattttatacattatttacagagaaatgaaaaatcctgctgcctttgttatcacttgtcatttgcgaaattcttactaaaataaaagaaaatggaaagataatttgacctctgacttccaggagaatgttcaggccacatctaaaatttaccaaagaatggggaaaaaacttttttcaagttggaaggtaccagagtgattagctggtctaacctactcattttacagattagaaaactgagatatggccgggcgcggtggctcacgcctgtaatcccagcactttgggaggccgaggcgggcggatcacgaggtcaggagatcgagaccatcccggctaaaacggtgaaaccccgtctctactaaaactacaaaaaatagccgggcgtagtggcgggcgcctgtagtcctagctacttgggaggctgaggcaggagaatggcgtgaacccgggaggcggagcttgcagtgagccgagatcccgccactgcactccagcctgggcgacagagcgagactccgtctcaaaaaaaaaaaaaaaaaaaaaaagaaaactgagatacaaggtcttgagatgcggcaaattactcaactcttccttgtattgtaattaaactgagactaacaccaagtctcttgctgttgttgccaattcttttctctgaaccgcactttgtacatcctccaccaagattaagaatcattacctatgggaaaaggggtgggcatcaggaagaaaaaaagataacgggtgggagtgggggaatgtgggataatgttaggaatgctgtattcaacgatgagccatatgtattaatacataatttcttaagaaaaataatttttttaaaaaatcaaaccttaacattaacagaaccaaattgcaaagatcagaaataccaaagtgaaactgaatgttagtactgaaatttaagctacatttaaaaaaaaaaggctgtcaaaccaatgaaaactagatttcagtgtctgtctccttttagtgactagttctatatattatgtttctctatatctggaaaaatgttcttaatataatacacgtgcagtctgaagtaatttcagttctcaagtttatgaaaggattgggtttaaaaaaatactacaaaaatatgcacttatatttccaaaattatgtatttctaacctctgcagtgatataaggtccaaattttcaccgttgaaccgccttcttgcatggtgttaaacagttatttctacagagcagatataatttgcataaatctttttttttgggatggagtctcactctgtcgcccaggctggagtgcagtggcgtgatcttggctcactgcaagctccacttcccgggttcacgccattctcctgtctcagccttcccagtagctgggactacaggcaccctccaccacgcccagctaatttttggtatttttagtagagaggggtttcaccgtgttagccaggatggtctcgatctcctgacctcgtgatccgcccgccttggcctcccaaagtgttgggattacaggcgtgagccaccgcgcctggccaatttgcataattctttacagtaaaacccattcagaaatagtaactacttgtatctaccatcagagctgaaagaaacagatttcgttaaaaa

SEQ ID NO: 13894 - DNA, 2300 bp, Homo sapien
atagtgtcctggaataagtgtcaggaatatcttccttttgttctggagttctcactgccatgaagggcagtattcatattgggaaatggagataacggaagatccagagaacacaaattggctttgagtcatgtgattaggcttcctgagaggttcagtgtcaccctgactatctccttagaagtgtggatgttgaaccagaacagtgctccagaaggagtgctcagtttcatagagcaatctgtgttttttagaaaaagaatccttttgctaatgtagtgaatattgggggcaagttgaaattttgcatttcctaacgtcttttatttatgcctagatgatggaccatttggattgtgcaacaaatgaagaaaaccctgtgatatctggtgaacagattgtccagcaataatattatgtggaactgctataatgtgtcattgattttctacaaatagacttcgactttttaaattgacttttgaattgacaatctgaaagagtcttcaatgatatgcttgcaaaaatatatttttatgagctggtactgacagttacatcataaataactaaaacgctttgcttttaatgttaaagttgtgccttcacattaaataaaacatatggtctgtgtagtttccgagatgtactatatacagtatatttttctaaaaaaaaatgccttgacccacccctatacttttttttaacgaaatctgtttctttcagctctgatggtagatacaagtagttactatttctgaatgggttttactgtaaagaattatgcaaattggccaggcgcggtggctcacgcctgtaatcccaacactttgggaggccaaggcgggcggatcacgaggtcaggagatcgagaccatcctggctaacacggtgaaacccctctctactaaaaataccaaaaattagctgggcgtggtggagggtgcctgtagtcccagctactgggaaggctgagacaggagaatggcgtgaacccgggaagtggagcttgcagtgagccaagatcacgccactgcactccagcctgggcgacagagtgagactccatcccaaaaaaaaagatttatgcaaattatatctgctctgtagaaataactgtttaacaccatgcaagaaggcggttcaacggtgaaaatttggaccttatatcactgcagaggttagaaatacataattttggaaatataagtgcatatttttgtagtatttttttaaacccaatcctttcataaacttgagaactgaaattacttcagactgcacgtgtattatattaagaacatttttccagatatagagaaacataatatatagaactagtcactaaaaggagacagacactgaaatctagttttcattggtttgacagccttttttttttaaatgtagcttaaatttcagtactaacattcagtttcactttggtatttctgatctttgcaatttggttctgttaatgttaaggtttgattttttaaaaaaattatttttcttaagaaattatgtattaatacatatggctcatcgttgaatacagcattcctaacattatcccacattcccccactcccacccgttatctttttttcttcctgatgcccaccccttttcccataggtaatgattcttaatcttggtggaggatgtacaaagtgcggttcagagaaaagaattggcaacaacagcaagagacttggtgttagtctcagtttaattacaatacaaggaagagttgagtaatttgccgcatctcaagaccttgtatctcagttttctttttttttttttttttttttttgagacggagtctcgctctgtcgcccaggctggagtgcagtggcgggatctcggctcactgcaagctccgcctcccgggttcacgccattctcctgcctcagcctcccaagtagctaggactacaggcgcccgccactacgcccggctattttttgtagttttagtagagacggggtttcaccgttttagccgggatggtctcgatctcctgacctcgtgatccgcccgcctcggcctcccaaagtgctgggattacaggcgtgagccaccgcgcccggccatatctcagttttctaatctgtaaaatgagtaggttagaccagctaatcactctggtaccttccaacttgaaaaaagttttttccccattctttggtaaattttagatgtggcctgaacattctcctggaagtcagaggtcaaattatctttccattttcttttattttagtaagaatttcgcaaatgacaagtgata

SEQ ID NO: 13895 - DNA, 2300 bp, Homo sapien
agagagaaagagagagagagtgcagaaacaatcaaaatgtccatcaaactttgaatgggtgaatacattacgttatatttacacaatggaatactgttcaccaataagtaagccatataccacatgcagaggcgtgaatgaatctcaaacgtaatgccaagtgaaagtagtcagatacaaaagagaacatacttgccgggcatggtggctcatacctgtaatcccagcacttttggaggcttgaggtgggcagatcacctgtggtcaggagttcgagaccaccctgaccaacatggagaagcctcgtctctacttaaaaatacagaattagccgggcatggtggcatgcgcctgtaatcccagctactcaggaggctgaggcaagagaatcacttgaacccaaggcagaggttgcagtgagctgagatcacactattgcactccagcctggggaataagagtgcaactccgtctcaaaaaaacaaaaaaagaaaagagagagagagaatatactctatgatatataaagtacaaaaaggagcacagtctatactttttaaaaagttttatttttaattattatgggaacataatgactatatatatttacgggatacatgtggtgttttgatacaggcattcaatgtgaatgatcacatcagagtaatagtggtatccatcacctcaagcctttgtcatttctttgtgttgggaacattccaatttcactcttttagttatttttacaatatacaataagttattaactgtatcaccttattgtgctaccaaacactagatcttatttattttatttagctatatttttgcacccattaaccatcttcactttatcacccccactctctacctttttttagcctctggtaaccatcattctactatctccatgagttccattttttatttttattttcttaattttagctcccacgatgagtgagaacatgcaatatttgtctttccgtgcttggcttatttcacttaacatgatgtcttcagttccatccatgtctttgcaaatgacaagacttcattattttttatggctgaataatattccattgtgtgtatttgtaaaattatatatatatgagtgtgtataatatttcctttatccactggtggacacttaggttgattccatatcttggctatggcgaatagtgctgcaataaacatgagagttcaggtatctctttgatatactgagttcctttcttttgcatgtatatccaatggcgggattgctggatcatatggtaattctgtttttagtttttttgaggaatttccatactgttcttcatagtggctgtggtaatttacattcccaccaacagtgtacaaggtttccccttttcccacatccttgccagcattctgggatgagatgatatctcattgtagttttgatttacatttctctaattgcaatcagatttcatctgattggagatgttgagcattttttcatatatctgttggttatttttatgtctttggagaaatgtctattcagatattttgcccaatttttaattggattacttttttttttctattgagttgtttgagctccttacatattctggttattaattgcttgtcagatgggtagtttgcagatattttctttcattctgtgggttgtttcttcactttcttgatttttcctttgccatgcaaaaccttttagcttgatgtgattccatttgtccatttttgctttcgttgtctgtgcttttcaagtcttactcaagaaatctttgccaagaccaatgtcctggagcatttccccaatgttttcatcaagtagcatcatagtttcaggtcttagatttaagtctttaatccactttgatttgatatttgtatttttttaagtgaaaaaagcaaagtgcaaaaaaatatatagagtatgctgtcttttatgcaagaaagagggggatataagaaaatatacagatatctgttcatttgtaggaagataaccagaaaaaatatatacttaggtttatattaatggtttattaataaaattattgaggactgaaaggatttaatggcctaaaatttgggaaacaaagctcatacagctttatgcagcttcaggtaggataatcaatggataattacttatgtcaatttctgatggagtaagttgcatagctcttgttttctttatgttcaagctatttggatctgtgttaacactggtattttgttaacagctgttttctagagcgagacgtgttaatgcacttatgtctgatata

SEQ ID NO: 13896 - DNA, 2300 bp, Homo sapien
aacatttgccaagcattctttctttttccttccttacgggtttagaaaaagatttgctcagaggacgagagaaggatttgtattgagccaagttttaaggaaattgtgatgtgaactcttaatctattgtgatgtgtattctaaatatttttggatatttcttcattttatactctcctctccccccaggtacaatagttattctttccaatcacttcttacctcttggcttttctttccaggtagtgggaaatgagacaacgcttttctttttctgtactttaaattctggattggtctttttgaataggcagttgcagaattttgaaaacatgagcaagaataatttacttcaagttccagctggttctcttccaaagatagcacttagaaatgataatgtactttttttctttgtaccctagttcctagtagaatatggaacgtaagacagattgatggattttgagtacatgttgttttatagaatataaacaatggccaggtgcggtggttcacacctataatcccagcagtttgggaggtcaggaattcgagaccagcctgaccaacatggtgaaaccctgtctctaccaaaaatacaaaaattagctgggcatggtaacacgcgcctgtagtaccaactacttgggaggctgaggcaggagaattgcttgaacccaggaggtggaggttgcagtgagccaagattgtgctactgcactccagtctaggtgacagagcaagactctgtgtcaaaaagaaaataatataaacaatgaagtaataattcataggagattggaaaggaaagtttccagctgtcaagtattgaaattacatcatagcaagaattctccctggggtacggcccttataacaagagtcataattgttactcccttaagaaagtgacctatcttccttaaagaaggtgtgctgggcaattgtgtatagttttaatattcctaaccatcctttttatttcctcaaacaagaagaaacaaattcatggaagaccatccctctcaaggaaatgtgatcaaccctgcatataaatagctttattaaaatccttagttgttggcaagccataacattgcaagtttgaaagttattgtttgtctcctagacagccgctcaggaagcaatcttgcatgcgtctggaaatggcacaaccaaggactactgcatgctttataacccttattggacagctcttccaagtaccctagaaaatgcagtaagtaaatcacagttactattcataaacataaaaatagtgaagaaggaggctgggcacggtggctcatgcctgtaatcccagcactttgggaggccaaggcgggcggatcatgaggtcaggagatcaagaccatcctggctaacacggtgaaaccccttctctactaaaaatacaaaaattagctgggtgtggtggcaggcgcctgtagtcccagctactcaggaggctgaggcaggagaattgtgtgaacccaggaggcagagcttgcagtgagctgagatcatgccactgcactccagcctgggcaacagggtgagacttcgtctctgaaaaaaaaaaatagtgaagaaggctgtgtacaatggctgatacctgtaaccctagcactttgggatgtcaagatgggaggatcatttgagaccaagtggtcaagaccaatctggtcagcatagtgacaccctgtctctatttaaaaagaaaaaagaaaaaatattgaagaagtgagaatgactgataattatgttttattgtgtgaaccattgtcatgtacggttgttaataaataattattgatttttctcaagtatttttctctctgggaaaatagggaattttaaaatacttaattctaagcctaaatatttctaattcaaaagatattgtcttaaaccaatattgataaccaaaggcagtatttataactgaatgcatttaggatgaaatagatttttaacatgttaaaaagacatttcttattttcagacttccattagtttgatgaatctgacttccacaccactatgcaacctttctgatattcctcctgttggcataaagagcaaagcagttgtggttccatggggaagctgccattttcttgaaaaagccagaattgcacagaaaggaggtgctgaagcaatgttagttgtcaataacagtgtcctagtaagttataaaaacaatcatatcttattttgagttcatgatgtgaaatttcacaaaaatggaattaacgtctttgtgtgtggtttagaggctgagttttgaatgatct

SEQ ID NO: 13897 - DNA, 2300 bp, Homo sapien
ccctgccagccaccatagagagctttctaaaacagaaagtgtatgtcattgccctatttattattcatttgttctctacccctggcaggacaaagcccaaagtcacaaacagtcccaatgtatttatgattttgcctctggcctcttctcacatgtcatctttcaccactcataacttcagccaagcccaagttttgcagttccttcaatgccacctttggctttgacactaatggctcactcttcctggaagtgccccccttcttctaccctttgcctggctaaaattaactcacccagactcagctcaggctggtatttttcctggcaccccttttataactccttttgatacttccataacatcttgtgcaaacaagagtcactactcaccctgaactgtgtttgctcacacatctgtgtccctcgttaaactatgagctgtggggtggcaggcacactgtcctattcagcatttgatattaaatattcatccaacaaatatctgaggacctactatatgccaaatactgtagatgtaaagggtatagcagtcaacaaagcaaagacaccccttgctatgaagtgggaggtggcataaataaatgaacctatacatagaatgaaaagtgctgtgcagataattaaaataaacaataatatgaaagtgactggacaggccgggtgcggtggctcatgcctgtaatcccaacactttgggaggccaaagcgggtggatcacctgaggtcgagagtttgagaccagcctgaccaacatggtgaaaccccgtctctactaaaaatacaaaattagccgggtgtggtggcacgcgcctgtaatcccagctactggggaggctgaggcaggagaattgcttgaacctgggaggcggaggttgcagtgtgccgagattgcaccatcgcactccggcctgggcaagaaaagcgaaactccgtctcaaaaaaaaaaaaaaaaaaaaaagagaaaggaaaagaaaagaaagtgactggacaggtactttagattgggtatgtcaggaagtcccgtctggggaagcgacattgaagctgataagtgaatgtcaacaaggcaggcattctgagctttggagagaagagcactccagcagggaggactaccagagcaaagtccgggcggcccaccagagcaaaggccgggagggccaaaggtccgtgcgccttaaagtgtgggaaagtagtgaagatggggagacaggaaggcaggggccagatttacctttgcaggctagagtagagttttgatttttttttttttttttttttggagaccgagtctcgctctgtcgcccaggttggagtgcagtggcacaatctcggctcactgcaacctccgcctacccggttcaagcgattctactgcctccgcctcccgagtagctgggacgacaggtgcgtgccaccacgcccagctaattttttgtatttttagtacagacttggttccaccatgttggccaggatggtctcgatttcttgaccttgtgatccgcccacctcggccatccaaatgctggtattacaggtgtgagccatcacacccggccaagtttttattttattccaagtgtgatagagagagacatgatctgacttatatgttttgaaagatggctctgggactgttatgtggctactgggctgtccggaggggaaactgagacccgtttggaggagagggaagttggtggcctggatagagtggtggcagcagttctggagaaagtggatggatctgggttatgtggtgagtcagagtggccaggaacaaatgacaggcagatgaattagggtgacccttagatttctggctgcatgcaacactcgggtagttactggggaaccgagcagacgctcagacacttccgagccttgagaaatccgttctcccgccaggcttcggtgtgagttaaagtcgggcagccggaaagcgacaggctcagacccgcagccggtggcctcgtagcgccgggacgccgggacgcctggataccgggagagcgctgggactctccgagcccggcgcgggggtttccgcatcttacgggcggggccggaagaggaagtcgcgctgctgtggcggccgctgtagcagcggcggtccagtcgtagcccggccgcccgcgcctgtccggtccggtccggccacggaggcagcgcagcggcgggactccgagcctaccccgccgagtgagctgcgccgcaccgtgccgtcccacccggcacccaccagtccgatggggccgcagcggcggctgtcc

SEQ ID NO: 13898 - DNA, 2300 bp, Homo sapien
gaattgcttgaacccagggggaggaggctgcagtgaacccagattgtgccactgcattccagtctgggtgatagagcgagactctgaaaaaaaaaaaattaaatgaataaatgagtatcccttttagataaagtttaaatattttaaaatgttctcaatatattaaaaaatattcttgcgagacaagccaacaaattgaacttttttcttatgttcccatataggtattaaaacaacttcaggatttcaaaaaaactcatttattaggtgacaaggaggttacagagattagagcaggtataaccgaagatagcttgtaagtgtagctgtagctggtgggccggttgaggttctggacttcgcggtgcaaaataattttgaagtccaaagtaaaagcaagcaaaagagtttattgcaaagcgaaagtacaccctcacagctgatcagagcgggctgctcaaaggtgagacagcatgcactgacactggggaaactccctttgtaggagtctcacaggatcattcatgaagcggggagaacgggtgctgctattaagcacgttctctggttttctgtcgccatgtgcgctgtggttgtatatgctagtacatacactgcatgtcttattagtatcttaaatcttcacccaggagtggtgttttttttttttttttttttttactattataatgagtataattcagcccaacgacactgatcatgggtttctgcgcttgtgagagtttggggattttcccttctgctctcgtacctctttgctgcaaaattttctaaccaggagcctcggatgtggtttgtacactatgggctggtttgttctatttatttagcaagtttgttccccttgaagggaggctatcaccacctacctaacctacctcctagaaacacactaggagtactgagagcaaattgcattaatctctgaaaacgcacgtatttatgccctaaacctactaccttagaaaattctagaaaacacaaggatactccaggatacattttaccagctagtcaatcgtcatctagccgcttgaaaactctgtacatttccaacagaatgagggtaaaaacggcaaataacacgtaagaaacgttatcaatgttgttttgactttgtgaattccctagaagggtctcagcgaccctgaggtcaccagaccacatttcgagagccattgtaccagactctgttctagataaaagacggagcaatcggaatgaataaaatactctctctatggggagctgtttacgtagtggcaactgcgacctgttctaaagtggaacagaaccgagcgctgtgagagggtgggacttggagacctatccttgcccgccgggccaggggagtgggctctagaaggatgacctttcaactgcgacctgctgaggaggagtcggcaagggtggccgccgaccagttctctttcccgcccacctccccaaatcccaggagaagaggggcggacgggaagcgacagtggccgcgagtccccggcacgcgacgggctctcaacctggcacgccgaatcctcaggacagccccgctatcacgcaactactcgggtgtcccaagagtcgccagggccggagccgcgcgcggcgccggggacccgcgtgaaaccgcctgtgggaagcgggcgggtggcgcgcgctccggggacagtgagaggcggcggacggcgcggggacgtcccgaaaaaggcgcagccaggaagacgcaactcctgacgcggtctcgggctacgcggaggcggctagtgggaaagggggactctgggagacagtgcctaacagggccaggcccccgacggcttcctcaggaggactcacggttctgggggattccggaaccgctaccccgtcgcgagaaaggaggtctacttacgcgcgcaatctcgagcgagcggccttttccacccccgcggtctcttgcgccctctggtggcctctcgcgagaacgacgctgaacttgttcaggtgggacgccaataaagatttcttattcaaaaaacaggaagtgcctacggaggccgggccggcagcggcggccgggcatgaagccgggcggctacgggatcgcgggcggcggcggcatcgcgggcggcggcggcgatgagcgacatagtggagaagacgctgacggcgctgccgggactctttctgcagaaccagcccggtggtgggcccgcggccgccaaggcgtccttctcctcgaggctgggcagccttgtccgcggcatcacagccctcacctccaagcacgtaggtgcccg

SEQ ID NO: 13899 - DNA, 2300 bp, Homo sapien
tgggcgacagagtgagactccatctcaaaaacaaaacaaaacaagacaagcccacaagtaatgattctggaatgtgaagcaggttctctccggatagcatcaacttattagagctgccaaaaaaatattttttttaaaccttcagagcactttcttttctgtctttccttctcttttagcacttctattgcattgtagtcatgcttatacttgtcttaagcccaaaacgaatgactaattccttgggaaaagggaatgtgtttaattctattttcctgtgtctaacacataaccttgttccataaacatctgttgaacaaataatgacattaacacgtgctctttttaagatataaactccttgtagctgtgaatcggtatactacacaatccgtgcaaccatcgagcgcctgtgggggcccggcgcggtggctcatgcctgtaatcccagcactttgggaggccgaagtgagcgaacacttgaggtcagttcaagaccagcctgcccaacatggtgaaatcctgtctctactaaaaatacaaaaattagccgggcgtagtggcatacgcctataatcccagctacttgggaggctgaggcaggagaatcgcttgaacccgggaggcagacgctccagtgagccaagatcgcaccatcgcactccagcctgggcgacagagcgagactccgtcattaaaaatttaaaaattttaaggccgggcagggtagctcacgcacgtaatcccaacactttgggacgccaaggcgggcggatcgcgaggtcaggagatcgagaccatcctcgctaacacggtgaaaccccgtctctacgaaaagtacaaaaaattagccaggcagtggcgggcacttgtagtcccagctactcgggaagctgaggcaggagaatggcgtgaacccggaaggcggagcttgtagtgagcccagatcgcgccactgcactccagcctgcgcgacagagcgagactccgtctcaaaaaaaaacaaaaattaaaatttttaaaaccttaaggctccagcgagccgagatcgagatcgcaccattgcactccagcctgggcgacagagagagactccgtcaataaaaatttaaaaattttaaaagtttaagaatttttataactgctcattttcaaagcccacttgaggcagagacttagcaaattttacattttgagagaactgtgctttttctttgcccaacacgttgttgtaacccaagaacctcaagctccccaaagatattcaacaagaggctcacaggatctcttcaggtatgcgacatctgaactgttgttcagttgaaggcaccgggggagagaaggaaactgagtagggaaaaaaaactttgtggaaggtaaataatgtctgacacttccatcgcactaggtattttcacacgcttgacatctcacccaatcctcaaaacaaacaaaaaacctatgaattatgtatcagtacttttccaccacaacgttgagaaaacacacggaggctcagaggttacagagatgtgcccccgatcaaagagtcagtgtcagaactaactgtggaaactcggcttccctgctgtcagtcccagcaggaaagtgaagcttccaggcagacgaaaggacgaaccgacacagcagcccctgagccccgccggagggctaaccccagaggccctgaagtctcgccgcccggccagggcctcctggcgcgggggcctcactccgatgtccctgagctcccgggccggcgggcacctacgtgcttggaggtgagggctgtgatgccgcggacaaggctgcccagcctcgaggagaaggacgccttggcggccgcgggcccaccaccgggctggttctgcagaaagagtcccggcagcgccgtcagcgtcttctccactatgtcgctcatcgccgccgccgcccgcgatgccgccgccgcccgcgatcccgtagccgcccggcttcatgcccggccgccgctgccggcccggcctccgtaggcacttcctgttttttgaataagaaatctttattggcgtcccacctgaacaagttcagcgtcgttctcgcgagaggccaccagagggcgcaagagaccgcgggggtggaaaaggccgctcgctcgagattgcgcgcgtaagtagacctcctttctcgcgacggggtagcggttccggaatcccccagaaccgtgagtcctcctgaggaagccgtcgggggcctggccctgttaggcactgtctcccagagtccccctttcccactagccgcctccgcgtagcccgaga

SEQ ID NO: 13900 - DNA, 2300 bp, Homo sapien
cctcccgagtagcagtgattacaggcatgcaccaccacacctggctaattttgtgtttttagtcgagacagagtttctccatgttggtcaggctggtctcaaactcccgacctcaggtgatccacccgcctcagtttcccaaagtgctgggattacaggcgtgagccaccgtgcccggcccccacttttttcttttcattaaaaaatgcaactctaaaatattttgtttttctaaatgggatccattcaatctaaaaattagtgttctttccagttatcaaacattcactgtgtgccaggcattgggtaatagctttcatactcattatttcatttatttacaaacaccctatgaaggagacaccaacacttgaggaaaccgagagaggtttagccatttgcccaagataacacatccactgtggggctcttttgaccatttcatcaatatccatccaacttgtatcactagagtccatgagcttggccatcctttgttttctgaaaacacaaagtagagtggtatttgcactctgttaagcccacacttcactaaagacggcagccttcaggtagaccagaagccaaaactcacttatgacactgtaccatagcagtcaggagcagatctggacatcagacctgatttcaagtcccagttcacccacctactggacgacctgagaccacagggacatcatctgctgtctctgagacttttcccatctgtaaaatgggaatgaaaataagttgaattctatgaacttgccaactttcaaccatattctacttccaaaaagtattttcaaatggtgcaacctaaattcttcactgggtcattgtacagattagatgaggacacaaagggaaatgttcagtaagtggcgctttttagcagactttttcttcttgattttcttttgctctggccaataatttgcattctctgggcagactttacaagcagagaacccagcttgaggctttgtgagtgtaggagcctataatagggaggcaataagagcatatagataaccaagaattaacaacaacaaaaaaggcctcggtgctccgtgcatttcccccctcgtttgggctcttaattagtaaataggtttacaaatgcttttttttttcctttcataaaggatggtgttacggaagtttagcactctgtgtttaatcccatcaacaaagaaaagcttttaaaattaattctggcccctctagtcgagggcgcgaaatagcacggctgcttgattggcagggtggctccaaccttccaggcgagccagtgttcagactcaccgagcccccggaacccgcttcaccaccgcttgccccacctgccctgccctcgctggcagaagactcaaacagccggagttagcattacctgcctgtgtgtttacttcgtcactaggtgccaggcccagcgctcggtcccgcacacgccttgtcttactactttccacaacagtccaactgtcatctccccccaccccgcccccttcccttattccccgctcccttcccttattccccgctccccttcccttattccccgccccccttccctcatcttcctagtgagaaaacaaacacaggtctcgtccaaggtctctgagcggaggagttggactcgaaccctggcaaccccataagtcggaacactcggaacctctcctttcctgcgcgagttgaagctctttttcacctagtaattttacaaacttggcctcaccctagggaaggggctcggccttgcagaccagcacaacctcgccgcgcgaggcaagtccaagggctccgacgcagggcgcgggtagggaggcgcggcgccgcccccgggatatttaaccccagcctggagcccgccgggcgccggacgctcgggctcctcggcgctcgcgcctcccctccctcctcccggctgtctcccggagcgccccaccctccgccctgcgctcgcctcgcgcgcaggcaccggccggcgggcgcggggagcggggcgcggcggcgctcgcctctgcggagccgccccctggccgctgccgccgcgcaccgcccagcccgcgccgcccgcgccgcccgggctccagccgccccgctgtccgccctgagtgcgccgcggctgcccgagcgccccgcagacgggcgggtggccgtggacgcccagccagcagcccgcagcatggattcggattccggggagcagagcgagggcgagcccgtgaccgccgcaggtacctaggggccgcgacggcccaggcgggtgggctggggctggggaggacggg

SEQ ID NO: 13901 - DNA, 2300 bp, Homo sapien
tatacagcacacttgagagccactgtgactgtaaactaaatggctcaacagaatctgggtcctcaaatatattagcatgctcaggctgccatcacaaaataccacaggctaggtggcttaaacaacaaaaactaattttctcaccattctggagccggaaagtctaagattagggtgccagtatgattggtttctggtgaggctttacctttgggtagcagatgggcaccttctggctgtgtactcagctgacctttcttgtgagcaaagagagtgagagagttcttgtgtctcttcttataagggcattaatcccattataagggtcccaccctcgtgacttcatctaaccctaattacctcccaaaggcctgctcttcaaatactatcacatagaagctaggcctctacatgtgagtttggaatggacacgaatatccaggcataacatcatggttacagacatgtcagcattcagtggaaaatggcatcaatccctgaatatttccaaatatctggagtctttaatcaagtggacaacttacccatacacatgaatttttcactttctgtcaacttagtcttatagctaaaattcaagccagagactatgacatggatataaatagacccagagaatcattatatataatttggaaagggtgtcactggcatacatctgtaagcagttcaggaacactttcaagctgtgtttacatgatatcaaacatctggatgaaaactgaaaaaaaaataatcaatttggattggaaacaaagcagaagtataaatttcagtgcactgcactagcctttggaatactgaatgcagagctgatccccttaccccaggaatgagataatggtgctcaagaaaggacactgaaatgaccaagaaggaaagggggcttctgtgggaaggcagattaaaaaaaaaaaaaaaaaaaaaaaaaaaaaaaactaactccattatgcaacaggagatgaaaagggacaacatcaaagactgaaaaacgtaaagaaaatgaatcttaaagcaccaaactgctagaactgggagctttgaggcttaacggcaaagaatttttttcaactaaaaatccaataaatcctggtcgtcagggaaaggggcattcggaaactcaagattctagatagccaacaaatcattcctttaagtatcacaacctatgttcacttttcatatagaaccttttctcaaatatcgtacttattcctggggcctcttaaaaagaatacactccacccagatcacaatactccagccctcagtgtgtagagaaactatgccacatatccttgtgtcccaatggtccttgttaaagggctccaggaccccaaaatactttagttgtttgtattttttcagagttctgctattttctctttccatcatttcttggcttttcgttcttgcagcatgccttaggataagtttcttcagaagctgaccctgagttaaggacttgagagctagttgtttgggaggcgatcccaggaagtaccaggaagcccatccaggtgcattcctgagaggttatttatttaacccctgtggacagctgggcttcaatcctgccggaacttctataagactatgcagaagtgtcccacacaaggggcaggaacctagatttcatctccaaatcttgcccatcgttctctaagaaccactccccttaacacccaggaactgtcaaaagccttcagctgtttgcagtaggaagtcatcaggtgagtaagaggtaaagtgggtgtggacaggagcacctctctaccctgccctcctattcccatacctgatagaattttggggtaaagaaagaaaactagactatgagtgagagcctgcaggactctctcctgagtaaaagataccttttctgatagcttaggggtctttactttctgatttctccctggttcttgatcatattttttaaaggtgctattattcaactggcagttaaaaaaatttttttggtcattcagaaagtccaatctaattaatttttgaagcaaagtaagagtccactaaatggcaggtagtgttaggtaaactccctagagatgaaaactgacttgctagtcttacctcaagtaatgggaaacgaccagacctcctaaagagtcagtgtgcaagttagggctactgtcccaagaaggacacctgagtccaaatggggaaaccacggcaaaacccaagcacactggtttccacactctgtgaggcagagccaaaggggaaactgtgggtcaacggatatgcagggacccaag

SEQ ID NO: 13902 - DNA, 2300 bp, Homo sapien
actgttctgtgacctttaaaatttgttgtcaaagcattagaaactcttaccataggttataagtgtgtaggggaacaaacaaacaaaaatagtaaaatattttaggacacagtaatttgaaacattagaaacaatgcaacattttaagtgttttctttctttgtgaaaataaacttactaacaggttttttaaaagtgcttgccttcttctctttgcataacttacgatactgagggaacatcttttctatgccagtgaattgccatagtcctttataaatttgcatcagcttgcaacatcttatctctttgctttcagtgttgtgaaatacctctggaagttcctataatgtgaagttttttgctgggatcacttcctgtgggacatcttcatcctttttgttgcaaccactttcctcatttatgctttgaacaatggtttcaggtttcatcaatataaatcgaaacttcaagggtcccaactgtcagaaagtcacatagaacttactcagaatgatgtcaaattccactctagaaatttaaaacctcaccctgttaaaaatagcttgtcatcaacaaaggaaccagatgataacagacacaaggctgactttttagtttcgacttatatatattaaaaaaaaaacaaccacaaaactgctcaacataagcacaatgtgctttcaggagagaatctcaaaggacctttccagtgcattttcagtgccctgcacccaagcattaatgattatttaaatggtagaataacataaaatgatgaaacaactggataaattcaactatgttgtaaaaattttgtagttgacagaaatcagtctttggactttaagatctcatatagatcagaggagaaatataatgacatactccttaagaatctgatgaaagttatggcctttctccactagaatgtgccgattacaatattttatgcagtgtttcaaggaatacacagagcccccaatatccagttagaagccctggctgtgaatctagaattttattacaggtgaaacccagcacaagtctgattgagagccattgcaagtcacagaaactctaggccctgtctaagtaaaggcaaaccttggagtatgtcatctgccactgaaaatgcatttaatgatgactcactctttcctcactatacaagtttgttcaacctacacctcttcagctacagactacctaccatccctgaaactctgttctgagagtaaagggattacaaaacctggctgaaaagacagattcaatggcatgttgaaaaacacagcagaaccagcacatcagactgtaaattgattgtcttgcacaggatgttagctgctcttcgaatgaggttcctgagtggcacctgagcctattgctggtggcatcctattctgcctgttctctctttcttcctccttccccattcctttcattctcttctcccttattcttcctctgcaattctttttttccacactaccgttggccggtccctagggatactgtttaatctggcccatggtacaagagattttagatcttcattgaagtcactagagatggcctgagtgagtcactttgaattcaatagacaaactgatggaaggctctgagaagacctcaacgatgcccaagaaatgtgttcttactgtagaaacttactattttgatcaaaaaagtcattttggtcaaaaaggggagttgggagattgcctttttgttttgaaattgatttggcttcaagggaagaagattgcctaaacaaaacctgctgatgaagtcacaaaatgactccacctctggaatgagctttattttcttataatttggcaagaaatttggctttcaattgggaatgcacgtcactctacccactcaagggcaagatgataaggttctatcagaccaagcgtctaaaggaacctgagactctaccaaggtcagaaatgctgcaattcaagccaaaagatctttcttgggcttccttgttttgacttgtaaccataaattagtcttgcctaaatgtctgatcacattataaaacagtaagtgaatctgtactgtacagcaccctctgaagcaacaggagctatagatgaaccttttaggggattctgtaatttttctgtccctttgatttccacaggactctaaattgccccctctgaggtcaaggaacacaagatggttttggaaatgctgaacccgatacattataacatcaccagcatcgtgcctgaagccatgcctgctgccaccatgccagtcctgctcctcactggcct

SEQ ID NO: 13903 - DNA, 2300 bp, Homo sapien
ttcacctttggggtcagcagcatgtctgacttcaggaccagaaggccaaaacatctgtcagctgagcagcagctcctgtgaatgaatcgcctttgtcttgttggaggcggggatgagtgtgaatttatttgctcaacagaaagccatgtaaacctgagatcagatggaagctctggtggtggcaagaagcccagtagcccttcagacagaagatgcccatcaacaatggaaaggagtacacaggacctcggaaggaagggtcctctctcttggcggaaggcccctcacctctttgtgaagccctctggggcagaaaaaggccttgccggttccagcaaaacttcatggagcatgggggtggcagatggggtgcctggtcccagccactcctctcccaacttcccactagccatgtgggcaagctcacattagcaatgagctcaggcctgctttgctcatttaaggaaaagcagtgatcccattatcccaggggtgattctttgccccagacgcagctccttttttctaacttccttcagccctgctggcttctcctcagcagtagctaatgtgggatgatgatcagcagcagttgagctatttttaagtcaacaaactaccaatgctaagagttcctcagaaagccaggaaattcggagcctcagaagcaaatgctaaacatgattgatgggcatggaagggaatgttttggactgctgttcacaaaaggaatcccttgaatttaatcctaaaaatggccaagctagaagagtccttagaaaccatctagtctgctttttccctccctagaaaatttctacagatgagaaagtaaagtggatgatggtttagggctgaggcacttagctgatctagaggtggaagccaactcttcctgattcctatgtgaatgctctttccacaaagatcagtagaatgtttctggatttctttgtttcaatgagcttcgattatcacactttatttttcttagcatgggctccataaaactaaattattgtacaaaatctaaataagttaattaaacaagcaccagacacagagtaacttaaatgacatcagggtgctaaatctcagtttatagtcagtggacagataactctgaaatatcagctggtggcatatccaaatcagtaaggaaggaccatttggtttttatgccacctgaacagtggcggcattccagctggtgagtcttcctggcctcttgatgcagtactccccttcagctgatgctttgctctctggggttaattcaatatccaggggcagggagccagacttggaaggtcctctccccacatctaactcctgcttcaacacccagctccaacgtcttctctgtgaagccttcctacatcttcccccattcctcagagtagcctaaatcctctcctaatgcccctctttataatacccctacagtcacactgtaaggttactgtgttaggcccccatcaggcctagggtgtgtgtgtgtgtgtgtgtgtgtgtgtgtgtgtgtgtgtgtgtgtgtgtgtcatgcctacagtgaatctctccagaaacaccaatgaacaggtttgactacaaggagactacaatgagaattttattgccaatataggagatttgggacccacaccaggtagagtttactagaaacaagatacccctactgcagtaggcattgagcagggagggagacaggggagggagcagagcagagcactgggggtgtctgcaggaaagccttattgaaatcatggaagctgaggtagcttatgggagcctgggtcttagaactgacccctgggtcattgaaagagaagcccctcttggaggggaatgagaggctgcagcaagcagctctgagtcacacaatcaggaaggcattgaacgcttgaggcaaacagccattatgacaaaggagaaaatgcactttactccatgggactctgtctcccccggtggacctagcatgctgggcaaaagcagctatcgtttggcttgaggctcatctgttaaagaggaggctggtgtaaacctaagcatgggggcatgtggagatgagggagagggctggccgggctgtttggagtctgggcctgtctcagctctgccactagttggttgcatggctttgagtaaatctgctccatcagaataatgtgggcaagataaattctcaagttcttccaggtctaaaggtctgggatcctagggctgcgcgaacctgttcccacctcaaacctgttcattggtgtctctggagagagatggacacaaaagtcgtcact

SEQ ID NO: 13904 - DNA, 2300 bp, Homo sapien
gtcaaccaaatgcagagtcacttttgagtctcctcagagaacctcttcactcaagatctttctcagcttctcctagaatggctctgcttccctggggccccaggacctatgggaaactaacgtagacagcaatcttcaagccccatgttaagaacctcgggtttgacattgtttaagaaaaaaaaaaaatcactctgtttggatgtctcccatttgggagacccaaccagaaggcaggattgctgtttccatagcccaataactcaaggaagaggtgcctccccgccaatgagccagctggagcagttatagagaaaggacttcctctatcagagaccacactgtttcagcacctgagggagaccagtaaaatgatcagagagcaagctccttttgacttaatggtaggagctctgtaaccatctactccccaaagattcacattctgatgtggtttggatctgtgtccccacccaaatctcatgttgaattgcgattcccagtattggtggtggagcccagtgggaggtgactggatcatgggagtggtccttcatgaatggtttagcaccatcccctcagtgctgttctcatgatagtgagttatcatgagatctggttgtttaaaagtgtgtagcatctctcctggcccctcttcctcctgctcccaccatgtgagatgttcctgctcctgctttgccttcctccatgagtaaaagctccctgaggcctccccagatgcaggtgctgccatgcttcctgttcagcctgtggaaccatgagccaattaaacttcttttcttgtaagttacccagtctcgggcttttctttatagcaaggcaagaatggactaatacacataccaattcttgcaggtaggattttttggcacaggagagaaagctgagtagtatcagacttcttgccccctactctccagggtgagccagggtagagcctctgagaatgcacaaggaaactgaagtgacatctcaatcagaaattctgagtcaaagtttagattcctgagttttaataggaacattgaccaacttcagtattcttagaagagcatacaggataagaagaaattaggaaagcatgaaggtccaagtgtttcataaagtacccccactgtggggatatgatgactgggaggggatggcagtgatgtaaaaagctttgtccatttcctcccaactcaaacgttctgtgacctacttgaagaactgtcatgtatccttatctcttttcatccaggtatcaggtttagggccaatggggaggagccactgagagggagggttgacactcagcatcattcagatcttcatttaattcagtaaacacttaactgagcacttcctgtgcctggtatgataatgggcattggagatacggaagtaaaaaagacaggcagattaccctgtgagcagctggaacaccgtggagccttctgggcttctctttatcctaacattcattgcagttactgttgactgatcatctctcagcaatacccaccattaaccatggaatagaagcctcctgaggctaggggccatgtcacccccaacacatagcacagttcctgatttggaattcactattacccgttgaataaatgagtgaatgaacgaatgaataaatgaaaagctgtatagtgaaggcacttctatgtagaacaatgtggtgtgtggtggggggtgtgatcttatgattacatgtatatagatttttgtccatggttcttgtccataactcccatgacacttgctgaggtcttttgctataatgtagaggtgctttaggcctcaggaaacagaatatttctctggccttctttgccctcctttcatccacccaaggcgggactctataatctgattgtgggtcataagaccctcattccagaggaggtcatgccccataccctggaggaaggaatgctgcacaaagagaggaagaagaatctggacagacagaccttgctgagattagatcataccctttttgtccaatcacattttgttcaatcacatgcttcagtcatggacaacaaatgaaatctccataaaaggcccaaaggacagggttcagggagtttctggagggctgaacacgtggaggcaaacaggaaggtgaagaagaacttatcctatcaggacggaaggtcctgtgctcgggatcttccagacgtcgcgtatgtatctcttaatctgactgagccctcaacctgtgggatcagacactctttccaggtagatagtgttggaactgagttggaggacacccagct

SEQ ID NO: 13905 - DNA, 2300 bp, Homo sapien
aacacttggaccttcatgctttcctaatttcttcttatcctgtatgctcttctaagaatactgaagttggtcaatgttcctattaaaactcaggaatctaaactttgactcagaatttctgattgagatgtcacttcagtttccttgtgcattctcagaggctctaccctggctcaccctggagagtagggggcaagaagtctgatactactcagctttctctcctgtgccaaaaaatcctacctgcaagaattggtatgtgtattagtccattcttgccttgctataaagaaaagcccgagactgggtaacttacaagaaaagaagtttaattggctcatggttccacaggctgaacaggaagcatggcagcacctgcatctggggaggcctcagggagcttttactcatggaggaaggcaaagcaggagcaggaacatctcacatggtgggagcaggaggaagaggggccaggagagatgctacacacttttaaacaaccagatctcatgataactcactatcatgagaacagcactgaggggatggtgctaaaccattcatgaaggaccactcccatgatccagtcacctcccactgggctccaccaccaatactgggaatcgcaattcaacatgagatttgggtggggacacagatccaaaccacatcagaatgtgaatctttggggagtagatggttacagagctcctaccattaagtcaaaaggagcttgctctctgatcattttactggtctccctcaggtgctgaaacagtgtggtctctgatagaggaagtcctttctctataactgctccagctggctcattggcggggaggcacctcttccttgagttattgggctatggaaacagcaatcctgccttctggttgggtctcccaaatgggagacatccaaacagagtgattttttttttttcttaaacaatgtcaaacccgaggttcttaacatggggcttgaagattgctgtctacgttagtttcccataggtcctggggccccagggaagcagagccattctaggagaagctgagaaagatcttgagtgaagaggttctctgaggagactcaaaagtgactctgcatttggttgacagtgaccctcgaggcagagcaggtattgggcaacataaaagttgtgaggagtaaatgagaggcatgggaaaacatgttttcctagggctaggtaagaacccaaccatggcccagctctccaacccttaggccagaaagcacctcctcatggtcttgggacatgctcaaagcctcccagctgagtagcaacagagtggctttagaactaggtctcctgattcctggggtttttttcctcaccatcctgccattttccagatatggatctcatcggagagttcctgacttgtcaaatcctggaactctcctttcaaggacgagtcctgttggccaggcagtcctgggcttttctggttctgatgggtggccttttttgccttccagtgccaagtgtctccttgcccctatccatccccttcctgggaaagatcatctggggtcttcagtggcctcgtggagcctcatggccatggtggggagtgatgcgcagcctggtgctcgggccaggaccagacctcccatggacagtgggcacgtgccttagcatctgggcatgctgatctttttctccaagagggcagtgtgggggtagaagggggtggaatccggagacttctctccataagaattcctgctctccccctcagtctgacccttgctttgcctgtctgggccacggcaatgccctcaggcagagcagtgggaagaggaggagagggtttgctcagctggcgggactctgggagcacgagccctgccagcccctcctccgcaggctgcctccactggctcctctcctgcttctgcccgcctgtccctctgggctgctcgggcgccaccactactgtccccatcccgccccgccagctgggccaaagggtgacttgactcacgacgctgccaccagcccacggcttgcccgaggcgtataaaggctgccagggccgcaggctgccaagccctgccctgcccaaggcgcatagagcatggcccgaggcgctgagggaggccgtggggacgcgggttggggcctgcgtggcgccctggcggccgtggcgctgctctcggcgctcaacgctgcgggcacggtgttcgcgctgtgccagtggcgcgggctgagctcggcgctgcgggctttggaggcgcagcggggccgggagcagcgcgaggacagtgccctg

SEQ ID NO: 13906 - DNA, 2300 bp, Homo sapien
ataaatctagatacaatacaaaaattattttcccctcacatcaaaacatggcattttgaaaaatagtttaatggaaagagtaatcagtgaaatttttgaaaaagacaatgattgtatcatgtttagtacagctcccttccaccctggccctccattttcccctcacttgaggttttctaaatctacacaaatattctggaaagataaagagattatcttaaaagcagcaagagacaaacacatagaagcatttctgtgtgcagcactgttttacatgaacaaaagtatgttatatgtgctgctctatatttgcattttttcatttatcttagagatctttcagtagcagcctatgaatttagcacagtcagatttgttttttctgaagctcgctggagcagtgtggagaatgggaaggggtatacggtgggtgtgaggcagccagatgttttccttattcccattggttttgaaaacgtcaggctaatgccatgctgcagtgaccacctgccacaggtggtcatccagtggggagtgtccacatggcatgagaatcactgccacccaggggcagtttccacgtgccagggactgagcaggtgcattcctcaaggccaggtgcttatattattcagaggaggagatcagagttccaagaggttaagtacttcatctgtgttcacccagttaataggtgcttcctcccaaccactaggctcaccaccccttttattcaggcccaaaaattgagcccttcagatgctgtgggggctggctcattatggtggtgaaagttggatttggcaattccctcgtcatcctctgtcagaattccatagaaattcaaggaaattctcttgatgatgttgatagataagctgctgatagcgaatattcttagatcttttaagggtttctttcaagtgttatgttaactacagtcatatgtcatgtaaccacatggatacattctaagaaatacgtcattaggcaattttgttgtgtaaacatcatggtgtgtacttgcaggaaactagatgccatagcctacaacacacctcagctatgtggaaaagcctattgctcctaggctacaaacctgtacaacatgttacagtactgaatgctgtaggcaactgtaacacagtggtaaatatttgtgtatctaaacataggaaaggtaccataaaacaacagtataaaagatttaaaatggctcacctgtataggacacttaccatgaatggagctacagaactggggtagctctgggtgagtcagtgagtgagtggtgagtgaatgtggaggcccaggacatgactgtacaccactgtagactctataaacactgtacacttaggctacaccaaatttattttaaaatattttctttcttcaacaaattaaccttagcttactgtgacatgtttactttataaaattttaatgtcttttactttttgacttgtaataacacaacacaaacacattgtacagatctacaaaaatactttatatccttattatgtaagctttttcctatttttaaaatttggtgttttttgtttgtttactttttaagcttttttgttaaaaatgaagacacaaactcacacattagcctaggcctacacagggtcaggatcatcaatatcactgtgttccatctccacatcttgtcctattggagggtctccaggggcaataacatgcatggagctgtgacaacagtgccttcctctggaatacctcctgaagacctgcctaaggctgttttacagttaacttttttcttctaagtagaaggagtacagtctataataacaatacaaaatatggtgatgtcaagatgtcagctggaaactttttaaaaagattttaaaaaggataacatagtaaatgcacaaagcagtaatagtcatttattatcaattattatgtactatacataattgtacgtgctatgctttttacaatctgcagtgtggtaggtttgtttataccagcatcaccacaaacacgaagtcatgcattgcaccaagacactaccccgtgactggacaaatgaggtttgcagctccattgtaatcttatgaaatcaccattgtgtatgattcgttgttgactgcagcatcactaggtgggacatcactgcgttttccttgaacttccgcgggttctcctaaagttacttggtgactttttatgattgctttctgctcgtctgaataaaggatgagcccagggcctgctgcccactgtctgctctgatgaccctctctcccctgcagatccgagtg

SEQ ID NO: 13907 - DNA, 2300 bp, Homo sapien
atgactggttaagaaagaagattgttcaggacaaaccagaaagtctaaccatgtcatgaatggtctatgtaaatcacaataagaggatttatttaaaaaaaccaaaaacttataagatcaagttgtttttcattaaaaaaaagtataatggtcattctagagattgggcctgatgtaaaaaaaatttagttgaggttattacatctgtgtatctttctgtacatgcttttaaagtccttgttacagtgagttacagggctttgacccctgggtctaaaaaggacatcaagtcctgccaaatcttaaacactgacagcaattaaatcctcaccttcaggccccacagaggatgtcaatcaaaacaaactgcattcctatggtgacgtcaatcaaaataaacagcattcctaagacacagggccagaaattaaagctattcaactcaaggcccaggggcatcatggaagaagtgggcacagaagattgtaagggccaattttgaaagataacttcagtttctctattatatagaaatcattaatgtcaaaggcactctgatgcaagaccagtgtatgggcccctgtgtcagattaacaaggttttcttgaagcattaaccaacttcttaataaaggatataaatgttataaaaggcttatggaagttgtttcttatggtcaagattaaaattttataggtagtttataaaattttgaaaaacaaatttaattggctgcatgctgtttttattagggcttattgtttggaaaattaagtctcctccaaaaaaaatgaaggtttttgccttttaaaaaaaacccttgagttattactttggttaaatgaatgatcctattttgtgataacaagagttttaaacctttgatagttgaaaactttccaagatcaaattataaattatgtctttttctggcctaattaatcctttaagatattaggttcccaaaagtcctaaaatgacatagtttggcttatttggtataaaattgtacaggaaacattgtcaaatatgaaatggtgtttggttttctttgagctgtatttgtatagttatgttattggtatgtgttccaaaattacgggaaactcctataattctgatataatacagtatacattatcagtaataattatgttaaattattgtgtgccatagaggtaacaaattttcttgtcaattgtgtgtttgactatggctgccctaaatctttttgtcatccatggacaactgtcatcttgttttagtcctctttgggaggtggttttataatcagctataaaattctaacaggtactctgaaatgcaggtttctgataactttggagattgtgacatcagaatagaggcaaaaactttcaggactcatggagagctgaaatgttcatgaatatcaagcagtacaggaattaactgcatgaactaaactaatacaagtctaaaagtagtaatctttttaactttttgcttaaaacgttgttgatcctttgtttttctgagtcaagaaaacttttcttctaagctatttacagcttttagtaattaaagtatacccctataaacaaaatttggagcatatttgtttctctctacctgatttctacaatatttgaaaaccatgtgtgagtattcttaagacaataccattattcacataagtgcaataacaatcggttttcatttgtaacaggacacaattggagaaagtggttattaccaaggctgtgactggaatggtgtgctttccttgaaggaatcaaacttgacttacaattccaatgaaggtcccttggaaaaactggcctcatatctttatctacacagtccctgtacagggttcctgactgtggtaagtaaaaaatgtcactatttgacaggcccaggggctccaagtttatcaagaaacttgaagaggagaggagttcacccaacttataagtacttcatggtacaaatctatggctgcgctgggctttaaaaaaaagtcttgtctgagattcctaccatggaacaaggttccatcaaagccaatttaaaagcctatgtaaaaaataattattcttggggaggagccaagatggccgaataggaacagctccggtctacagctcccagcgtgagcgacgcagaagacgggtgatttctgcatttccatctgaggtaccgggttcatctcactagggagtgccagacagtgggcgcaggccagtgtgtgtgcgcaccgtgcgcgagccgaagcagggcgaggcattgcctcacctgggaagcgcaaggggtcaggg

SEQ ID NO: 13908 - DNA, 2300 bp, Homo sapien
tgactaaccacaggtaactgaaaccacagaaagcaaagccacagataaggggggcctcctgctgaattcctagctttgtgtgattagattgttacctctaatccctttcgatggctattgttctgggtgccagcaatttgctcatacacatacactgattcctttctcagcaaaatattgaggaagatcttgatgtggtttgactgtgtccccacccaatttcatcttgaattgtagctcccatagtccccaagtgttgtgtgagggacccagtgggaggtaactgaatcatgagggcaggtttttcccattctgttcttgtgatagtgaataagtctcaggagatctgatgattttatgaagggcagtttccctgcacacgctttcttgcctgctgccatgttaagatgtgcctttggtcctccttttcctcctgccatgattgtgaggcctccccagccacgtggaactatgagtccattaaatctctttcctttataaattacctagtctcaggtatgtccttatagcagtgtgagaatggactaatacagaccttctgtgtacctctccctgtgcccctctgtggcctttggcctgcgaactctatcctcattatattccccagactcgcagttctatcatcttggcaacttggagaaaccattaggctctgcctgggttctctccctgcctgtggcctggaaactttcttgaggtggtaagttgggacaattaaaatgctcacctctcaggaatcactgtccctccctacctgatgcttaatgtcttgagaaccattgtttatatattttgtcgtcttctttcttttagttgtttcaagctagaaggtgaatctagagtctcttactgcttttacctgacagagaaagttctcttcccttttttctgaaagctcctttgaatcagttttgctttaggcattgagatgtcactcacaagcttattttcctggctcttcttatcagtgggcatattctgacttcccttacttacttaggagcaagcaaatagccaagactcagatttgagttttgggtacgaggttagtacttcattcaataaacttcaaatctgtctggagaaggtatagtgaggttagctcttgccccgctaaatctcaacattgtgtgctttctctgtctggctctccactgtatcccatttcctagaatggcttttggtatagaaggtattcagtaaatacttacttatgaatgaatagactgccaaatagcttgcaaattctctaacagttaaacattttatcaaattaaaaatctcaatggtcaaaaacagtatcaaactaaaaactctaacaaataacatttatttttcttttacatatatatttcacagcctgaacatcacatcttcagagaaagttacttttatgccattgtatttactatttaccacacaggcattgaacattctcattaacatgataagacaatttgctggtaaacatttaaacacacagacattagtttcagtatctcaacatatttttggtcataaccaaggaaatacatcaaaataatgacaacattggctaatattttacaagcaaatatttaactctgcatagtttatacaataggctgtggcaataaataatgtcaccaatctcatcaactattaactggccacaagaagcctaacattcattttaattatgatatgaaatgctctattggtgtagtttcaacatatccttaaatgtttgggtgtttaaccttgaatacacgaaaagaaaaagtactaaactggactaagaaggtgtgtttggttaactacaaatatgtcatgttcacatagtacattcctaacatgaaggcaaatatttaaatagaaaaactagcagtccaaaaaatgtgaatgtgcaaattgtgagtaaaacattgcatttaaatttgcactcatttgcaagttacagtactagctcagtataaacactaacaggaaaaatattcagcaggaaagaatggaaacggcctctcacagcagagaactggtcactgcgcactgctccacagctaagaaagttttccaggtggtctagcgctcctaacaaacaccttatgattatccttcattcaacagaggaggagactgcaggcatgcttcagtcagtggtaagaacaggaagaaaaacccaaatcagcaacattttcttccttaatttggtataaacgtccttttcattatttcaagttactaatttgctaatctcaaatgttttctgaatcaggtttgctaaatgctgtaaagaatag

SEQ ID NO: 13909 - DNA, 2300 bp, Homo sapien
ttttttcctgtttgttggccatttgtattttgagaattatctgttcatgtcctttgctcgcttttgatgggattgttttttcttgttaagttccttgtagattctagatataagtcccttgtcagatatatacattgtattttctcccactctgcaggttgcctttttactcttgctgtgcagaagtgttttagtttaattaggtcccatttatttatttttgttgcatttgcctttgggttcttggtcatgaattctttaagtcaatgtctagagtagttttttttgatgttatcttctagaatttttatggtttcaagtgttagatttaagtttgacccatcttgagttaatttttgtataaggtgagagatgaggattcagggactaacaggtatttgacactgtccccatcattctcaacatttattttgacctcacatggttttcattagcaacacatgcccatgaataacatcttgtttccctgcagtggctaccacctggggatataaaagcattccttatactcaggaagtcatatcagtttcctggagtggcaatggaaaggagatggggtagaggatgcagagacgggcaggaccatgtgagatggaactgtgtagtttgaccctacccccatcctagttgggaatcactactctctataggtgtgagtgaacaaaaaagataagaatgaataagcaaaatatttgactgaaagacaggttgtccctgatgacgacttataacaatcatttatgatgtatttttgttattgtgtttctttaaaagaaatgtttgcctctgggacacattaatatcacccggaaacagcctcattcatggtgagttaaggtctatgatttttaaaaatataccatgaaggaataatacaccatgaaggaatgctttcttggttttaattagtgaatccagtgagtgtttattgacaggttgaaaatggagaaatatttagaatgaatgactaaaaatttggaaagttaattagcatatctggcttccttgctgagttaaagatatatggtctcagaaatccaaaatagtctttatattctattcagaaaatatggtatggatagtggtactactaacaaggctatttaagaaattagttgcaaagtattcattgagcttaatagaaaataacatattttaaagaattaaacctcatcataaaatactttttgtctttttttcctttttgtggagatcaaggtcatgctgtattgctcaggcaggtctcaagctcctagggtcaagctatcctcccacctctacctccctaagtactgggattacaagcatgagccaccacacctggccctaaccataaaataaaacaaaggttaaccttattataatgactagaaatgtaaacagtgccatttaaatattattccttttaagacaatacttgccaaattagtgtcctaactctgtcttccacatagtaccacccaaaaagtgctccatgctcaagtaagtttggttaaatgaagtagattgtcagaaagacagaaagattctcagtcttttaatacactgatatgcattttgaaatatgtagttaattctcaattttattgcagaattctgcaaacagtggttaacattgcttacagattttctgcatgttaatttgaatctttaatcatattaaaatgcaaatactcctgggaaggataatgaacttcttaacttgtaactgaaaacattcacacattttctcatagtgtcgttgtttcaattacttacctgaaaagaactttttgtacggtacagcacttggctgggttaatactcaccaactttgagaaggttggtctctgctcttctgtatactttttatgaggcagtatcacttagggcttaaggtttaaactttctttttctctctgtgttcatttcatattgagattatggataaaaagtttgttctgacattgcttaacatttttctttaatcatgtgattacagaaattcaatgacttacaaaacaataaatgtaccttagaatgaaaaatgcatcagtaaggtctgtatttaaatgtggatgtagacatcataattaccaagacaagaaattgttttgagaaattctctgatgtttttcttcttcaggtttcacgtgccacgatcatggtgccacggtactgcagtatgcacccaaacagcaactcctaatctcggggggtaggaaaggacacgtctgcatttttgacatcaggcaaaggcagctcattcacacgttccaggcccatgactcagctattaa

SEQ ID NO: 13910 - DNA, 2300 bp, Homo sapien
gtctcaaaaaaaaaaaaaaagaagtactaggtccaaggctataaacttaaataaggcttttaatacatattgccagattattttccacattactaatttgtactctcttgagaatagtgagaggatgcatctaactttacccccttattagcattaagtattcctttttcatttttgttaatttgatagattaaatgatttttattttctgttagtgacattaaaattttaatgatcttattgccatttgattttccagtttgaggtattgactgttcatattcttacctaaattatctgttgagattatggtatttttcctttttctggatactttatctagagatattattaatttatcttgttaagctttttctagtttatttgctttaaaattttgtttattatgcatttgaagttttaaaaagtttatcatgcacagaaattttaaaaagtttaaaaattagatctatccatacatttccttattgattacattgtttttcagcagaagtcttttccactaataaatgtgtacatttattttaccttccttctctgtttcctcctgttctttttctttctcctcctccttaacttttaattctcttatttatctagaataaagtgaggaacagactggatcagacttcatctcccattcccacacttagctaactagttgttccattattatttattaaataatctttctttttctcccactgacttaagatgttacctttgtcagattaacttcttatacgtgtatgatttttgtattatatttttgcatcaatctagactacatttttcttacttagtttaatatccactaaaaaaaatgggattttttttatttaaaaaaaattccccagctaatctcatctattttttcttctctacgaacttcagaatcattttaaagttccaaaacaggaagagaaattcacagggagatttttattgaaattacttaaagcctgtgtaaattaacttataaagaattacagtttttacacatttcagtccttcccttcatataattttataaagatttataatttccttcacaatagctctctcacagctttcatagtttgtccttttgtatttctttagacttttctaactatttattgctgatctataagaagaaaactattgattaaaaaaaatttcacatctagctattcagttattgaatatgagagttttaccttgtcatcttgacttttgtagatgtagcattatctgcaaaagaaaatttttacttatgctgacaccatttaaaatgtttacttttatgttagaacaaaaataattatatactaaaaatattttctatattaaatatataatacatgttatataaaatatattttatatgtttatgaaattataatctttaaaaaaataattttaccttttattgcagccatttcttcctttgtctgatagtggtgttatatatgattctgatgaaagcattcatagtgatgaagaagatgatgcctttttttcagatacacaaatacaggagcaccaagatccaaattcctataggtaaataagacttttctttctctcattttttttttggcttttctttttgtagaaaatatcaatgttattaattttaaataacattattatcctgaatttatataagaaatgacttatgtttccaggttacaaattctacacctttgaggtcaatgtctacatagtgttttctccacctccaaagactagcttttatggagagtgcaaacacaagcatctttagtgaggaaaaaatatgtaactcatggatatactattagagtttaatatataaattattggtatactattaggtttcatgtgactatgtggttaatctttttccacgaggtaattttcagcaagtgtaatatagtattgcaagttttttgtattcagtgaccacagaggtgccatttttgcatagtaaatttcaatgacagctttttttctgggttggagagtgggctaaacagttggcagggaacaccactctgtttctcccatgattttatttttcacttaaagactctttttgcccctccttgaacagctgggctcttctacatttgacaatggttaaactagcacttcacaatgtcaagaatttctttcctattgctggactggaattctctggtgagtttggaatttaaaaattaatgttattaagtataataaattgccgtcaagtttctctttacaaaatctatatataaggtcatttggtacttaaaaaatagtgcattagatat

SEQ ID NO: 13911 - DNA, 2300 bp, Homo sapien
gtaggcttggagacctctcccatttgggggagggtatgtatgtagtggtttggctggctcaagggcaggttcaccctgggcaagactgccagattgtttctctgaccaaaagtgtgatggtaggggttgatttccctgccatgcaggaccaaagtcatagccagtcatggtcctaggctctgcatagctgggattgtagcattcagctacccatgtaggcttggaatgaagacgggtccccagtgttggagaggtacagtgactcctggcccccagagcagtgcgcatgccagaggtgactggtctcaagatagtgcttgtgctgcagcagcttggctcactggcggtaggtggagggcacacaccttatgctcctaatctgggtcagtgccgttgcgtgaacttctgacgtctctccaaactggacacagggcttgcaagtactatgggattcttctgttgtaaggactgtagatgtttgtggtggccatgagggctgatggggatcttctgtttaccttttcccctctgcaatgagaagttcttcctgactgtgggcagatccagtctgggtgggggagatagggctgcagaggccgggtacctccacactgctctcctagacttgcagtcaccacaggtgcatctccactcccctgctgcactctagtgctctccctttgacactccagtcaaatcttagctgtttattcattgccttggtcctttcttttcggaggatgaatgccaggtgtgtctagcagccatcttgctggcatcattctcttggtttatttttatggatgctcagattgttctttcacaaatgggaacttcttcaggtttctgaattcttctggcattatttcttgatagttttcttgctttctggtactacaaaatgtttaagggtcatcttgtacatttcctgccccagacctggaaatgaccattcctccaaagcattctgcttccttttagtggggaataatatttagaaactatagtttgggcaccaggatcctcattggtactaatcttgtcataatttctagactattgcaatgaatggaattaggaaattttttttccttagaatttaggagtttaccctgctatttctcatgcacatatagattatagggttctttcttcttagatgttaagtttgtgtcttataatgaaatgtttggattctcatggcatgaacatagttatttgctatctatgtgcatataagtttcagaataataatatagatatttttataataacatgattctgaacataatttaagcttttttgcagaatttttttgttttatggtacattctgctaaggatgtacagtcaaattacttgtttttaactcactttttagagttcatctctgtgtgattatgctaccaacttgatagactgatttgtttaattttgccttttgtgaattgtggtttagatttggttttattttaaaattatgtaaaatgttgacatggtgttaaaataaaatatataaaaccagtgtattttcagagaaatctagctctttttttccctgttttgctctccccttttaaggaatcaattaaaattttttgtgtttgtcttccatttaaaaatgataagccaatatgcatgagtgtgtatttgtatttcctcttcactgtcttagatagataaaaggtagcttactacatgtactttctgcatcttctttttcttagtgtatcctggacatcactctatagtgatgggaatcactccgtagcatattgggaaattctttctatttcagctgtacagttgtaatgattgtatatgccatagtgtaacctatcgtaggttaatatttacatgttgtttttttgaagaaatgctgacgtattttattgttttgtaatgtaaatacatattaacacaatgctttgtgattttatctgtttgatttctatagttatcatcaagtcttgtaacccggtggcatttagtttttataactaccttcgaactcatcctttgctcattcgaagaaatcttgcctcccctgaaggaactttggcaaccttaggtctcaaaactgagaagaactttgttgataaaattaacctcatagaaagaaaattattctttaccactgcaaatgctcattttaaagttggatgccctgttttagccttggaggtactctccaaaattccaaaagtaaccaaaacatctgccttatctgcaaaaaaagatcagcctgacttcatttctcacaggatggatgatgtaccttcacattcaaaagctctgagt

SEQ ID NO: 13912 - DNA, 2300 bp, Homo sapien
tttgagggcaagtctggcagctgtgtttaaagtgatctacttgcagaattttaattggggagtttctagaatagtgtttttgggaaaccaaaattggaggttcggggccgctaaaattactggtgaatgatattcagtataggtgttttcttattcatccgtaagacaggtttgcattcacagttggaaagatcatattgagaagagtgtactcttgggcttttgtggctggtgcagatctaggccagtttgttaatctttcaaaatatttgaaaggtttgggttatactcaaataagtttattggagttcgtgataataaattatattttacagacgccttataaaatgtcttatttgacaatagtaatctaggggaaacagtaactgatcccaattgtttagatggaataggctcagatgattaagtagctttcccactgttaatgaaattattgatgggttgaaactcaaatccagatcttctgacctcagatctttaatctctatatccccttgtcttacagttgacaacagatgtgcattgttagtctttggcagtcaggaatagataagagggttctggttcagtgctaagagaggatgaattaaacttggtaaaatgggtaagatctattggtctgttttgcggtctgaaacaaaatttggtgtaccacctggggtctggattatttgagagaaggttaggggcatttgaaaggcaaattgtaaagctcagttaagtattcatgatgaaaatgattaaatatatagtatgaaattctaaggaggcatgttgtgaaggtaaatataaataatagaaacacattaagggctgacttgtttcagtgcttttgagttttattttaattaaatggttgcctcatttaaacttaattacctaaaaacaaattaagtgattattattgcataccttgatttcactgatgggctcttcaagacctttatagatatgttggccaatggacatttagtgggatactagttaagaggaagactgcagagatattctgaagaagctcatagtgactttaaattgatcacattccagaatttgattactaccatattattttgtggctttattattattacaactaactatttgctttttcttttttaaggccatctgagttcttcttcaatttatccagtgtgccttgcaccttatttagtggttacaacttgttctgacaataaagtacgcttctggaaatgttgtatggaagccaacccagagtgtaataaaagtgatgagaaagaaatttatcattggaagagatggcctttgatgaatgatgaaggagaagataatagcagtacagtgagcattgtgggaagaccagttgctgttagctgttcatacacaggtcgccttgcagtggcttataagcagcctatccaccataatggttttgtttctaaagaattttccatgcatgtttgtatatttgaatgtgaatctacaggaggatcagagtgggttttagaacaaacaattcatcttgatgatttggttaaggttgggagtgtacttgattcaagggtcagcgtcgacagtaatctgtttgtgtatagcaagtcagatgcactcttgagcaaggatagatatcttattccgaatatcaaacatttagtacatttggactgggtatcaaaagaagatggctcccacattcttacagtgggagtcggtgcgaatatcttcatgtatggaaggctttcaggaattgtgactgagcaaaccaacagtaaggatggagtagctgtcatcactttaccactaggtggtagtatcaagcaaggagttaagtcaagatgggttcttcttagatctatagacttggtatcttctgttgatggtactccttcactgcctgtttctctctcttgggtaagagatgggatattggtggtaggaatggattgtgaaatgcatgtatatgcacagtggaagcatgctgtcaaatttggagacactgaagctgatagttctaatgcagaagaggcagcaatgcaagatcattcgacctttaaatctaatatgctggcaagaaaaagtgttgttgaaggaacagctatttctgatgatgttttttgttcaccaactgtaattcaagatggtggcttatttgaggctgcacatgtactttcccctactcttccacaatatcatccaactcagctgttagaattgatggatttagggaaagtgcgaagggctaaagccattctctctcatttagtaaaatgtattgcaggtgaagtagcaatagttag

SEQ ID NO: 13913 - DNA, 2300 bp, Homo sapien
ttcttaactaacttattcaaggggctagcatcagaatcttttttctgtactgaccaatttatgtctaaatgggagaatttggcatcagtctgcatttgaaaaacaatatcacacagaaaagattgataatgaatagactgttcatttatttttcaagaatagttttctttaaagtaatgtaattttgagataagttttgtattatgtataagtcacatattagtttttagatgtaacttaatttttaaaacttcttcaaaccacttaaattttgaattgtgtatgtacaaattaattttatattgacctatgtatttttcaggatgattgtcttttgaaagtgtggtatcctatgactggttggaagtcttcaattatacctcaggatcatcatgaagtaaaaaggagacagtcctctactcaattttcttttgtttacttggcacatccccgagctgtgacaggtttttcgtggcgcaaaactagcaagtatatgcccaggttagatgaatgaatcatgtagctttagtttgcatccttaaatgtttataaaaataatgaaaataaagtccttttatttacatggtggcaattaatagcataggctctggcatcaagctgcctgaaatcaaatcctactattagcttcatgagtttttgactaaatttcttaagctgtctatgcctcagtttttctctgtagagtgagggtagtaatagtacctacctcagagagttactgtgaaactaaaatgtagtttgtgggtgggaagtgcttagtacaggcctttgcacatactttgtgtccagccaatgaaattgttggtagtagctgtggtactagcagatcctagcaagaaaatgtttgcaaataacaggaaagcacacattgaagggaaatagatcagtattatgtcaattatgtatatggtgttaaagcatataatgtactctgaaaaaagtggccaggttgtgttttttttgttgttgtttttttaaatctgagagctgtcaacagaagcttctcaaaggattttttattatacattttttcctcatcattgtggcacctcttaaaggtatttagaagattaaataaactgcaaaaaagcttatacaaatgattcctttattatatacaggtctaagaaagctgttgggcactcagaagcttgcttagaaatctagtttgttcttgagggagggttattttacctactaaatatatctgaggattgtttatgcctgataggaaatatagcacacattgtagagatgctcagtaaatgataatgtgggaaatttatatactttttgaatctaaatatattctgcttaagtcatctgcatctatttgcagaatacttttgacttagattctgtgtgagcatttttttaaagggagaatgatttttttgttcctttgtaacaaacaggtaagttactttagctgctccatgccatgccgtttttgcttattttaacttaatggaaatggatttatagtttgaaattatattctccttacagttttatgatgaagataattatttgtttgtaactgtttgggttataggaaggaggatgtaaagtgatgaaactactgccataagccagatagtttaattacatttaatgatcttttattatggtcattctctaatttgcaatgattaggttttcttttgctgtttagtttgtatgttttgtttaggagatactaataatcctctagagcctgaatgtataatctggcagtaatttctgtttcttttttcaaaacaatttcccggttcttatgatgttcacagtgatgctatatatgatttcaagctctttgattgattccttttttccatagtgttttgcactaatgttatctttatgcatgaagaaccaaaatattaattagttaatgggattgatattcacattaacctttatttatttctctttgttgttaggggttctgtctgtaatgtgttgttaacttcatgtcatgatggtgtgtgccggctctgggcagaaactttattaccagaagactgtcttttgggtgagcagatttgtgagactaccacttccagcattgccagcagcctttctcatgctggaagacacaaagacagaatacagcatgctcttgaggtattatattatttaaaatggtaaatgaattttgaagataatgtgagcctggtggaaattcatgaactaacatgcagatggcacacatggtacatgtaatgagtgaaattaatagcaataaactctcatttatgcttgtaagactactcatt

SEQ ID NO: 13914 - DNA, 2300 bp, Homo sapien
agccctttccaaaattagaagaaagaatttccaatttgtttttaggtccatgaaaaaatttgcatgaacaaggaagagatgaaattgtggacagtcaaaagtgtggtctagctgccctggtgggctaccaaggaaacttgccatattagtctggagtgagttttgactgatcagattggacaataaaaggctcagctgtaattccaggagacttaattagtcatttgcaaccttaagatacagctatcaagaagccatttaaaggattcatgagggaagagaacaggtggatacaggcttcagattttgagtttgataccgagaggaagaaagaggctcacaacttcacaactgtgtgaatgggccaaaacttcatggaatgctgtaaaacaagagccaaatgtgaaatggtttaaataatgtgaattagtaacactcttggaaacctgagtacaatttgttgtttgatgatagttttgacttggtttctaatgcagtgaaggtcaaagattaagagactcatctagaatctagtagtaacaaaaaggaacccttggatatggcgcgggggaagggaggaagggggggggagggaaggggagggaggggggagagagagaaagagagagaatgccgcaggtcattaggtattatttttcattcctcctgcaactttctactgaaaagattaccaacgactgacagatctttgcctccaatcttccccacccttccctttatgcttcaaaatgctacaaagtcatcttcccaaagcagctctgattatataaatttttgctcagaaacatctgatatacccccactgcatgcagagtgaaatctgggcttcttggagcattcaagactctccataatatgttttggtaggccaagagttagaccacttggataccttgatctcttgctaagtattatttactttccctaccctataaatcatctgcctcaaacattaatctttgtaccttcaacaccccctctattttctgtactgtatttgcagcatttcttgtctatctcagcctgtcaaaattaaactcagcgtttatgtcaggttatgtctccataatgccttatccacgcccttagtcaacattcttcttcctcttctgtggtgcataaagacttttatatctcaatcacaccacctttggcgttctgcctggttttacagatagttatgtcttggtgtcccctacttccttaccctgtgatttaagcatagtatgggttagaacatttgccatgaattggcctgtggcagggagctgatgatccttgttatcaaccattcaaagtttagcagatagtttggaaaatcaggcgattctgctaattcatgaaattactcatgaaaaaaagtcgaaaggagtcacccgtctctaaggcggctttttgctgtctagaataaccgtgacaaaaggtgggagcaaaataattagctttcaggggagtatggcttctctaaatagttgcaagatgcctacattgtttatgtaaaataaaatatcttatgtactgcactttcgaaaagactgaagatatctaagatatctccaggtggaaattcccggtgacgggtgtccttctgaggtcaacggcactgaccattgcacactgtattctggaatacgttcaacacagcaaaaccggctcgtggcgcgtccccggcgtccgactgctgcgtggccccgagcgacctgcaccccactcgcccccgcccccacctccgccccagtccgcagcggctacagcccgggaggctccaagggaactcccgcacgtctgcgcgcgcaatcacgggacggcgggtcggcgtggcgcgcgcaattgccctggaaaccacggcgcgcgcacgcgcaaacgcgggtgatggggggaagaaagactgagctgagagctttgccgcggggggagggctctacctcgctcccccgcggtgggcgcgcgcgctggcccgctcccttgctgcacgctcccggctcgcgcgttccccccggtgccctcccccgcctcacaagcacccttgccctcccgcatttgtgcgccggtgcagcaggcagtgggaacatccgggcatttccgcagctgagcggcgacccgggcggcggcggcggtcgaggagctcccatggcagggacgaggcggagggaaggcgaaaggggggcgaggagttaagccagagcctccgcggggcgggtttccgagggaggcacagagggaaacggctctcgcagcccgaggagggtcaggcgcggagcttgtcgcacctcccgcgc

SEQ ID NO: 13915 - DNA, 2300 bp, Homo sapien
tttttattattaataaaagggctgtcttctctttgaaatctttcctgaccattcattccattatttggacagactctacttgagctttgcaaatacaaaaaggacacataacactctcttgtacttattcattcacttatatttcaataagaatagtgtgttgcatgtgaaacctgttcaccaaatagttgttgttatattcacaatattttctctctactaggctataggactagcagtgactagtgtcttacttgtctttgtacacccagcaactatctcaatacctggtacatttcagatgctcaataaacacctgttaagtgaattgatgaataaatacaatttaggattactccattcacagacctatactaagtccagtggtatcatccataaggctgaataatgtaaactaattcatgcctatgttttactcaatgctccaccactcatttgatcagaaacataacatgatcctagatttagtgtccatttaacataatcactttaagtccaaatggcagaaagagacaaaataccctttttcttttgggcaagcaatgcaatgtactcaacagacatccctgaccttcatcccatcctgaatctctcccaattgcaaacatgtattgaggagataaatgagtcaggaatgggacaaaggacaaagtgaagctgagggattaggtcagtgagtctcaggatcagtgaatggctatttcagatagcgttgggtaatgtttcataaaagctgaaaacgtttcatgacttattttcttaggctgtatcaaaatattcttggtatcaaaatgactagttcaaaacatgtacccatttgatcttcataataacagtgtgaggtaaacagagcctgtcatttccatcataaagaaaaggaaactaaggaaatatacccttcattcagctgggattttaaaatatgacttaattttttaatgcagtatactgggataataatgctatgttattactgccaataaagagttttttgttttgaaggagctgttagatttagaatactctttagatcctcaaaggaagtatttgagtgacttccaaactcaaaaacctccggagcaagggagatttgtttgtcagcttggttgtttgtttgtttttaggtacttgaataacttcctccttgaaaaggagggtgcagaaatcaaaggcctgattgtgctgaatccttctctttggtcattattcagactggttcccagcatgccgcagtccagaggaaaaggtccaagttctgtttaaaaatcagagactaaagagcttactcagcatcctgctcacattaatgttgcttgttttcatcatttaaagtcttttgatagttccttgtatacaataaccttaggcttctgggaatattctcagaacataggaagcacctccctgacttagtaaagatgaaaaatgcttttcatgactatcccctctcttgaaggaccccctggaacagccaggtctttgggcataattaaattctgggcaagattttacagaaatgcagcttcttttttctaatttagttgtgtggtgtgtgtgtgtaaagtgggggaggttccacttggtggggaaaggagaatttgccattgctgctcgtctactcaggactgtttctgttgttgttgtgtttcagcatcagagagtgagagtgtattgcagcaatctgactatttggaagactgttccttgaatttcccaattcaaaagcctcggtagagctgagggatgcttgatacgtcaacacagaccacaaaaggcagggcttttctaaagagattataattatatctaccttttgggtacaggaggtgaatggaaggaagggattctggagcagatatcccaaaagaagaatcccgaagcagaactcctcgcacaaggttatctaaatctccttgacaggtgcacaggcagagaaggcatttggcccttgaagtaacatttacttgagaggttgggacaattctgtcacgcttaggacaagccagctgaccctgagcccaggagcaccctaggactgcagcacagaaaatacaccagctggccggtcgcccctcctttgttccattcccgggggattggagtagcgttggagtcaccgacgccatcccctcccgcctctggcgtgcatggagcatgcgcttccttcctcacttcctctgcaggagggagcgagagtaaagctacgccctggcgcgcagtctccgcgtcacaggaacttcagcacccacagggcggacagcgctcccctctacctggag

SEQ ID NO: 13916 - DNA, 2300 bp, Homo sapien
gcccaatccccccacaaagaagtgggttgactagatcttctgctacaccagcttttgtgttccccagagctagctgcctaatgctgcctctctgttcttggcaatgctcttccacctgctccttccccttttcattggtttagatgcctatttacccaggctaatttcatccttccttccctttgttggactccttgcgtcttcattttttccttagcaccaaccaagctgttgagatctttctccccaccttgaattctctttaaaactttagatgaaactgaccataaggggatatcaaattcctcatctgtcctttgattttcctctgtaaagcacccagacccatggctcctcatctcctccagcatcttatctcaaatacaaagactatagaggctgatggttctgttttagagaggagagaaaatagaaattgggtctggatttcttttttttttttactggatagcctaaaaactttcctctgctctccttacttccaatcctcaccagctgccatcttttaaagcagcttttgaagattcacccactcaaaaaaaaagttctagatttatcaaaaaaaaaaacccttatgacttttgctcaagcttaccagtctgagctaaaatggacacagctatttccataattcttcattcccattacatactcctattcacctatctctaaaatgttcatatgcttgacctgtttactcatgttacctgaatgcatcaatgcaaataaaacacaaatgaaatattatttcaacaaatatttattgaatactaactctgtaccaagcactggaaataccatgcctatttaaaaagacataatccctgactcatgaagctcaaagtctagtggaagaggtagatcatgtttaaatcatcatgtattttcattacaattgcattaagtgctctgaggaaagaaacatggttctatgagacctcaaaaaaggaggctgacctggacttaggctcaggaaatgcttccctaaggaagtaacttgagctgagaaccgaagatcaaataggagttaacttgtgaacatgagaggcagcacatagagaaggatgtgtggagtatccaagcaactgaaacaagcacagtgttgctggcacagaaagaaagagcaaaaagagaagagactggggaggtggacccaggccagaccatgcagcgccttatgagccatggatggactctgatctttattgtaagaaccatgagaattttctggtcccctgaagaattttaagcaaaggagttacatgatcagattgttaaaaagataactctggctataatgtggaaacgcagtattgggcatagatttggggagggtgatgttgcagttagcaggtgagaaatgaaggctgcttggactagagtggcatagtggagggagaaatgtgcaaatttgggataaattttgaaagtggggccaacaaggctactgatggattggatgggggaaaaggaagaagaggcaagaaaggctgttaaatttctatctagttcactgaatggagaatgaaccatttactaagatgcaagtcactgaacaaaaaccaggtctgagagaaagattttgtacactcatccagacagcacttaaactttacccaaaaattcccaggtgtgactgctctgctagggatagacattctaacaggctttcctgtatcctggcaccagccctcctggtggattctgtgaactcaaagcttccctcttcattaaaaggcagtttttcctggggagactcatgataatttatggaggtaaacatggccagagaaagagcccagaaattcccgtttttcccctgagcaggagctggggtcttcagggggttttccctgaggtagagcacctttccctgagcttcaatgaccttttcaaatgacaagagcacacatatctagaaatgggtttgaacctgcaggagcttgcaaacgagggggaattcttgcacttcacatttaagggcatcacaaaggaaggaatcaagctggagtttcactagttctaacaaaatgttcattttttattgatttttccccactggagactccaatggcagcaattcaagatggtcttgctaagggagaaaacgatgaaacagtatctaacacattaaccttgacaaatggcttggaaaggagaactaaaacctacagtgaagacaactttgaggaactccaatatttcccaaatttctatgcgctactgaaaagtattgattcaggtaaccactgtgtggttgtgattatgtggaacagaaa

SEQ ID NO: 13917 - DNA, 2300 bp, Homo sapien
ccttccttagactcccaaagtgctggaatgggccactgcgcctggctcagttctttaatcttcagattaaaacttccagccatgcagtaaactttttcttagtggaaaacattatatgctgtctcattcctagattgtaaactctttgaaggaagagacttctttcttgaaacattaccagatcttgtctatatactgagactcaaattctgcctctctcttgggtcctgaaatggacacactggataccacccaaaagtttatgcatggcagacttatgctaaacaatctaaattagcattcaggatctttttactacacctcaattcaaccacttgtaattatgtatttatttttttttttattccactgagctaggcactgctggagctaaaaagatgagtaagacccagttatgcctcccaggagcacgtatttgttggaggagataagacaagctcatgcatgtacatgcaagtacaaacacaaaacacagagagttaaatactaaaccagaggtattaatacaaacctcttggagttcaaagaagaaacagtaacagttgggcaggtgggaaaaagggaccattgggaagaattaggaaaaatctcatggaggatgtatcatttgagacagaccttaaagatttaaacaatgtaatagagggtactggaagagtgttaccattggagggaataacatgcaaggtatgaaagtaggaacaaggaggccagtttcagaggctctgtttggcaggaatatgtagagtatacagaatgagttatagatggggtatggtcagaccatgaataataaaaatagaaataatagcttgaatgccaatgtaggtttttagtaatgctgttgtccccagagagccattgtaggagttttgagtgggatggtgttgtggaagcttgctcctctcccatcctttctctcctgagcaatattagctttgcctctgtccagcacagcaacataccaaaacttcagccaacgaatcaaacccccaggctccggaccttcctacaaggtacctcttcttggaaagctgtccaaaataacacagaaaccaggcactagatgctagtaaatgtgtacccactctgtgtataatacagtgtgttgaaagggtgttcaagagtagacggtgttcaaatgaagagtacagataagaggtctttggtggttataatattaatagcaatacggggcagggagatgcgatttcagggtgtcaaagaataaactgacgaagagaagatgaatgcagacagtaaattccaactactgagcctggagaatgaattgtatgtggccagcctttcgaggcagccaggacttaaattggcactagtgtacaaagtgtgaaacccgaacaactaggggggttattttgaggccacccattaggccttagaagcactatccctcctagtgcaatgttgaaaggactggactctgaggctgttgagatggacctggagaagctgtctgtgtgtgtttgatgatcttaagttttactgtgacgtggactttgaggtcactggggtggggggagggaagtacccttggcattggcagagctggaaggtctgtgcaagctggctcctgctggggaatcaataaaggaggcagagcaacgctttttttttttttcgccgtggccagggcagggttctgccagggctctatcgccaatggagcaggggtccacctggggcctaggacgcctgcagatagccctctcttagccccaacggccgcgggcttcagcgctccccggctccctcgctctgcagggtcttcccggtaccggcaggccgcggcgggagctgctttcgctcttaaccttgcaggtgcgtgtgccgcgggcgcccggggcaggcaggacgcagaggaggaggcgcccgccatgcccggcctgcggctccccgcctcggcttcccgtccgccgcccccgcggaacggcctgctgcagcccctgtgaagaggaagaggcggcggcggcggcggaggaggaggaggcgccgcccccttggcaagctccccgacccggcggcctcggcaggacccatggcggattcctcgcccgcactgtccctgcgggaaggcggcccccgcgcgccgcggccctcggccccctcgccgccgccgcgctcgcgctccggctccgagtccgaggaggccgagctgtcgctgagcctggcccgcaccaagacccgctcgtacggcagcaccgccagcgtgcgggcgccgctgggcgccggcgtcatcgagcgccatgtggagcacc

SEQ ID NO: 13918 - DNA, 2300 bp, Homo sapien
cctgtaatcccagcactttggaaggctgaggctgatggatcacttgaggtcagaagtttgagagaagcctggccaacatgatgaaaccccacctctactaaaaatacaaaaaattaggcgggcatagtggcacatgctgtagtcccagctactcaggaggctgaggcaggaaaactgcttgaacctgggaggcggagcttgcagtgaacggagatcacaccactgcactccaacctaggcaacagagcaagactctatctcaaaacaaacaaacaaacaaagaaaaccccaaagccaaaccaaaacaaaaaaccccagggtctcactgtgttgctgaggctggagtgcagtggcatgatctctgcttactgcagagatcacctactgggcttaagcaatcctcccacctcactttcccaagtagctggaactacaggagtaggccacatgctcgattaagttttgtattttttgtagagatgggtctcactatgttgcccaggctggtcttgaactcctgggctcaagctatcctccttccttagactcccaaagtgctggaatgggccactgcgcctggctcagttctttaatcttcagattaaaacttccagccatgcagtaaactttttcttagtggaaaacattatatgctgtctcattcctagattgtaaactctttgaaggaagagacttctttcttgaaacattaccagatcttgtctatatactgagactcaaattctgcctctctcttgggtcctgaaatggacacactggataccacccaaaagtttatgcatggcagacttatgctaaacaatctaaattagcattcaggatctttttactacacctcaattcaaccacttgtaattatgtatttatttttttttttattccactgagctaggcactgctggagctaaaaagatgagtaagacccagttatgcctcccaggagcacgtatttgttggaggagataagacaagctcatgcatgtacatgcaagtacaaacacaaaacacagagagttaaatactaaaccagaggtattaatacaaacctcttggagttcaaagaagaaacagtaacagttgggcaggtgggaaaaagggaccattgggaagaattaggaaaaatctcatggaggatgtatcatttgagacagaccttaaagatttaaacaatgtaatagagggtactggaagagtgttaccattggagggaataacatgcaaggtatgaaagtaggaacaaggaggccagtttcagaggctctgtttggcaggaatatgtagagtatacagaatgagttatagatggggtatggtcagaccatgaataataaaaatagaaataatagcttgaatgccaatgtaggtttttagtaatgctgttgtccccagagagccattgtaggagttttgagtgggatggtgttgtggaagcttgctcctctcccatcctttctctcctgagcaatattagctttgcctctgtccagcacagcaacataccaaaacttcagccaacgaatcaaacccccaggctccggaccttcctacaaggtacctcttcttggaaagctgtccaaaataacacagaaaccaggcactagatgctagtaaatgtgtacccactctgtgtataatacagtgtgttgaaagggtgttcaagagtagacggtgttcaaatgaagagtacagataagaggtctttggtggttataatattaatagcaatacggggcagggagatgcgatttcagggtgtcaaagaataaactgacgaagagaagatgaatgcagacagtaaattccaactactgagcctggagaatgaattgtatgtggccagcctttcgaggcagccaggacttaaattggcactagtgtacaaagtgtgaaacccgaacaactaggggggttattttgaggccacccattaggccttagaagcactatccctcctagtgcaatgttgaaaggactggactctgaggctgttgagatggacctggagaagctgtctgtgtgtgtttgatgatcttaagttttactgtgacgtggactttgaggtcactggggtggggggagggaagtacccttggcattggcagagctggaaggtctgtgcaagctggctcctgctggggaatcaataaaggaggcagagcaacgctttttttttttttcgccgtggccagggcagggttctgccagggctctatcgccaatggagcaggggtccacctggggcctaggacgcctgcagatagccctctcttagccccaac

SEQ ID NO: 13919 - DNA, 2300 bp, Homo sapien
gtctgcttcctttcatggctagtttctgaaggaatactctattcgttttatcacatgcagccattttcctcgtgcagaaccacgggaaaccaaagagaaatactgtacactactgagcacctttgctactctttcttccaatatgaatgaaattgctttattattttcagcatatgcctactatcagctttctctgggaaaactgctggctcgatccgtaagcagccctgttcttatttaacagaaggctatgactgtaacaaatgtacaacataaaaaagtcaaaggcatcctgtcggttacacaggacattcggaataacaaatgtacaggaaaacttgggaacatgacttaaagtaatttggtcacacccccatttcatttaactctttctggctcagatttgtcattctgacaggaggcccaagatatagtccattaccacaattgatcatagaaacaacactggtctctcagtcagcagccactgcgtgccagtgttcatcatgctagttcccagagttttagaggattaactttactttctggttcaacccatctgctggggaaggtatggccctattttgcaatgtgcaaaagggagacagtgctgggggtgcccacagtggaaggagagaagacaggcttactgaacacccctatgaccttgaataagtcacatcacctctctgtgcctcttattaactatcattggggaaaaataccttcactctgcctgtctcacaagggttcttgtaaaaatcaaatgagaacacaaataggaaagtattttcataaatgcaaaccagtgttatcattttcagatgtggaatttcctctgcagcacgtttttttggccacacgattactgcacacctcgtgccagacagactataaagctgtttcacctcttttcacattttgcctaaaatttcatatagagattacaccagccatgctgcatccatccctttggttcattttcctccactacatctgtgaatgcaaatcccaccatcatgtgaaacactgcatagcagcaacttgcaaaactcaacgaaccttagactgccaagataagtcccataagcaaaggttatgctcaaaatatgctgcaaaagttcaagaaggagagagatatcacatctaattagaaaaggcctctggaagttaaatctagatgccatgtattttcataatgttggtctttgtcctatgtcaccccactctgctgtcatgcttcagaaacttgactttattttctctatctttggagctctcaagaacctggcagacagaacatctcagggtatattcagggatgaagtgaacgggctcaacgactaacaaacccagtggattttaacatttacccagcccaacgaggtccaactatctttaggttagcacgacatataggactttcccggcccaagaactccctcggaaaccccaaggaaggaactttcactgagtatgcactaagtgccagatcctaagtgctatgggtcgcttaatcctcacaacactttttcaagcttgaagcctgttttacagatgaggacgcgaaggctcagacaggctaagttgtccggtctcacctcagtgaagccgccactgcgcttgggctctccagcccctcacgccatcaccctagagccttgctaacttccacctcgcttacctccttccctccctaggctgccaacccaactactctctcctcccacgcccacgcccagccaggaaaacctggggcgggcggggtctgtacctgagaccgctctcaacgcggcttccgtgtcaggatgctcgctcacaggaatgctcatcacaggcttgaaagcctttgccatccacgctctccggagccccgagcgtctccaaagagcctgcccaggcttctccccgacccaggtgcttcctcccctgcagagctgtggcggggttcagaccccgattccgggagaggacacctgtcggggaagggcggggctgggggactgcggggccgcggcgaggctcagccgggaactacgcttcccagcctgctccgctgcagccgcgcgccccggcgccgcgcccggccgggagccgcctgttgatcgccgcgctcgccccggccacggcgccgcccctgttctcccggccccgctccaccggggctgacggactgacggccagcacagccggctccgggatgagcgcacggacgggtgagcgccccggggggcgggtggggcctgttctggacagccggtgtctgcagcccccgggcccgcagcgcggtggccgccgtg

SEQ ID NO: 13920 - DNA, 2300 bp, Homo sapien
tctggtctaggtaaccacaagaatgaactattattgcacctaagaaaattaacaccaattccataatatcatctaacatgcaatccatattcaaacatccccaactatctccaaattgtcttttatagcttttttttttgcatctaggattcaaagttcacacatcccaattcactattgtatcacttgagtattttaacctacaatagttgctcccatttgctctgccccatcgccaagtctttttgcaggaacactacagaggtgaaattatgcctccttattgcttcacaacgggagactcgcagtagatgctgctaaacttggtcatttggttccagtggtgacctcctaatttctccattgtaaggacaaattttcccagagtaaactgtggtgagatactttgaaataatatgaaaatcctattccccaaccacctttcactcaaaggttttggaccagttggtaagtccttgccttattcaactgttatgttaggtttgcagagcgccgagttcctgattctctcattccttctattgcatatttctttttcaaacaatgatccatcagtacgcaacttctcttttctgtgtatacacattctggttacttcttgctggggcttcctccccgacctccatgctgaccacatttgaccactcgtgcccagccctagggagccactaatcctttatctgctgatcccatcacttcaccttcagcaaattaaagacaaaaacaaaccccatcattttgttgcccaccaatgtacagtaccttacaaaaattaaaatgattgcaatgcgtatttattgggttagactgaagagagtcgatcgagaaaatcagttttatctttaaaaaaaaatcagattgctgaagctctgaaaaatctttcctcctcactagggtagaggcgcttgttgtcacaattaggctttttgtagtgctgttaaacagaaacactctcatcttttcagttccctgagaggggagaatcttggaagaacagaggtttacaaatcatttagcccaaacgcccctttacatgcagaggcccagagaggtggagggacttgcccaggtccctcagctcctgaatggtcaagctaagaggagaacctggtttttaaaacacctcccccgatcttcttttcattcccgtcctaaatgcctcgtgattcagatatgtaatgggcacagacgaagctgcagtaagcacggcctccttcactgctaatttgcattgtgacggcatcaccttcctacctctgaatactctaaaaattcccattagaagccttttattactgttttaaaaatccaccttcatttccgcaggtcaacagggaacatttaggaagcctcaagggagcacatactacaattactttaaccagaaaagtaataacaataataataaggttctcgaggatccgcacgaggccgcttactgggaggctgaaacgccctgcgagtgacagctccagcgatctcaggaaagacgccggccagtccacccctccccatcgcctgctgaacgaggcagggagatgcataccgctccaggagctcaccaaacatgcacaggaaggggaaaagtgggggaacaaagcccggagtggaagaacacagccccgcagcccgggaggacaggagaccgcgccctccccgctgcggcccagcgggctgcagaggctgcggcaccgcagtgcggggcgcgggactcacaccccggcgggcgcctcccgcccgggcgcagcgcctggtctcccggcgcagccgaccgggccgggaggcgagaggcgagaggcggcccggctctgcacgcccgcccggccgaccgcccatgtcgcggagcatcctcccgcgggcagggagggcacggcggccaccgcgctgcgggcccgggggctgcagacaccggctgtccagaacaggccccacccgccccccggggcgctcacccgtccgtgcgctcatcccggagccggctgtgctggccgtcagtccgtcagccccggtggagcggggccgggagaacaggggcggcgccgtggccggggcgagcgcggcgatcaacaggcggctcccggccgggcgcggcgccggggcgcgcggctgcagcggagcaggctgggaagcgtagttcccggctgagcctcgccgcggccccgcagtcccccagccccgcccttccccgacaggtgtcctctcccggaatcggggtctgaaccccgccacagctctgcaggggaggaagcacctgggtcggggagaagcctgggcaggct

SEQ ID NO: 13921 - DNA, 2300 bp, Homo sapien
aaattcgaaggttctaacactcgagtacccaactatcagacatatatgtatttaaatgtaaattccaccagacactggatgaatttatcatttccattgattgtcatggttaagtattaaaatttaagataactgtatcctcaagtgtgtgagattgtcatcttatgtgattaatgttgtttatctggaatttaaggaatatcccttcaatttgtctttttgttcctttctttcttacctagttcgtaagaagagagttgaagcagaccgaaggtaaacttccttgaggagaagtgaagtttcactgtggtatggccattgaaaaacaaaaactcttcttcttccccatcaggaccattttatcaaagttcgttcatttccgttaaccacataactaataatttaattgttattcttttttagcactacttatttatcttggattttgtaatatatgcaattgttttatttgctcatgggcacttctggcaacttgacaaatggaccgatgcagattttagagagtgacgacatggaaaatgaatttaaccactttcttattgggttgtcttgctttcttacatgaacttgtttttttaatcactgaaaggaatttagtgtataatatgtgtttgtaactgtgattatgatagaggcctatctctgtttacatgcatagctttgagttaggctaaatacatcagaagtgttctactgaccacataagaagttagtattgccaatctttcactgcatgtgaaaatgtgaccaatttagcacaaattctctcttagttccagaaaaatcagtaaatgcacatgccctgttgattggagatcagtagtgtcatcttcataaagcaagacaacattatgacactttaaaacagtagcaaagaagtctatttattaacccacaaatgtagcatcaagccagactcacaggtagcaaaatgaattacacacctacttttactgactattcaacataaattgaatctttaacatgactttaaaggctatttacaaagctgttttaaagtttttcaaacatgatagaaattttctaaattttagtaagagagaagcttttaaaacagtacattcctgaataaaacaacaatattgtatcttaatcaaggctgtctgatgcagatgattgcattttttggcaaattttagaagcatttattgctttgtctttagtgtaacaagatcactggattaaatataaacattcaggttaattatctagatttttgtccacagtatatgatccatccagacatttgcaaacgtcaggagaaaaatgtgaattatttatccagatgcatgtcatctcaaggacaaagcctgtgaaagtacaagtgagatggttgcattgtagtatgcattaatctttcaatgtagtggtgtaaaaatgcagtgctaaactaatgaagcaggtgactgcagcctttggctcaagctcacaactctgataactgtcagtgcctgaggttgtgattggtgacattctgacactgcccaaggcaactcaccctctattcctcctttctcccctccctttcttccaattcattgtcttttttttcctcttttctctgtaatttgttactaaacaaattccagaatttgtttagtagctgagtgttcctgagttgcctagtagcaataaaacaagtgaataggaaaataattaatatattattctatttagcttgtaaaacacatggaatctgtttaagatagcccttgtaaaattgaacatttacctgtattgtaagtacccacatctgtgtctctgaagtcctttgaaacatctcattatcttgaaatttttttaatgtttgagaacaccataagcagaatattctaacacctttggcccctgaaaatcctttaattagtttatggcttcatctccttatctatttaaaaaacatagtaaataatgtttatggttttcagtctgatttttccttccctttcacccatttaggtgtgatgtgttggagtcaacttgtacaggcttgccaactgttatattttcaagaattttgcaaactggttgttcaatacagccattatttaaaattaaatgatgtgcacttacaactgaatgaattatattaaggacagaagtaacaaatactgtactcaaaaatcttacattttactattttctaacctcttagattatttacatctagtaggtatgtatgtagaaatattaccaaacagtatgctactgaacgtatcctctcaactccatgttcactaccttcttgttactacagt

SEQ ID NO: 13922 - DNA, 2300 bp, Homo sapien
agctgggtatggtgttgcatgtctataatttcagtactttgggaggccacggtgggagggtcccttgagcccaggagttcaagaccagcctgggcaacatagggagaccctgtctctacaaaaaaaaaaaaattaaaaaaattagttgggtgtggtggcatatgcttgtagtcccagctgctcaggctactcaggaggctgaggttggaggattgcttgagcccaggaggtcacggctgcagcgagccatgatagcaccacttcactacagcctgggtgacagaatgagattgtctcaaaaaaaaaaaaattgatgagatttaggagacacatcagtctgatcagcagtggaaatcacattagaatttgactcaagagaactgtgtctcatctctggatctccaattactggctctgggaccttatacaaattacttaacttttctgagtcttcattttcttatctatagaaatggaggataccagtttattctttatagagttttgaggactagattagttttgaggattagatgagatattacaaatgaagtgctggcccagtggttggtatgtattataagtataaacattcttatgaacctgaattctgtaggaaattgctctcagaaagctgttatctccaagagattgacccaaagatggtatagaaaataaaatgcaatggccacaagattgagtgttgactgtcctctaagtatttgcaattgagaagggttttttcctggccaagcacggtggctcacgcctgtaatcccagcactttgggaggccaaggtgggcagatcatgaggtcaagagttcaagaccagaatggccaacatggtgaaaacccatctctactaggactacaaaaattagctgggtgtggtggcacgtgcctgtaatcccagctacttgggaggctgagacaagagaatcacttaaacctgggaggcagaggttgcagtgagccgagatcacaccactgcactttagcctgggcggcagaacaagactctgtcttggaaaaaaaaaaagaagggtttttttcccttaaaaacctaaaccatcagtgatctccattgctgaaattagtgggtgccagttgcatgaaattccaggatgtttatctaacctagggtcctccctcctctgaggggaagaagtagatgccaggagaggtttaaaccatgaagtggctcgcacactgggtgtagctggaatgtacctcaagcaggcacgtcagtccacttctttggctgcatttttgaaaggtgtgtcaaagtttagcattattcctggggatggtctactcctgaagagcaggccaggaaaattcccagtaagtgactaaatgaataaatggaaaaatgtcgcagttccctctcctcagagcctcgcacaaaaggtagccattacataggccactgtcaaacagtcctctgagagattcccacactcttcctcttccctctagactacccatctgccccaatcccccccttgagcagcctattctgttttttctcccactacagcagccagccccaccgcctggtgtagagcttgaagatggaaagggaagataggatgggcagaaactgccctgcaatagctacatcatccccgaaacgcatacctaagaaaaccactaaggtcaccacaccctggaggtgacattcgcatgatttatgcctctcttgggctttagattttattcctttacttttctataactctgtcatgaccagtttaaaggccccaatgtcatgtcctcgcattaacaaccaaggctacaatgcaagccctgccatgtgcgcttctttacaaaaggtcaaagtaaaaaggaaatctataccaaagagcctctagatactatttccagcttcggggaagtccatagtaggtacttccacgggtagagaacattatcttagactgggataagggttggtattcgcagtccccttcctacgttctgcccattgtaaagaccagggtcagcgttgagcctcgcccttcttgctagaactacaactcccaggatgccccgcggcacgggagtgcgcacgcgcgtcggaggcgaaggaggaacccaccgcacctacagggcggtcgagtgagggagctgctggcgggtgggtctggcaactctttgggaggccgacgcgggcggaccggcgggtgctgggaaccgagcctcggcttgcggccggcagtttccgtgggtctgtgaagaggtcggcggcccctgcgggcgccagtcaggtaagcccagcccggtgctttccaggaag

SEQ ID NO: 13923 - DNA, 2300 bp, Homo sapien
cagcaagattgggagtcaggcatggagcaggcatctcaggctaccagaaagaattggtcacctagactttcagtcaggcatcctcgtttgcattgtcctgtaagtcaattagttgataaatagttcccccttcatcccttaagttttgtttttgtttttgtttttaatataggtaagtgggactctacctaaaattttgcatcatacttatgggtaatatctttttcatatattatttatcaaagtatgaagttgagtattttgcttgtaccatttcaattctgcattatagtagttcattgtataactgaaagaaatgatttcttcataagtgacattaaatatgaacattcatccaattgaatttacaaaatctttccaaaattataagggagaaaaatcgggtttacttcaatctttaaaaatctggcacctcttagtaactttcagtatttctaaattgctctaaaattttataataaatagattagggttttgcaatagtcttaatttttaagccaaaggttttctgagaccttaggttttgtagtctaaccagcttatgtggttatttaaaagaatattctttgtgtttttaaattgctatttttaaaaaagctttttattacccattttataaaatgttatactcatatttgtctgaatttttccagtattcctacatgaaattgtatgtattaaaaactcaatattagtggcaaatattaatactattaaaatggattttggtgctatattcttgtagctaaagcctagtagaattctcaagaataggtgaaatacactttcaaagttgcctgtcatttaaaagaccaaataagcattttgtattaaataaattagcagatggttagagacttcaaggagagttagcttggtcatttaattgcgacttcatgttatttgattgaaataacccacatccttgctttgtataagatattcgctctggagaagttacatgtaaatagaattctataaattgttttccagttgaccgagtatctgttgtgtttttgtttaaaaagaggattccatgacataataaaaattattttaaaaaatgttttgggccgggtgcggtggctcacgcctgtaatcctagcactttgggaggccgaggtgggcggatcacctgaggtcaggagttcgagaccagcctgaccaacatggagaaaccctgtctctactaaaaatacaaaattagccaggcgtggtggcacacacctgtgatctcagctactcgggaggctgaggcaggagaatcactagaactcgggaggcggaggttgcagttagctgaggtcgcgccattgcactccagcatgggcaacaagagtgaaactccgtctcaaaaaaaaaaaaatttttttttttttataaaatgttactcatatcatattgtacgttatatttaactcttgctgtcattaaaataagatgacaacatttatgaagttttataaaatcttacattttagggtctgtgttcccagggctgcctcactttttccctaaaaaactaggaaccactgttaacctcccagcagatgcaaggatcatgctttctctggagtccttagtcacttccattctttgcaagtttagtactgcccaaatttactcattctacagtgttactgcactttgaacgtattgacccatgtcacccaagagaagcaaacatatggatgcactagagacaactcgggttgctgctctcagttaagggctatgagttcttggggtctaagtatctgtaaaattatcctctccatcagctctcactgatcattaatgtttctggatatttcttaccctaagatttgcttaccaacaaatcaaagaaacgcttcactaattatttttaaattgagaaaatagtattcagaggcaaagatttttatattcttttttgagaccaagtctcactctgtcatccaggctggagtgcagtggtgcgatctcagctcactgcagcttccacctcccagattcaagtgattctcctgcctcagcctcccaagtagctgggattacaggcgtccgccaccacgcccggataactttttgtatttttaatagagacggggtttcaccatgttggccgggctgttctcaaagtgacctcaggtgatccactcgcctcggcctcccaaagtgctgggattacaggcttgagccaccacactcagccttattcttatattttaatttggtcattcttagatctacagattgaacatccctaattgaaaactttttgagtactaacatag

SEQ ID NO: 13924 - DNA, 2300 bp, Homo sapien
gtcaggagtttgagaccagcctgactaacatgatgaaatcccatctctactaaaaatacaaaattaaccggatatggtggcgcatgcctgtaatcccagctactcagaaggctgaggcaggagaatcactcgaacccgggaggtggaggttgcagtgagctgagatcacgccattgtactccagcctgggcaacaagagcgaaactctgtttaaaaaaaaaaagtgtagccaaaacataaacaaaaaaatctgtccaagagtcagaagtgatttgttttatactattcatatgggaaaaacacgtttattctgatagccaggaatatggacatggtgactcaccagaccaaactgtaattcaatttattaagatttagccaggcactgtggcccatacttgtaatcccaacgtgttaggaggccgaggcaggaggacctcttgaggccaggagtttgaggctgcagtgagctatgatggcgccactgcgctccagcctaggcaacagagacactgtatcaaaagaaaataaatttaatcaaagtacttttcagggacagtactctaaatgaaaatgaaactgaatcactgtcaaatggaatacttgtttttccagtattccagatagttttcaggttatctatgtatcttctcttgcaacatccgcttcatacacaaaagctctaggattgatgattacatacccagtcccacccatttggaccctgttaagcactgaagtttactacaaaaatatatatcatataatctccaaactaaatattcattgttgcttgtccaagaccaaaactctcataatggcctaattaggtaatgtaacacaggatgtactcttttctcactttttcttctaagaaacagagccttactctgtcactcaggctagagtgaagtggcgtgatcatagctcactgcagcctccaactcctgggctcaagtgatcctccattctcagtttcctgagtagctagggctacaaatgcatgccatcatgcctggctaatgtttttatttttaattattttattttattattattatttttttgagatggagtctcgtgcccaggctggagtgcagtggcgcgatctcggctcactgcaagctccgcctcctgggttcacgccattctcctgcctcatcctccctagtagctgggacgacaggcgcccacaaccacgcccggctaattttttttattttagtagagacggggtttcaccgtgttagccaggatggtctcgatctcctgacctcgtgatccacccgcctcggcctcccaaagtgctgggattacaggcgtgagcgaccgcgcccggccaaaaaaatggtcatttaaagcttaaaaaagctgtttgttaacatgtatattatttttaaatgaattagtaacttaaaaatttattaccgtattagtaagaatacagtaaatatcaatacccgtacctgtaatcccagcactttgggaggccgaggcgggcggattgcctgagctcctgagtttgcgaccagcctgggcaacacggtgaaaccccgtgtctactaaaatacaaaaaattagccgggtgtggtggcgggcgcctgtcgtcccagctactcgggaggctgaggaattagaattgcttgaacccggacagtggaggttgctgtgagccgagatcgcgccactgcactccagcctgggcgactgagcgagactccgtctcaacaatttttaagagggtaaaggggtttgggatgaaataactggagaacagctgctcagtaagaaacaaagggcttcaatcctgactcgcgataggtttaatccagccagaggcccttccccagagagcgccagtcaccgcccaccccatccacacccgcaaccgaacgcaggacccccccgccccctggtaagaatcctggcaaataacagatattgacgaaatggccgggcttatataccatgcatacccaggcgagaacaggttcactgggcgagcgaaaactaggtcacgtaaggaaaggagtgtcttcggcgaatctttgcgacactgtcgtgtttcagtggttccgtgccgtaaagagaggccgggagctgcccctaaccgaggcagcagcggacgtgagcgataatggcggatatggaggatctcttcgggagcgacgccgacagcgaagctgagcgtaaaggtgggttcgctggtcttcggaggatgggtgcgtggcaggccttccgctgtgggagccggacaaccgtggaggctccagcgccgcgggcaagaggtggcgtttcct

SEQ ID NO: 13925 - DNA, 2300 bp, Homo sapien
tgtccgtgtgaagagaccaccaaacaggctttgtgtgaaaaacaaggctgtttatttcacctgggtgcaggcgggctgagtctgaaaaaggagtcagcaaagggtggtggattatcattagttcttacaggttttgggataggcagtggagttaagagcaatggtttgggggcagggggtggatctcacaaagtacattctcaagggtggggagagttacaaggaatcttcttaaggatgggggagattataaagaaccttcttaagggtgggggagattacaaagtacactgatcagttaggttggggcagaaataaatcacaatgatggaatgtcatcagttaaggctattttcattttttttgtggatcttcagttgcttcaggtcatctggatgtatatgtgcaggtcactggggatacgatggcttagcttgggctcagaggcctgacacccttttgaaatgctacaaagattctgtcaatttagtggtctcccttactattgtaagccaactttgcattatccacaggaagtcagcagtgacactggattaaatgctccttgagggaaggcacagtgcttggtatttattctcccaccttctctgggtgatcagacattgatggaaaaggaaggtaaacgagttctcaaagagtgagaggaaaaatgtcctgaggatcagaggagagcctagagcagaggcagtggggctgaaggtacgagctctcgttgcagaagctggaaattctgcggttggaacaagtctcccctttctcttggtttttttcactcattacctcttcttcacacctggtactcagctgacgttgttttaaatattaaaaaatataaagcattcaagctcaccccaaccacttaacttcattactctgtgatttttttttttgagacagagtttcgccctttcgcccaggctggagtgtcctggcgcgatctcggctcactgcaaccccccgcggggttcaagctattctcctgcctcagcctcccgagtagctgggattacaggtgtgagccaccacacccggctactttttgtatttttagtggagacggggctttcaccatgttggccatgctggtctcgaactcctggcctcaggtgatctgcccgtctcggcctcccaaagtgctaggattacaggcgtgaaccaccacgcctggccctttgtgatctttttgaagtggtctttgcctctttcttgaagatgcccataataatgactagaagggctattctatgtctggttctcagcaagatggtgatgaagtcattgaaaaaatatgctgacctgcgtctctaatttcataaatacttaaatttcacataaacactgaaaaggctccttggactcaataagccatgataagtaatgtaagtttgcttttagccaagtgggcccaagaaggcacccatccacctttctacgtttcatagtgcatcccttcccaaattcaaattgtcctatcccagttcctgcaacaagccaggtactctggcctcccagtctttgctcacagaaacaccctccccacctcctggttatatccgctcctccgggatccagctgaaaggccaccttggcgaccactcctgaaagccttcctccatactctggcagaatgaatgaccttagtattggcctctaacgcgtctgtcttgtgctcgggctgtcgccttccagccaatccatcttaaggtccacccttcctggagactgaggcctcttcctctcggattgcccagtgccttgcacgtagtaggtgcttagtaaacgctggcactgggtttggtcactttgttcccttaatgccagggcaggtagtagagcaaacggccccagctgtcttcctccctgcccgcccgcaggcaaagcccccaggagacgccggacgagccgcgtgcctttcccaccgcctccgcggcgcgcgcagcccagtcacgggcgctggaaattccggcgcgtgcgggtgcgctgggcagggcgggggcgggagaacccgtggagtgagcctgtgacgtgagggggcgtggcaccgcgaagccccgccccctcttcctcgccctctctcgcgggtcggggttacatggcggcgactgcggcaaagcgagagcctcggagacgccgctgccgccagcacagccggagacctgagccgacactgggggcagtccgcgagccccgcactctctcgatgagtcggagaagtcccgtgagtgtgtgtgtgtacgtgtgcggggtgcgccggcggggcggctcgggagggcgccgcg

SEQ ID NO: 13926 - DNA, 2300 bp, Homo sapien
ggtgaaaccccgtttccactaaacaatccaaaaaaattagccaggtatggtggcgggcgcctgtagtcccagctactcgggaggctgaggcaggagaacggtgtgaacctgggaggcggagcttgcagtgaaccaagatcgcgccactggagctaaataacccgagtctcacagtgcatctgattgctacgcgaacacgtgcgcaccaccaggccttgccttggggactggaacaggtgcaggtgggattcccatcaaaggctcttctctcagtcctgaaaaacaatataccgggggccgggggccgggggccggggcggggcacggcagccctaccctgggggaggcgcggccgggccaagaaaaccagcgaaggcccggccccccagcagaggccggaccatggttgaccagttgcgggagcgcaccaccatggccgacccgctgcgggagcgcaccgagctgttgctggccgactacctggggtactgcgcccgggaacccggcacccccgagccggcgccatccacgcccgaggccgccgtgctgcgctccgcggccgccaggttacggcagattcaccggtcctttttctccgcctacctcggctaccccgggaaccgcttcgagctggtggcgctgatggcggattccgtgctctccgacagccccggccccacctggggcagagtggtgacgctcgtgaccttcgcagggacgctgctggagagagggccgctggtgaccgcccggtggaagaagtggggcttccagccgcggctaaaggagcaggagggcgacgtcgcccgggactgccagcgcctggtggccttgctgagctcgcggctcatggggcagcaccgcgcctggctgcaggctcagggcggctgggtgagcacgcggcggacaccgggacacggggcgggacgggcagccgggaagcgcccacgaggctggcacggtgaggaacccaccgcgccaggcccctggaacgaggtttcgtgaaagcagaaaggctcgtttcagcgggcctggaacgttcgctgtgaagtctggggtttctcctcccctggcagaaaggccggcagaaatcggccttcttagacggccgtgaaccgttccgaagcagctgcgcaggcttaggtctgctcacttggaccttgccctggccttagccgtcggggacttttaggggggcacccacgttaggtctgaacgttttgctcctatagaaatccccaaccaatgaagtcagcaatggcggggccccagccaggtggggtgtttttctccttcgcctattaaatgcgcctttggagagactcagacccattgatcacaaccccctacgcctctcagcctggccagagaggttgtggagtgtggtggtcgcccagtggtggcgctgacccaaggttccttaatttctagtcctctgcacccagtcctcggtgagaacgttctaggcccctggctttcagctgcaagccttcatctctgtggtcaaggttagagggacaggcccttgccctgcagctgatgatcaaggaaagccacctggtgatgagcccactgcatgcctctgggggctctgagctagaccccatttctttccccaccaccttattggcgttgattcaatgactgaagtggcccatgttatcggatacctatagccaaactattaaaaccagcaagttttttgatccgaaatgtagcctcctgggggcagtttccatttagacctttttctttttttctttgaggcggagtctcgctctgtggccaggctggagtgcggtggtggatcccagctcactgcaacctctgcctcccgggttcaaggattctcctgtctcagcctccggagtagctgggactacaggcgcgccccaccaagcctggctaactgtgtgtgtgtgtgtgtgtgtgtgtgtgtgtgtgtgtgtgtgtgttttcagtagagatgggctttcaccatgttggccaagatctcgatctcttgatctcgtgatctgtctacctcagcctcccaaagttctgggattacagacgtgagccacctcacctggcccccatttagactttctatagtgacaagttgggttctatctgagaagggaaagggagtgggaggtgtgttagcaggaactcctgccttgttcataatgttagtgttggtcttcaaccctctgggccggtgaactcccttcagctgcgtgcctaagagcctcacctgagccctgtctcaatacggcatctggcccctccgggctctctgtacctgaagaagagattag

SEQ ID NO: 13927 - DNA, 2300 bp, Homo sapien
aagagctctttgttcatcggcccgttgagcagacaccacagcagctgcatagagaggctggctgacagccacagagcatgtaattctgtccatctgattcagggtcttctctgcagtggatgccctttggtgggcattcaggtgagatgcagatatcttcagtctgcccattcggagggattcagccacatatctctttccaagattttcttgtcaccaatcttccagtcctgttctttttaaggccctgaccatccagctaaaccatcagcgactgtccatgaatcaatttaggtctgtattctggccatctctcactccagacatagtggacagccttgagtttctgctcactggaaggattctccttcaccactgcccttcacagtcacccctgagtgagtgtgagtgaatactgcagctgttctctttcatgtggtaccagcacatcatacagacccatctataatccaggctggaggtttttctccctcagtcaactggacataggcagcatcccaagaagccatagttgtagaatgagggagaggaggcaaagcaacaggagttgatgttggaagagtctgagccgcctgctcatacaatttacttataccttctgaacctgcctgggctgtttctaatacaccatttccatttgatgataggtggctgctgtatacatccaattttatggctacgtaggtcagatgacatccagttcatgatgggagctcaagcttcatggtcaggcattctgcctctatcaaggcctagtagcaaggcagaacctgcttctcagaaggagagtagttatcttcagaagaggttctagatttactttagaattctagaggtctgtactctctcctgtcagtgcttgccagaggctccatacagcatccctgttggacaaagtcccactggatctgttggatcacaagacccaagtggtagggcagctttactgcagcctgaaccttctgcagagtcttctcttattctgctcctcaatccaccagcctgtcaattgggttgaaatagcacaaacacagtatatgttgccttcaaagtccaaaatggcttactgttccaggctgtgtcccccaaaattcatatgttgaaatcctaacccccagtgtgatggtattcagagatggggcctttgggaggtattagatcacaaaggtggagccctcacgaatgagattattgtccttataaaagagaccccggaaagctactccacacctactgcaatgtgaggacacagcaagaagcctgttgtctatgaaccaggaagcaggtccttacaagacacagaacctgccagggcctcaaccttggactttttagccaacaaaactgtgagaaataaatgcctttatttataagtcacccagtctatggcattctgctatagccgcctggacagactaagacagctgccaagtgccgtgcctcttttgtagtgatgcaagatgcagcaactcatctttcaccctgggagggctatttcaacatgctccagacccctgaacccccagaaataccactgctagtatccattctgcatcagtctggatccaatcaggagaaagaagccacggagtaatatgaactgagaaagtttaatataaatattagatggccgggcgcggtggctcacgcctataatcccagcactttgggaggcagaggcgggcggatcacgaggtcaggagatcgagaccatcccggctaacacggtgaaaccccgtttccactaaacaatccaaaaaaattagccaggtatggtggcgggcgcctgtagtcccagctactcgggaggctgaggcaggagaacggtgtgaacctgggaggcggagcttgcagtgaaccaagatcgcgccactggagctaaataacccgagtctcacagtgcatctgattgctacgcgaacacgtgcgcaccaccaggccttgccttggggactggaacaggtgcaggtgggattcccatcaaaggctcttctctcagtcctgaaaaacaatataccgggggccgggggccgggggccggggcggggcacggcagccctaccctgggggaggcgcggccgggccaagaaaaccagcgaaggcccggccccccagcagaggccggaccatggttgaccagttgcgggagcgcaccaccatggccgacccgctgcgggagcgcaccgagctgttgctggccgactacctggggtactgcgcccgggaacccggcacccccgagccggcgccatccacgcccgaggccgccgtgctgcgct

SEQ ID NO: 13928 - DNA, 2300 bp, Homo sapien
tctctttgagaatttaatgaaagccacgaggacaaaaggcatacaccccaaatttggcatataatttcaggggcttcatttccaagattaagctatagaaaaaccaaaaaaaaaaaaaaaaaaaaaaggaagaaaaaagtaataatttcaggggcttcacagcctcctggatttgtgacccttgtcatcacaaggtcaataatcgtaataagaaccctatactataggaggagagactggttatctgtggtttgccaaaggctagaatcacaagaatcagacttttagggtcaaaaggaactttctggatgatcaagcctaactattccctcacctacaggctgatacgcagttgtcgaatctgtgcgagaatacctgcactgatgcagcactcgctacctctccaggcaacccattccctctgtggctgtgggcagagtggaaatgagagctcggcgaggctgaccaggcccacctgagcttactctgatagccttccctctgcttcagaaggcctgtcaccagtcctctctcctctcacacacaggaaaacagaaaaccatccctcttactctgagggtatgatcccatgatccagagcagaaagcagtcccatcgggggaaactcgtagagtgctaacgcggttttcatgtccaaacaggatggagacccgggaccctttgagaacatcccagacgttgatagtgtaatcattgtatccagcaaacagcaggcgaccttgaagcagggtgagatgatagctgttaagccagttccttgcttcctgtttctcattacatgactgttactcactcattcagtaagcagtgattcaggcgcactgagtcctaggcactgtgctttgcctcaaggattcaaaggggagaaagcacagtccctgtccctgttggaggatgtggggctgaaaggaacagatcactgtagcatcccatggtaacagccataatgcaagtgctttacacacgtaaagtgctatgggaccagagaggaagggggattaaggagggcactgcagacacaagtaaattatttttagtcatttgctagttaacaacttgtaaaacttgtttaaagagagaaagttaaagtgacatttgagttggctcttgagggttgaatcggagtctgtcatgcagagaaggcagggaaaagatgttccaggcagtagcaggaacttcacgtgcagttagtctagggatgtgtctggggaaatggagtggtccaggtagccagcctgttacctctgctttaactttctatttttctttctttttttgacatgatccttctggagctatgctttttcaccagcagcttcccacaaaggagccatgagcttcaaggcactgagaagggactcattttttttttccctttgagtcagagtctcgctctgttgcccagggtggagtgcagtggcacgatctcagctcactgcaagctccattttccaggttcaagcgattctcctgcctcagcctcctgagtagctgggattacaggcatgcgccaccatgcccaaccaatttttgtatttttattagagacaaggtttcaccatgttggccaggctggttttgaactcctgacctcaagtgatcgcctgtctcggcctcccaaagtgctgggattacaggcgtgagccacagtatcccaccaagaagggactcttgcttcacctccaccttacagaaaagttccctttggggcatgaagagaagcaaaggctggggagaaaatgcctgagagcattgtggaagtgaatttctgacacttcattgccttgaaggacagcattaggtgggtacacagccttcatttccccctggagtgaagttgcctggggcaggacaaagtgggaggtcagaagctcagaggaggaaaactggtgcaaatatggatgatttcgcatactggtccacaggaagctcagttgatgaaaaggaactgagcgatgatggagcgctagtttcattctggtcctgtcttacagtcctgggaaaagtttctgaaataaaatcttaccactgagggagaagtccacgctggatgctccaaatatgatgctttctttggaatagatggcaacctccctatctgcccgcaggtcatagaggcgacactggggagcaaataaataaagaagcacttacttctggcttcagtttggtgacgtgatgaccacagagctacaggtaggtgctagtgacttgcgtagtttaaaagatgaaggaaaaacttcttagttttccctactgttatttcatcctttagtccc

SEQ ID NO: 13929 - DNA, 2300 bp, Homo sapien
tgagatcgtgccactgcactccagcctgggcagtagagcgagaccccttctcaaaaataataaaataaaatgcacactctctcacctgagctgtttcatctcccctgaaccctttgcttctaacctcctttgaccatcagttttcaacttaggcttccctctgtccagaaagcccccctggtttccagggctgagttaggtgccctcctgtgtgagggagaccacactgcatggccagtttactcatcgatctcctgcactgaggaagtcagagagagagacagagagaaaatgttatggtggtaaccaaactttttaaagtatttatgaattcttaatggcagaaataaaagaagatgttgataaatggagacataaacccaattcttgattgatagggaacactgtaacttaaaattttaaatggccatttttctatatacagtgaatgcagtttcaattaagttattttatggaatggtgtaaactgacgctgagacttctgtgacggatgctacagggactgattcagtgggccatgttcagggtgccttttgattttcttccagggcgaacactggctaccatgtccacccaaggctgaggttatactgagcgttgtcattattctcttagcatgcccttggttatacactgaattaattaggacatgggcttgtatgagagaagcccaaatcacagtgacttaaaccagatgggagtttgttctcaccttaaaatctgagctgctacgatagctcattctgtcttcgcaacccatttcctaggatggtgctcagtctcctgcccccactggcctaccaccatgccttctttccagctggttggtagaggagagttgcgcttatcacttctgcctgcatcccattagccagaacatgatcacatggccacatctggctacaggaagactagaaatatagttttcattctgccacctgcccaggaaaaacaaaacaaaacgaactagtgtttctcaatggggttcagtattagcattttgggaaggacatttcttcattgtaagggaatgttccatgtaagacatttaccatccctatggcctagccactgaattccagtagcaccccctgggtttagtgccattcaaaaaatcctgcttttatttaaccatagctataggagacagagagaggggacactgggggcacaaaaggtctcttccagataatctatgtattacctggaagataatacacttggtccctgaacttcctaccagcagaaggaaatcatagcccatgtggccccaaatggtatttaatctagaaatcattttgacattggaatatggatgcgtcagatactccatgaattcataatgctttcaaaaatataatgtgcccacactgtgatggactgactggggcagagctgaaaatggttaacatctgtcatccagcttttcaattctccatccccgtctttcaggccaatgtaagttagtcacacaaagtcaagcttccctctcctttgccaaatgttttgactctcacctcccgctggtaggaggaataaataatgttttaaaaggactcctcctcctgcggcttttgtggaactatagggtaggtcactggtacgagaaaggagaaacagcgtgggtgcggtgactcacgcctgtaatcccagcactttgggaggcctaggaaggtggatcacttgaggtcaggagttcaagactagcctgaccaacatggtgaaaccccgtctctactaaaaatacaaaaattagccaggcatagtggcatacacctgtaatcccagctacttgggaggctgaggcatgagaatcgcttgaacctaggaggtggaggttgtagtgagccaagttcacgccattgcactccagcctgggcaacagaatgagactcagtctcaaaaaaaaaaaaaaaaaaaggagaaacaatggaaggtgtggggaacacagctgggtgaggcagagcggaggggtttaaagacatttgctctcattctgcctctggcttataatttagggcccatatttctcactaatcattgagaagacaatgactatagcagtaataattatcatttattgaatgtgatttaattggcaccatgccagattctttgcatggactgtcttatgtaatcttcacagcagaaaatatgcattattactctcacttttcagatgaggaaactgaggctgggcaagaggaagtcatttgccaaaagtatcgcaggtagtaaatggtcagtgcagacatccaatgtggctttgtgcgtctgat

SEQ ID NO: 13930 - DNA, 2300 bp, Homo sapien
aaaccatctgacaaatccaccatatgcgacattctataaacagccaatctaagatttcctgtcatgaacaacaaacagtaggtagtgtctgttctaggttaaaagatcttaaaaagacataacaaatgaatgcaatatgtgagccttggttggtccctggatcctggcgacaatcagggaagattgaatatggctggcttattaaatggtgttatggaggttttgttgattttctcaaatgtgataaggatgtggtagatagacaggagaatgttcttatttttaggagatgtaaatttgcaagtggaagtgtttagaaggaaaatgtcatatctgcagtttgcagtcaaatggttcagaatttgctcctgtagatatgacaaaatgttaagtctgtgaatctaagggaagggatctgggtgttcagtatactattttttttttcagttttacagtaggtttgaaaatcttcaaactggccaggcacagtggcttacacctgtaatcctagcactttgggaggccaaaggaggattgcttgaggccacgagttcgaggccaagagttcaagaccaacctggccaacagagcaagaccctgtctctatttaaaaaaaaaaaaagaaagaaagaaaagaaaatcttcaaagtaaaagttggaggaaagggtacaatatatgatactgctaaagagaatatgttgaaaagttcatgtgattggaaaagtagacacatattctgtgactctgcattaatctttggtacttctttctttccatcctagtggtttggataataagtgttctgtgtaccccttgacgtttgacaaaaatgaaaacatggctgccaaaaagaagtctgttgctatgcacaccaactacctgtcggcctgcagcttcaccaactctgacatgcaggtaaataggcagcccccggtgtcaggttgacctgccaaggagcactaaagaggagctgagaggagaggaagctttcggcgtctctctgaacaagatggctgtgctccagtagtttgctctaagaggaagctcctattgtttctcattagttattattattttaataacatgagaaggttggggctagtgattgttggtagtgttgagataaaactgcatggcatattgaaaatcctcctctgattgacttggcgagggtgggagtggagcagggaaccccctggggtgcaggcagttactgtgccctggtctgcgtgctaacgtgtgtaaagcttcactgagctgtcgggcttcagagctgtgcactgcatgcatctcactttacagtcctgttttaaccaatgcaaaaagaaaatgcttcaccatattaaatctttgctctactttaaatacactacagtgaaaacaacacaacctttatcactttaagttttctttagcaagtggtgaaagcaccgcatcgtttatttattcacacttattcagcaaaccttctcagtacctactacccatattgccagataccacgtggctctggggccaaaagctcagtcttggccctcagggaccttcatgaaaaccaataatggttggacagtgggggaactggggagctccgagcaggaggggttggtcacagacttgctgctgccagtgaagagggaccgctgccactccaggcggccacagagtgtgagggagcacagtgggaggcaggcagccgagaggtgggtggggccagatcccagggctccctgagtgcctgggctggaccctgtaggtgacgggagcccttgcaggggtgagtcagattttggtttgtttaaaagagaaaagtgtctgagttagattaaagccttccatagtttactctggcttcagtgaattgatgtcaggagggatggggaggttagaggcagggaggtcaggtggctgggtaattgttcaattgctgactggagggatgttgggacttgcagtgtcaccattgtgcccctgttgtttacacctattatttgagcctaaccaggaatcttgcagacttgttcaccagggggcgctgtggccactgactggtgcagtggccaaaatgagatgtctttgggcctgaggcaaaccaaagcaacagaggacatttaggctggatgaaggcaggctcagggggctaccacgaccatcaggcatctgaagcccctctgtggagacccatcagactcgctctgtgttgccccggggcagggttggggatgaaagggggcaccagtaggtgagaaagtgctttcttttccaacaagcagcttagccggagataaagggaagtcac

SEQ ID NO: 13931 - DNA, 2300 bp, Homo sapien
cctctgcatgaagctcaaaacgggtttggcgaaaataatctgaagtgagcctgagctggcactctgattgcctggggggaatccgggtcccaacacttagcaggggaccttcggtaagtcctttaattctttgtgcctcagtttcctcatctgtcaaatggagaaattagatgacctatgaatacttttcaccatgttggccaggctggtctcaaactgggagaaggatttctgggaaaacttttgctttgctttcttgatagggagcaaagagagattggtgtccatattcccccttcttcctgccttggatacagaagtgatgtttggagctgtggcaatcatattataatcatggggcaaatgccactgctctaaggtgtggagaagaaaggcagaaggagcctgggtcccttggtggggggtgcatggtgcagctgaacaacagcaggtgatcatccacctttgctcttgttatgtaagaaaagtaactctcaatttgcataactacattatttggggtttacagttagtgattgctggacaggatttctaagcttagagtgcctcctatttaaagaagacccctaggaaagcacagcacacgctagatccaggtcatccacttctcttaagtgatcttcagagatcaaaaggtaaaggccctagcacgaaccccatttttccattccacatagaatgtaaagggtggcatcgattaggaatggcaggagaacaacgtcaaggtgtgcaggagggcaccgtgggaggtgctcagcaaaggggagatgccaccctcagagctcaaaagtgagcagatacaaccacttccccaagcctggcccccagcccaagctctgctgaggaggagccctctgacaaagtaaaggaacgctgttttggccaagagccgctgaacctggctatttaatcgctcactcataaaaatcacagagccagttctgaattacggtggtggtggtgaagaatgcaagtttaagatcgctatggcttttttatgccaatccaccacatcgatccaaaagctttttaaacagccttaaacgaactgaacggttgaatttagtgagctcctccgtttcccttctctctccgtcatccagctccccgccccaaggataggggagaggttggaaaaatgagctttgaaattgcagtctcataaaagcaaaactgagaaaagatacaacagtgatggagaaagccagacgggcattaaaaaacaaaacaggagtctctcctaggccgcgcctacacgggctcgccgcgctcgctcgtcaccaccgacaccccaccccctgccctccgcatgggaggggcaagaacgcgatccgttcgcagcttccaggcaggtgatgaggatagctagtcccgcggtcctccgctagctggcggcgggggtcggccaggtgcccggaccctccgagggccccaccgccgcgcgtcccggggatcgggaccgctacccgcgcctcacctgcgcgcccgggccccagggccctgctcccgggcggtggcgcgggcctggctcccgtcgcagccacgaccgcccccaccgcccccgccgtccccgcccgggaagtggcgagccggtccggcttgccccgcccgcctcccggcccgcactcacgctccacatcgtgcagcttggctcgctcctcctccagcttgcccttgaggctctcggcctcgctcttcagcgacgccagcgtctcgttctcgtgcagcccctcggttgccatcttcgcgcggggacgcagcggagagggaagcggagagcgggaatgcgctgagccgcggcgggcgccgctccagcagccgtccccggccccgagcaccgccccgcggccccgccctccgcgatgacgccagcagctgcgggcccggctgctgcgcctgagccccaagaccccgcacctgggcgcgcgctctggcgcagtgcctggtgcgatgtccgcgtcagcctctctcctccgggagaggcagggagtgtgacgcccattttaccagcgggcaaactgtggcttagggatgctgggtgatttgcccgaggacgcacacagagggaagggccaagccgggattccaactcgggactccccgcttctggggagaccggtgaggcccccgcgacatggccctcccatccccaagcctctcgtgcagatctccgctctgtgggacttgattgcgggctgcgggcccgtggctcctgcaggcagagagaggacgggagaggagacggctacgaggcttggccgcaggtagctacggtgctc

SEQ ID NO: 13932 - DNA, 2300 bp, Homo sapien
agagccaggatttgcccccaggcagtcagatctagatagagcctgtgctcttaaccttttgctttacaaactctcaaacaggtgtaatatttttgcttttatatattcttatcttatacttaataattgtatttatatatttattcatttataaacatgtttgttatatgtttatatttttaacatagtttatacagatttatatattttatatattttttatacatccatttaataaactagcattaactgagcacctaccatatgcaagtactatgctaaatatctaaatactaaggaacagcgacaagtaaacctattattatacggatgggaacggaaaagagaactagcagtgaataagcatctgctatgtacggagaagtctgctaaagtcttcacccacactatcttacctttttttgttttgtttttgtttttgtttttgttttttttgagtcttgctctgttgcccaggctggagtgcagtggcacgatctcggctcactgcaacctctgattccagggttcaagcgattctcgtgcctcagcctcctgagtagctgaggttacaggcacgtaccaccacgcccgactaatttttgtatttttagtagagagagggtttcatcatgttggccaggctggtttcgaactcctgacctcaggtgatacacccaccttggcctcccgaagtgttgggattacaggtgtgaaccaccgcacccggcccacaccatcttacttaattctcataacaatcctatgaagcagatcctatgaagaagcttttccagataaggaaacggaggatcccagactctaacctgcaaaacaactatgtacagattaacatcgagtaccttcaacttttctcagatagagaaggcccgggacagcaagtggaggctggcttctctgggagggagcaggtacagagaggtggggacagcacccaagattctgcttggcgatgttctcgcagcatctgtaactttgatctgccttctcattctctgcacaaacgcatgcaagatcacataggagggaaaaaggagaaggcttgagttggatcatccacaccaaagtccagagcactagggagccagcctgtctgggtccaaatcctgtctctccctctttcttggagcatgccccctgagcaattactcagtctttctgtgccccagtttcctcttctgtaaagtgggaataagtgtgcccattcaagttgactcctgtgaggattaaacaagtgcaaattaaagcacttagaacagtgcctctcacacttcaggcgcttgcggagaggggatgcttcagtctgacagaagtcgctaaacgtgcatcctggcagaactgtgccagcccttcattctaaagggcaggaggtggcctcagaagtgagaggtccgagatgcctgggcgtgggctcagaagccccaggtctgagcctgcgcgcccacttgacccaccgccatctccttttgccgcccccaggccagggacctgattcctgcgtgaagaaaagagaaaataagggtgggcctcctaatgccgcagagactccgtctgagaacccagcaactagttttatttttgtatatttagatcaacaaacgaagagggtttccggttccttgttgggggagcaccgtagctacctgcggccaagcctcgtagccgtctcctctcccgtcctctctctgcctgcaggagccacgggcccgcagcccgcaatcaagtcccacagagcggagatctgcacgagaggcttggggatgggagggccatgtcgcgggggcctcaccggtctccccagaagcggggagtcccgagttggaatcccggcttggcccttccctctgtgtgcgtcctcgggcaaatcacccagcatccctaagccacagtttgcccgctggtaaaatgggcgtcacactccctgcctctcccggaggagagaggctgacgcggacatcgcaccaggcactgcgccagagcgcgcgcccaggtgcggggtcttggggctcaggcgcagcagccgggcccgcagctgctggcgtcatcgcggagggcggggccgcggggcggtgctcggggccggggacggctgctggagcggcgcccgccgcggctcagcgcattcccgctctccgcttccctctccgctgcgtccccgcgcgaagatggcaaccgaggggctgcacgagaacgagacgctggcgtcgctgaagagcgaggccgagagcctcaagggcaagctggaggaggagcgagccaagctgcacgatgtggagcgt

SEQ ID NO: 13933 - DNA, 2300 bp, Homo sapien
aaaatcccgtttggccaccgtgacctgccaaaagttctcttgccccatgcctgctggggacagaaggttttcatgaactctttttactgaaaatgccctgcatttaaaaatgtttattttagacccttctaaatttttttttttttttttttttgagactccggagtctcgctctatcgccaggctggagtgtagtggcatgatctcggcttattgcaacctccgcttcctgggttcaaacaattctcctgcctcagcctcctgagtagctgggactacaggcacctgccaccacgcccagctaatttttgtatttttagtggagacaggtttcaccatgttggccaggatggcctcgatctcttgacctcgtgatccgcccacctcagcctcccaaagtgctaggattacaggcgtgtgccaccgcgcccggctgacccttttaatttttaagagtgttcaatccgagatgaatcatttgaagtatttttatatgtatatctatttaaaactaatatattattaaagcttaattgccatgccgtttatcttctctgaaagaacttcaaatcttacctgccaacatattcaccataatttttttattttttaatacctttcatacaataacttttttaaaacaacctcagattgaaaaagcaacctaaattactttcgctctctaatcagcatttcaatgtatttatttttaaattttctcaaaaagtaactaaaaaattgtgtcggaccctacttttgagaaatctacgtttcccaagttttatgggaactggctattccttgtcccggcacaccttctcattccttcctttcagagcctaaaacctcatttgataagcactcctagtctctggcctgtggatccagtgctattctgtcaccaacctaagaatcccaattgcaccttctgtttctgacagtcacaggtgacagctgtgattctataatacagactggtgtcttagaggtaggaataatacatgattatgaagcatcaccctgctaatacataataatgtctttttatattataagtgattgagtttagttcatttcaatacattgtacatgaaaaaatgaaaagtagaactttgtaatactttaatcaataaaattaattaccaaatgaattgggtcagattctttcattgcgaggagatgacatgtctcttaagtgtacaagttgtatgcctttctttacggtcatactgaaagatgctagaatctttatagattcataatatctcatttaaagtatattaaaatgtttagagaagaagtaaatatgtcataagtgctggcttaggctgtgtctccagggcgcttccacactgtcagaatgaggggctacttggcagagaattggcagggtttctgatcctgagctgcggcctccatgccctttctagaccttccccacaccatgaggagccatcactgttggttttcggcttccataactcaggatttatgcctgttttatagcacttaccctggactggaagccagaaatgctgcccatttcctctgtaggcctgtgagccccagagggcaggtgccacatcctcctcatccctgccttcatcctactgctgatgaggtgggaagagaactgaaggagcaaagtcccgttggaggactgtgtgtgtgtggtggggagtcaaccatgggaaaaagtaggtcatgtttggggacagggagacctgtggaggctgaggagtttatgtgtggaaaaatggggaaagggaggcactcatcccacagtcttgatcagttctacaaagctgacagtggcaaggagaccaaaatagagaaatgttaagaacatgtggcccaggtgaatgtgagggctgctcagtgagtgggcgcagacacagaggtcaaacctgccaaggcctccctccacagaggggctgggcaggttccaggggtgagtgagggatgcagatggcagtgcgtgcccagcagggagcatggaagtgctgtggaggaaggaagcaagctgagcagcactccagagaagataaggagattagccagtgggagacgtgcttcacacctcaagctgcgcgctggtcctcacctctcaccatctgctctgtggctcccagtgctgactctggaaggtatgtgcatgctgacattcggttaaaatactccagcttttgaaatgctcagaaaagcatccagatgagtacagggcacagtgttagcaggtctttctgtgcggtgggagcatgggtgaggggttttgttgttgttaatccgtagaatctaat

SEQ ID NO: 13934 - DNA, 2300 bp, Homo sapien
gggcagacaggagtgctcagggtggtcttggtagtgtcccaggcaggcagggtatcaaagatcagtgcctttatcctcaggacagattgcaccacccccgccctatgacaacagtggcaggtaaggcagcggagtccccagacacaatgtgcttcctctgacactcctggctttgatcccctttgattttccaggtggacatacatcgagttctacagtcgctacggcattctcatgaccaagcaagagctttccttcagcgataaaaaggaggtgtgcaaggtggttttacacagactcatccaggtcagtttccccacctcctgggatcatggtctccttcctggaagcacatctcccaaacatgctgtttcatctttgtcttgaatgctcaggactgtaatcatgaacacctgaaaggaaagaaaatgtgccctgagcatttgtctgctgaagagaccatagcagagtgctcagtgggccatgagtccccgttagggacccacatccgaactccggcctccccagtgtcctcgtatcctgtttagctctcccacgatctaacccagtcctctgtggaccaggcttataggatatggtcaactggggttgtcaccaagccacatgggctccaggcatggtgccttgtgtggattgacatcattgctgcagcgatgagttgtgatgggaaagagatggggagttataaggtccagcaaaggggatggtgaagagaacccaaaatggagacagaaaaccaaacttccccagtttcttctactccaatgtggagaccacgagagagtggctgaagttctctggcagcccaactgagaatcgccgcaaatgacactcactccccttctcacccacaaatggattcctcagcctaagtcccatttcttcctccagggtaattttaaacaaacaactcaaagtatacatttctagatcatgatgtgagttttctgccttaaatgtcaaaatcacaatatttctggcacctttgaatccctaaagctcttttccaaatactgtattatagaaaatctgacagattttaattctaactatatcatttttctcttccaggattctaatcagtaccagtttggtaaaaccaaaattttcttcagagcaggacaagtggcttatttagagaaacttcgattggataaactgaggcagagttgtgttatggtacaaaagcacatgcgtggctggctccagaggaaaaaattcctccgagagagacgagccgccctgataatccagcagtacttccggggtcagcaaactgtgaggtatgttggaatcaaggaacacatgtggaactgtggggctttctgtgctgatcatctccggcggggaggactcatcaaggacaagggacctttctcctgtgacccagggtgcagacgtgcatgggtcccctttgtggtcgtgagcattagggcaagaaaggtccgtctctcaggggcaggtagtgctggctctgcctggtgtctgtgtggtgagccgacacccagggccctgcagggaggaagcgctggtgagagtgttactaaggagagtcagggttccggaagctcagggagaggcccggggcccctttcctatgggaactgaaaatgcataagatcagcaaggccctagtgaagatccaaaggacagatgtcaagaatagccagcgaccagcctgccagcaacaggtggggtgcaccatggcagagggggtccctgcaaggcctggcagcaaaccaatcacagaacccctaagcaggaagaccacagcagccccagccaagccaagggctgaggggagggtggtccaccagctgcgctgatcctacctgcctcgaggggtcctgagagtccacacaaccctgccagcccactgaaggaccacggtcattccgggacttccagggctttggtgtacctgctggaaagcacaagaccagggtgcccctagataaactttgtgtttctctctgcctgctctgccccttctttgggatgctgtgaggatgcttgagaaggccggcgtttagggtcaggctgcgtctgcaagcctgacttcttcctgagctggaggctgaactgtggcagcatctggccttctctgcatgaccagcgtggtgtggcatggatcacacagctgggctggcttgccctcctgtgcttctgtgcccagttgataacagcagtctttggggaaggaaatcacagttatcttacccgccaaggccacgctcccttcccatttggggctcaccagagcctgatcatcctgccct

SEQ ID NO: 13935 - DNA, 2300 bp, Homo sapien
gattccatttctctccctcataggtatccactcttgcatatttaatgaatgactttgtaatttatcctccttacctctattcacacatacttgtacccatgaacaatattcagtattgcagtttttgtgagtttttaaatattaaagacttgggctagacatctattcaacattgttttttatttctgagtcaagtagatcatgtctattcctactaacagctgtagagttttacatgtatatactatttctttttttatttttctctgctgtctgccatgtatatactattttatttattcccctattgatatttagatgcttccaactctttgataaataactatgttgtgatgaacatctacttaactgtctctttgggtgactgtgagaatttttctgcctacatttattttcataactattctcaaattgctctccaggatggcagtatattcccaccagttatgtaagcaaaaaaagtttttattttttttatttattttttttttttttttgagacggagtctcgctctgtcgcccaggctggagtgcagtggcgcaatctcggctcactgcaggctccgccccctggggttcacgccattctcctgcctcagcctcccgagtagctgggactacaggcgcccgccacctcgcccggctaattttttgtatttttagtagagacggggtttcaccgtgttagccaggatggtctcgatctcctgacctcgtgatccgcccgcctcggcctcccaaagtgctgggattacaggcgtgagccaccgcgcccggccaagtttttattttctcacatcctaggcagtatctgagattgtctaacctaaatgtttttgccaatatgatgggtaaaaagcaatatctcattgttgttttcatttgtatttatctgattactgctaaagttgacatctccttgtatgctaacaagccatttaagtgtccccatctgtgaattgcctattaatttttgtcagttttaaaaattggatttcttttctttaaccgattaacaattcttctatatggaaactactataacccaacattttaaagatattatccctcttttattcctaataatttcccggttttaagttttaatcgtgaatccatctggagcttatttttggatgcagtgtttgccacggatctgcttttattgtttttccatataacgggcccatctaataaatattattttatttccctatctggtccttaaggctaccgtataatgtagggccctgctggggggctccagcatgttccattactcacgtatccgttctcacgcaagtgtcacactgttttaatgactactgctttgttatgtccctaaatatatggcaggacaaatctctcctctttgagaattgtcttagttatacagggcttttattctatatgaaatatagaatcattgtacaattctccaaaagttctgtaggattctgacgccaatatattaggcatatatattgatttgggtagaagtgacaccttgaccatattaaatattcccagccaggaaaatggcatgtctcccgtttacctgggccttcttttaagctctttaagagaattttaaacattttctccacaaaggccaagggcatttttgcgagtgtaatctctggatactttatattttcactaatattgtaaatatcttgtattgcatagacaatgctcatataaaggaccattacttatttttgtatttgattttgaatacgatgaccttgctggactcttaacacatttctttgtgttcagtacgttgattcccttgggtcttccatttaaatggtcgtatcctctgctctttgaggagctaacactcgggccgggcagcctccggatgcatctgttcctgcctggcagcgcgccccgggccccaaccttctccacccgcgctcccgccaggtgcagccgcccggccccggccaatggcagcgccgactagccgggccaagcttggagggaccaatcccgccgctgccccctcccctcgccgccaactcgggaacgggaacaggaggccgttggaaaactttgggcaagatggcccggcggtgatttccgcggcggtctctcctgcgcccggcctctgcggcgcaggcccagcccccgagcctcgcacgttcggcagccccggcctggccccggcccctcctgcccatggcggtggccgagctgtacacgcaggtaggagggtccgctgggctcctgggagcgctgtgggggagccggccctgctaacgctgactcga

SEQ ID NO: 13936 - DNA, 2300 bp, Homo sapien
tcttgtaatctcagaactttgggaggctgaggcgggcggatagcctgaggtcaggagtttgaggccagcctggacaacatggtgaaaccccgtctctactaaaaatacaaaaattagctgagcgtggtggtggacacctgtaatcctagctactcaggaggctgaggcatgagaattgcttgaacctgggaggcagaggttgcaatgggccgagattgtgccactggactccagcctaggcaagagaacaagactcagtatcaatcaatcaataaataaaaatacaaaactcttctcctcctcatctccattaccttcctcttagtatggccccaaatatttgagtggttgaatgcatgcgttctggacttataagaggataattcccctttctgttttctcctcatcacttgaaaaaaatagaaaacgaagaaagcattcacacctacaagaactcgtccagttttttagtttttttttttttctcagtatactcagcatttctcgacagtcctgagaggtaggtattatttgaaggtgagaaaacaggcagagtggttaccaccttgcacacgacatgaagaaactgcaaggcgtaggagccaggcctcctaaatctcagtccagtgctccttccgttccgctggtcgtcactgcacacgttttctctttttatgtctgggtgaagaaagagtgggtcccagaaacatgaaagcgatttggttttgcaatgggaaggaacagagacaaatctgtaggactttcgactcagtagacattccctctagcatttctgaggggattgtgggcgaagaggagaggtctgagttccacggagtaaggactggccccgttcctttcagtgaatggtctttctccaaatacacacgcacacaacacacacaaccgggggcctcagccatgagagttgttcgtgatagaaatggtctaccagattaccatgacaggcactggggaccagttgtagttcaaagaaacgagagatgagggcactacaaagaggcagggattaaacaaacaaaaacagcaacaacaacaacgacaacaataaagaatgaagattattcaaccagaaacgacaatgagggtggggagaagatagaggatgaagacagcgcagggttgggagtagaaagaccacattcttgtgctggatgttcaaggatcaccgtgaggagagtgagggcggctttgcccttttgatgttgagttaaactgtaatacagattttccatgtaagtactccgtcattttcaggtggcaaccggataaacttcaggtgccaccatggagccgacaatcaccagcagcgaacaggacgggaagaaggctgggacagaagggtagttgcatctccgcaaacgcacaggtctaggaaagaggcacctgggctgtccccgggctatctcgtttcaaagtcacttaagtttctgtagcttagaagcggcccttgccctctggtatcgggagacgactttgctgcagacatcgaggtgctcggaatgaccttggtgatcaaccttaacctgaaattcccggtcctgcattgcccatctcccgggtcactgctgctgacaaggctcttctacagtcctgggttattctacagtctttcaagagggcttcccctaaatcctctccctaggaatgcttggaaggacgggaggagcagcctggaggctcccatcgtttattcggacacagtaacagcccgtgccatggctgcgctaccgcgggagctaggctccgcagcagagggccccgggctcgcttcggggtgggggcgcccggggtgtgccgcgccctcggggctcacgtcccgggcgggtttccgggcctcggcagggcgcgaggcggcggcggggccggctggcaggctgatgatgatgatgctctgtgctcgtagccgatgggaggcagcgtgagcccgagagagcccagagcagccgcggtggcagcgctggagcgcagcctcctcccgctcccataatgcacagggcggcggcggtggcggcggcggcagcggaggcagcatcgcgggccgccgaagtggctgcggcggcggcggcgacccctaggaccccgggcaggtggagcgctcgcggctgctcgcggcgagcccgggagtgatggcgaggcccctgcgggcggccagcgcctgaggcgccccgccccgccccgccccgcgcggccctccccgcccggccctgccctgccctgctccctgccggcggctgcgggcgcttcctagtccgctcgggcggccgcccaggcgaggt

SEQ ID NO: 13937 - DNA, 2300 bp, Homo sapien
ttctttttatccaaggtcacatagccaattttaaaaaaaaggccagatgtggtggctcgctcctataatcccagcactttgggaggccgaggcgggtggatcacttgaggccgggagttcgagaccagcctggacaacacggcaaaaccctgtctctactaaaaatacaaaaaattatcagggtgtggtggtgggcaactgtaatcccagctacttgggaggcagaggcaggagaattgcttgaacccaggaagtggaggttgcagtgagccgagattgtgccattgcactccagcctgggtgacagagttgagactctgtctcaaaaagaaaaagaaaaaaaagttttttttctttttgtagagacagagatttgccatgttggccaggctggtcttgaactcctgagctcgagcgatttgcccgccttggcctcccaaagtgctgggattacgagtgagccactgtgcccagccacagccaattttcttgaggctgagtttcatcattaagtgtatgtctatcagattttaactcaagttcacaaatacattgatataggacatatactagaacgtcagtcaatttattaataaaaatacaactgttaaatgcttcagtggcctaactactgcactcttctttctctctgcagttctgcttaagggaaaggcaaattttcagtatgttactttgtgagtatagaaggagaacaaatatgtcgtggatcttacagtttctcagctagcccagcgtgagacattcttaagggatatctttgtcaaacagttggcctgttgaacccttttattttcaatacttccttggctgacaaatgccttccttcgtttctccaaaaggagtgcaatattaactctttttgtttttctagttgcaattccagtgcaattcttcctgtctgagattctacatcctggttgagtttcgatggtttccaaattccttatccaggcatttagggtctttcaattgttcccctgcccccagaaatgcattcattttctgtggctttttactagtttaacttttagagggcaatcttatttccaagtttctgagggacactttgttggaaccaacaaacattgcgagtaactattcagatatcaagtagaatgaggattcagtaagaagccgcaggacttggcaaataaaaaggtcattgggggagctcaatgctagcagtttcggtaagcttgtgggagtggaccccctgggagtggacaaatgaatctgaattccttcgttagatatctaggaagtgctggaccctcagagtaaaatataagtaattacagacgagatccctgccctggtgcggcttatctgagaaggaaaggtgacctaaagtcacgacaattgtgtaatgatacagttcatgttgttgaggaactgtacagggctgtgacagcctttaagaggtggctctggcctagtgtagaggtttaggaaggaaaggttctgaggcagagacgtaggactggagatgtgaaggcgtggcagagtggagcaagacttttggcgtgcccaaaagacagcctgtgtggctacagagcggagagcgaggagaacagaactaggcgaggatgggtaagtggaaagagtaaaataaagctcctagaacgaggggaccagagtggacaggaaagggcggggaggggcggttccacttagaaactacaattcccaggaagcactcggcagccacaaacggatgtgaggtgaggcaggagcggcgacctttgaaggaaaaaaggaagtgtttggacgacagcgagcgggagaagcggggtcaagtaggtaggggtgcggtgcgggaggggcaggcgggctccggcgtgcgagggccttggccagcggagcgtttcgcggctccgtgtcgtcataaggcggcggccattttcgcgggcggaggcggcccggcgggccctgggagagctgggacgggcggcggccgggtggcctcggccacccgctaattgcatcttttcccggcgtctcgtctgcagagggagcactatgtctgcggaagtccccgaggcagcctccgcggaggagcagaaggtgagcgcgcggggcgtgagccctgggccctgcccaaggccgggtctggcgggcggcctgctcccgccaggcggagggccgcgcccgagatgcggggccgaggcgcatgaggccgaggctcctgcgccccacctttggcttcccgccgtcgctggctggtgcgccgacgaattgggagttccaacgtgccccgcgtttactccgaatcgtgcctt

SEQ ID NO: 13938 - DNA, 2300 bp, Homo sapien
gaagagaaggagatccaaggacagaactgttagaatcctcccattaagaggcaggttaagattcaacagggaggttaagtaggaggaaatccatgagacaatagtatcctggagatcaagagaaggaagttttgacaaacagggtgctggggaccagtgtgcagttttacacattaaggttcataatgatgcagagtggtgttagttgggaaagaatggctttccagacaggtcctcattgtggagcattgcccatggtgaattctccatttgaccaaagtctgcccccagaaattcaaacttccccttctgcgagtgtcactatcagaaacagattctttttatccaaggtcacatagccaattttaaaaaaaaggccagatgtggtggctcgctcctataatcccagcactttgggaggccgaggcgggtggatcacttgaggccgggagttcgagaccagcctggacaacacggcaaaaccctgtctctactaaaaatacaaaaaattatcagggtgtggtggtgggcaactgtaatcccagctacttgggaggcagaggcaggagaattgcttgaacccaggaagtggaggttgcagtgagccgagattgtgccattgcactccagcctgggtgacagagttgagactctgtctcaaaaagaaaaagaaaaaaaagttttttttctttttgtagagacagagatttgccatgttggccaggctggtcttgaactcctgagctcgagcgatttgcccgccttggcctcccaaagtgctgggattacgagtgagccactgtgcccagccacagccaattttcttgaggctgagtttcatcattaagtgtatgtctatcagattttaactcaagttcacaaatacattgatataggacatatactagaacgtcagtcaatttattaataaaaatacaactgttaaatgcttcagtggcctaactactgcactcttctttctctctgcagttctgcttaagggaaaggcaaattttcagtatgttactttgtgagtatagaaggagaacaaatatgtcgtggatcttacagtttctcagctagcccagcgtgagacattcttaagggatatctttgtcaaacagttggcctgttgaacccttttattttcaatacttccttggctgacaaatgccttccttcgtttctccaaaaggagtgcaatattaactctttttgtttttctagttgcaattccagtgcaattcttcctgtctgagattctacatcctggttgagtttcgatggtttccaaattccttatccaggcatttagggtctttcaattgttcccctgcccccagaaatgcattcattttctgtggctttttactagtttaacttttagagggcaatcttatttccaagtttctgagggacactttgttggaaccaacaaacattgcgagtaactattcagatatcaagtagaatgaggattcagtaagaagccgcaggacttggcaaataaaaaggtcattgggggagctcaatgctagcagtttcggtaagcttgtgggagtggaccccctgggagtggacaaatgaatctgaattccttcgttagatatctaggaagtgctggaccctcagagtaaaatataagtaattacagacgagatccctgccctggtgcggcttatctgagaaggaaaggtgacctaaagtcacgacaattgtgtaatgatacagttcatgttgttgaggaactgtacagggctgtgacagcctttaagaggtggctctggcctagtgtagaggtttaggaaggaaaggttctgaggcagagacgtaggactggagatgtgaaggcgtggcagagtggagcaagacttttggcgtgcccaaaagacagcctgtgtggctacagagcggagagcgaggagaacagaactaggcgaggatgggtaagtggaaagagtaaaataaagctcctagaacgaggggaccagagtggacaggaaagggcggggaggggcggttccacttagaaactacaattcccaggaagcactcggcagccacaaacggatgtgaggtgaggcaggagcggcgacctttgaaggaaaaaaggaagtgtttggacgacagcgagcgggagaagcggggtcaagtaggtaggggtgcggtgcgggaggggcaggcgggctccggcgtgcgagggccttggccagcggagcgtttcgcggctccgtgtcgtcataaggcggcggccattttcgcgggcggaggcggcccggcgggccctgggagagctggga

SEQ ID NO: 13939 - DNA, 2300 bp, Homo sapien
gccccaggaatgaccatttggggacctccataaaaggaaagcattaataagctaatcaaggtgaatacttaagaaaaatagcatatgacagtttgcataacttcaataggactcttcaatacatatttagaacctaatattactggtgccttctttttaataaaccaaattgagacgaacctgtttaaaaggagaccccaaatattagaattgctttcacaggaaaacttgggaaacaaaattattttatttctaataatttctaaaattgatttaatgagatgaccacacaaagcagaaatatagtctgacagatgtcagggcagagaaggcatcattccttttggtctaggcattgatctcttttggctcaggagagtcctgctgtctcagaacagtccttcatcatccctggtctagggttctcagaagaataatctgatattaaggccagcttgaaattgagttaactctagatctgacccagcgtaatcctgcaagccctcaaatctattacagagtttgcagactgaaagagagtctagctaaggcttgctcctcatacccaggatttgatctaatccaacaagcctttgtatgacctttgacctcagtgtgttcagtactttgtcagatcacttttactcatcatcattgttccaatactgcaaggaatctgtatatttgtttatttcatatcacacaggaatgaaacagaagtatgtaacatgtgtacgtgtgtgtatatatatatatacacacatatatagtaatatttatataagtttgaggaggaattaccacaagaataccacaagtaaaccgatttcttgaagtaaaggagtgacagtgttctcttgccttcggctatgcagctcatgagaaagtgtgggtcagtggaaagctagctgtcagttgtgataataatgaatcataaactcggaggtaacacattcacctcttgtttggagactgccagctttagtggttaattatatgtcttctattctgtatacagtttaactgtgtataaacatgatttgaactcctggcttatgaggtgtggttgttgaatgtattagccttaatcttaagactcactagatttcaaaaactggattatgatattgatatatttctcattttgattcagtgagtgatgtccagtgccacggatgagcttctgaaagcatgggtaccaagttacctattgatgtgttggtaatttggttaaagtcagatcagcagcttggggttttgtttcaaaacgagtactttaaaaataatattccttcaattattcataaccaagcaacaattgaatttaattcagtctttaccaggatacatattttggtctataataatattgagaattttttaagggctagtgttgctacaaattttgaaatgattccatgtatgagtaaatgaagtattagcctactttagatctaattaattaataatagtgagctttgttttctaaacttggggaaatgttcagataggaaaaagtctcttctttgagcacctattttaaattttataataatcatatgtacctaagacatcaaacatgctaattttacagagcttgtatttttatttgaaatattctgtttgctattaaaatgtgagaaaaattaaaactcaattttgagaagtttgaacttgatactctttagcaaagctattatgtttgaaataattgaactggaatattttaacccaataaggatgtattttgcttaagctactggaactattccttaaagttgctcctctgaacaaggagtaaaatttatatatatgaaatttgtgactaaagattttgatttgttattggaccttatattattgtaaaacaaaaaattgaaccttttaaaaaataatattatttcttaaacttttgaaattgtgttaattttagtccttgaaactgaattatattcagtggtattaccttgttgtttaaaatcttgtttgattattggcacaatcattctgaatcacatcaacaaatcactatttttaaagaataatttctatattgtttcttcagaccttatttaatcctaataagactgtggtgaagatgtttgttgtgatatatgatttacgagatatgccagccaatcatcagacattcctacgacaaagaactttttctgtacctgttaaacaagaagtgaagagaagtgttaataaagagaacatccgacacacagaagaacggttattacgctacctcatacatctgaggtaatgcttcaaattaatatgaaaatgttacttta

SEQ ID NO: 13940 - DNA, 2300 bp, Homo sapien
atatatctgttggccatttgcatattgtcttttgagaaacgtctgttcagattttttttgtccattttaaaataaaaactccaaatgtttgacctacctaagaggtgatttaaaatgcccaagtgatcagggaagaaattttcagcgtcttgctggtgtaaaaagcaccacagacttctggtcaatatggtagactaagtcaatacaggaagacatttgccccttcccccacacagagattctggaagaagtataacttccaaatgcataatgttatgtaagagcaagaaagaaaaattcccaaggtgtaacctggggcaaattttggtccgctaggatatttgaacctaaaatagcactagggttcagttcccctgctgagaacaggaatcaaggctgcaagtctgtaacaatcttatctgagaccagattcttcataaagccaggcacagggaagactggccttctataaatgagagagggggaaaatgtatccatctatttactcgggtggagtagtacatgggagaaaaagaagcacctgaaagaaattgtacctaaatctaagccacacatggtaggggttctgaatttatactacctatgagattcagagatgtctagctaagaaatagccataaaaactaaattggaacccatgaaatccatctagtattagtaggggaaacatgaaactatcccacatctataacccagggcagtgaggatttatttttatagcaaatacgtcttactgaagatgaccttagaggaaaaaaaattacaaagcaccttaaaagaatcagcaggagcaagaaatgggaggatgcacatataggaactctgttatcagagcaatttgagagttaaaaataactgtttaaagtattctgggagatagatgaaggcaaagatagggaatttagatgaaagaatgtggatttgaactaaatagaaattctagatatgaaaaatgcatgaagtgtatacacacacatgcatacacatacagatgaattaaacagcaaactaggatcggctcaatagagattttgtgagtgagtagacaaatatttaggaagcacctagaatgaagcacaaaagggaagagaaatagtaaaatacgaaaaagccataaagagaatgagatgttcaatgtaagtctggtagaagtttaaaaagaaggactaaatagaataagaaaatgcaatattagaaatgaaggcagagaactttccagaattgaagacatgagggtttagattgaaaatttcacaataagttcttactacagtaaataacatggtacacttgtacaactctccaaaatgtcgaggtggtttaaattttcagtgtcatctgtttcttcagtcactaattagaccagagagtcaggtacacatatttaatattctagaaacaaaactgtctaacttgtatatgattttacctttaattaacatttaggtctttgattttaggatattttgagctaggtggtgttttgctttaaatgtaatctggtatacagtgatggttgaaaacctaggagcatagtacttttcaaatctattctctgtaaagcattaggatgcttggaaatgttgcagtaggtggaatgggcaaagcgtgggcagtgctggtggggcctcaggctcctatctctattcggttttcttttttttttttttttcctttttaagttggaagtgtttcccacctcccaaaaaaatagagaagtatacaaaaaagcaaaatgttccttatattatatattggaattccatgcagggtttggttttggaaaaaaatgtttctgcttcttaaaaaatcaaaacctagtaaaagtgcttttatttgtcatctgttttttcaacactaataaaataacataagaacaatatgtaatgaacagcatgattttaaataagctattataggagaagttgtaatatttcaaagatatgcttaaatttcatttaaaaagtgttttatcaattcaagaaaaaaattaacagttttttttttaatatcacaaatgatcgttttgaccttaggttcctcaaagaaaaacacaatcaggttgctttgatctggattcttcattactacatctgaaaagcttctcatctagaaggtatttatctcaaaattcatttgtgtgtttcaaacagaatttcacaaaattctggtctttaacaataaataatgttgattctaaacatcagaattgtaacaggaatcttatttagagtatgataccatgtacacacgcagttattaaggatgagtgtggaaga

SEQ ID NO: 13941 - DNA, 2300 bp, Homo sapien
gtggataaaatttactgaggtttttcaaaacaagttagagagatttggattgactcaatatgaattttgtttgttgtattaaatttggtatgaataatatcaagagaacttttaagcttactttagagaaccaatggacttaatgctgctattataaagtagaaaagttttctgagctgctgaatttttatgtttgacttaatttttggcatcttggataatgtaaacatataggctgctaaacagctaactggctttttaggcagatggccatgagatagggtgtctcttaatcaccttgcacaatggaattagctgaatccatttatgtgctagcaattacaaagtccttttttctgttttaacaaatatttttaagttataatattcttgagctttaatgcttaagtgatctggtgttcttaaaaagatcatctcttccaagcataagctattatatcacttacattggttttatcagaattatatgcatggtaaagtggctaaaagtaaacctcagtggtaattaacgcaaacaaaaataagtgtatgactgctttacatttaaaataatatacaataataaggatctaacctttataatccaataatacagtatttttctgtgtgattctagaatcagtgctgctgatgtagacctacagtggaatttttcacagactccaattgagcatgtgtttcctgttcccaatgtttctcacaatgttgccttgaaagtcagtgttcagtccttgcccagacaatctaattatccagttttgacgtgcagtattcacactaatattggcctttatgagaaaagaattcaacaacataaacttaaaactcatcagcaccataacccaaatgaagcagaacaatgtggtacaaacagttcacagcgtctgtgtagcaaacaaacttggaccatggcacctgaaagtgtgttacatgcaaaaagtggcccaagtccagaatatactgcagctgtcaaaaatatcaaactatatccaggcactggcagtaaatctgaccatgggacatctcaagccaatattctaggctttagtggtataggtgatataaaatcacaagaaacatcagtgagaactttaaaatcattttcaatggttgattccagtatctctaaccgccagagtttctggcagtcagctggtgagactaaccctttaataggctctttaattcaggagcggcaagaaatcattgcaagaattgcccaacatttgattcattgtgatccaagcacttcacatgtttctggacgtccatttaatactcaagagtctagttcactccattcaaaacttttccgggtttcacaagaaaatgagaacgtgggaaaaggtaaagaagctttctccatgacttttggtagtccagagtttagttccccagaagacaccaatgaggggaaaattcgactaaaaccagaaactcctcgaagtgaaacttgtatttctaatgacttttattctcatatgcctgttggagagactaatcctttgataggctctttactccaggagcggcaagatgttattgcaaggattgctcaacacttggagcacattgatccaacagcatcacatatcccccggcagtcattcaacatgcatgactccagttcggttgcatctaaagtgtttaggagttcatatgaagacaaaaatttgttgaagaaaaataaggatgagtcctcagtttccatttctcacacaaaatgttccttgttaggagacatcagtgatgggaaaaacttagtacctaataaatgttttacttcttttaaaaataatagtaaagaaaagtgttctttgaaacatcaaacaagaaatcagtgtcagaacaatcctagtgaaatcatccaaagtacgtatcaggagacacagaacaaaagttctagtttatcaacttcctcaattttgtctcagcacaaagaaaataacttagatttgacaagcagattcaaggagcaagaaatgagcaatggaattgataaacagtattcaaattgcaccactattgacaaacagatttgtacaaataagtataaggaaaaaataataaatgagaactataatccaaaattctttggcaatcttcagtctgatgattccaaaaaaaatgactcaaaaataaaagttactgtgttggaaatgtctgaatatttgaacaaatatgaaagcatgtcctcaaataaagactcaaaaaggcctaagacatgtgagcaaaatactcaacttaatagcatagagaattatctcaataaagataat

SEQ ID NO: 13942 - DNA, 2300 bp, Homo sapien
atgccagaacatttcagagaaaatgaaatgttaccctcctgaatgttctctccgctctgattagatacaatcgtggagttaaggttaacaatttcagttgtacatgttattttactgtacatatctaagcactagaaaatgttactttttaaatatttcatgcctttttcataagaactttacctgaggccaaaaaaatggaactgccaatcttgcagtttataaaactcttctgatgtgaaaataatagactcattgtaaaaaaaattttaaaacagaagggcacaaataaaaaaaatccccttagacttgtcctaatactttcctgtgatccttttatgcaaaattatatctaaaaaaaaaactttttctaatgaaaccaaagagccttgcaaatttttacttgtctccatttgggctcatgccccatatgtactttgtctatagactgagtagctaatagctgcagcgcttgttaggattgggtttttttttaagtacagcagattcctgtcatctgtttgtgtttaaatgacgacaacatcacaacatgaaatgccatcatgtcacattgctatagcacaacaacaaaattacagctccccaacaataacatgctgtcaaagtgtcctcctgcccatgagtcagtgttttagaagttatgaagattatttttagcacagcgagtgtcttggaagcttgggttctgaatcctactaaaatccttagtgatttgggaaaatctagggtgggggtgggcttcctgttcttaaattctcccactccctgacccgcatagctgcccaccccccgtcccggtcacattaaacccgggttccattatgcgctgcaatccacttggggctcgatcacaactctgtgccagcatcccgggaggaggaggaggaggaggaggagggggggaaggagggggaggggggaggaggaggaggaggaggaggaggaggaggaggaggagacgacgactataattatcctccacgtctggggcaggcctttggatgacatctccccagttaccctgcgctctaatagcgcagctccgattcctggtctcagaatccaggcgcgcctctgccggctgggagcgcaaccgaagtgcctgggacgtctcgggcttccgggactctgctggtgtctcccagccgccatctccagcgccctcgcacccgccgggcacctgcaccgaaaacccggccccaaactagcgccccggggcgagcggcggcattgccatagtaaccgggcgccagggccgcggaggccgccggggaggaagtgacgaccggggtgggttggctgttgttgggacacgtgacctaggcagtgttttgacagggcaaacagcagagaaagaactggccgagcgagggggacggggagccggggcgccagagctagagacagcgggcgggcaaggagctggcagaggcgctgggcaagagggccggccggggctacgggcgggggaagcccgggggtcgcggggctcgggtgccagtcaggcagggcggaggggctgagcgcagggagcggagcgaggcggtggctgaggcgcgggtggatggccacaggggcgccggggagccgcttcgggctggtcgtctcgggtccccacggtcacctgaggcagccgcgggggccgctgcgctccatactccgctcccgctggccctgcgcctctcggagcctggggtctgaggtgggagtgtgatgtgagctgctgggcgagcggtggagagaagtgccaagaggaggcgggattgggacgggagaggagagcgagttagtcagcagaggtcggccgagggagcggaggagccggccagctcgagagcgccatgaaaacaactctccagcggggagaggggcagacgcggcgctcggtgcggcggggctgaaggaaatccggggccgcggcgggacggaaggggttgtgcagagcagggggcgagcacaggctgtaaacacctcccccggagccggccgcggaggactggttgggagttggtagggtcgccccgggacagcccggaagagttcgtttggggctgggggctgggcgggaggaggtgactcgggtttctgtgtaaacttggccgcggttgccgcaggaaggctagccagagggtaattacacaggtgaggcccggcggggcgggcggagggctcgggaggcgcaggggactggaagagttggctgcgcccaggcaccaggtggaagaatttccataccagccctgcggaggtgcctctgtttccagaggcgtttttgtacg

SEQ ID NO: 13943 - DNA, 2300 bp, Homo sapien
atccagaaataaaacatgtgagcaccccagaaactatacctcccagtcctcaaaaggtagccactatctttgtagatttattgtttatgaaggtatccttaaaccctattgttttgttttctcctgtcttttgaaaataacggggatggaattacatacagctaattcttttatgtctggctgctttgatgaacataatggtgaaattaataggccaatgaatggtattattttaatttcatttttctggttactacttgtagtaaaaatttttcatattgtaacttttgaatatttgttttgtgaattgttattatctttgcccattcatccatctgtaagagcctcttcttattgatttgcaaaaattatttattaataattatattaacccttatttgacaaatttgctcttataatttgttctccatttcattttttaccatttataatttgtaatggttttctttttaaactttccttttttattattgaaaattaaatatatcatcactgtaaaaaaatttcagaaaaccaaaccaaaaacacaacacaccatagtataaagatcattttaatttctgcttcccaattaattccttcttcccaattaaatgttaactattgttaacattttggttcatatcctttgtgactttattcatttatttgtatttacatgttccctatatatgtatatttatatatacaaatgtagatagagatatgtgtcaaatttttaaatacctatatatttgtacgtaaaattttacaaaaggagaattattttgtctgcctaataacatgtttttcaccgatcgatataatttacaccaccattttaaattatttaaatggtgttccattgtataaatttgctaattattaattcaacaaacattaattgagtctcttgataatgctgtatagaagcattgttttgtaggcactggaagcaactaacatacaaaattcctgcaaaggtgtggcttgaatgctagtggaggaaacatacaataaagaaataaatttttcatattctgtaaggaaatcctaagttctagaaagaagaaaaaaagcaaggaagattatagagagtaatgggttgatatgagggaatagagtattcaaggaatgcctcataaattagcaagaacataatttaagtatgggaacccactgtgccagcctttggggcaaaatcaaatgcaagtcaacaaggtgagttttttgagtttttcttagagcaatatgacattggttaacatttaaattacttccaattttaacaaatttggaagcaccatttttgttaaaatacttaataaatttttgcatgcgttcttacatttgttctcctcagttttcaaacctaccttgtccttgtatgtctttatgacaataatagtagaaagatatgagagtctatattaaaggatgttaatctagtgccatcttactccagagacataattcatatttatttagaggaaaaataaaacttaggaaaaaagaaaagaagtcttcaaagaatgttagaatatagaatatttaatttagaaatgaatttttatagctaagacaaaaaaattgaaatgacttgcctttagctgctctgcaatgtaatactttttaaaaatgccactttaacatcatggaatctttaataaaataataagcaagaactttgacacaaatattttttgttcccttaggttactgatgccaaattttgcccaagaccttttaatgtcttgcctgtgaagacaaaatggagtaacgttggctttcatattcttctatttgatctggaaaaccttgttgaacttttgctaccaactccactcagtgatgttgactcttccagttcattctatggtggtgaggtcctgagaagagccaagagcacagtggagaagaagacactgacactgagaaaaagtaaaactgcctgtggtcctctttcagcagaggcactagccaagcctattactgaaagcctggcccaaggagataataccatcaaattctcagaagaaaatgatggcattaaaaggcagaagaaaatgaagatctccaaaaaaatgcagcctaagccatcaagaaaagtagatgccagtctcacaatagacacagcaaaattgtttctgtcttgccttttgccatggggagtggataaagatttagattatctttgcattaagcacctcaatattttaaagcttcagggtcctatttctttgggaatttctttgaatgaagataatttctcactgatgttgccaggttgggatttatgc

SEQ ID NO: 13944 - DNA, 2300 bp, Homo sapien
ttcaactcacagactcaagtgaccctcctgactcaacctccagaggaactggtactacaggtgcacagccaccacgcctggctaatttttgtattttttgtggagatgggggtctcctcctattgtccaggctggtctcaaactcttgggagcaagcaatctattcacctcagcctcctaaagcgctgggattacaggcatgagccaccatgcctatgcagtcttgaggaaaacgtccttccatcccttaccaaaagatcttggatatattgatttcttttcttttgtgtatatatccagcagaggaattgctggatcatatggtagttttatttttatttttttgaggaagcttcaaactgttctccatagtggttgtacttatttatattgccaccaacaatgtatgagggttcccttctctccacatccttgccagcatttgttattgcctgtcttttggatatgagccgtttgaatttgggtaagatgatatcccattgtagttttgatttgcatttctctgatgatcaatgatgttgagcaccttttcatatgcctatttgtcatttgtatgccttctttcgaaaaatgtctttttgggtcttttgcctatttttatatttatttatttatttagagatggagtcccactctgacacccaggttggagtgcagtggtgtgatctcagctcactgcagcctccacctctcgggttcaagtgattctcctgcctcagtctctggagtagcatcgactacaggcacacaccaccatgagcagctaatttttgcattttcagtagagacaggttttcatcatgttgaccaggctggtctcgaactcctgacttcaagtgatttgcccacctcgccctctcaaagtgctggaattacaaatgtgagccattgtgtctggccttttgcccattttaaaactgaattattatattttttcctattgagttgtttaagctctttagtaccaccactacggagaataatttggagctttctcaaaaaactaaaactagaactaccatatgatccagcaacccgattgctaggtatacatccaaaagaaagaaaatcagtatatcaaagaaatatctgcactcctgtgtttattgcagcactgttcacaatagccaagattttgaatcaacctaagttgtccatcaaccgataaatggataagaaaaatgtggtacatatacacggtggagtactattcagccatataaagaaagagattctgtcatttgcaacaacatggatggaactggagatcattatgttaagtgaaataacccaggcaccgaaagacaaacttcacatgttcccacttatctgtgggagctaaaaattaaaacaattcaacttatgaagatagagagtaggaggatggttatcaaaggctgtgaagggtagtggggggtgggggagtcgggtggaggtggaaatggtaaatgggtagaaaaaacagaaagaatgaataagacctactatttggtggcacaacagggtgaatatagtcaataataatataattgtgcagttaaaaataactaaaagagtataattggattgtttgtaacacaaaggataaatgctgaggtgatggaaacctcatttaccctgatgtaattattacgcattgtttgtctgtatcaaaatacggcatataccccataaatatatacacctactgtgtatccccaaaaacttaaaaaaaaaaaaaaaaaaggttgaggcctcatctctgccaatgcctagggtcaagagttcacgtcacctgggctcttttgatctaaccccccctaactaattctctccagccctgagaggacaggcaaccgcaggctgctggcgggccttttccagccgccaccgcaagtgagagaaggagggagggagggagggaggcagcgggtccaggttgcaggaagggagagcgggtgcacccgcccgcgggcggctggggccagagctagcccggtccgcgcgctgcgggggcaggaccggggcggggcggggcggggcgaggcgggcggggccggtacccgtgaccctaagggcgagacccgccagcctgcctggcctctgccgctcctccgccccacggctcaggtaaggcaggcacccccagagcgcaggtcgggctgccgggtcccaggctggtggtcttcgtctgcccctggctggtgcagccgcacgccttcccgccttcagagcacggcgcaggaggggacggcccgcgcttggatacagctgggccgggaaagagggtgggcgtgcgc

SEQ ID NO: 13945 - DNA, 2300 bp, Homo sapien
agacatagcccctcatggagttaatagtcaatgtagtacatcaaatttgcaaacactgagaatatgtatatttaatccccagttaaatatttccttggtggagaaattggctctcacacactgatggaagcatttgctccaactattaaaaatcaacttggaaagttgtatggagaggcataaaaaatagggatacattttgacttaataattctgcttctggaaatctgtcctaacaaaatattcaacacagcataatttagttaaaatttagaaacaaacacccagcaagtgggaagcatgggaagcagtcgtattacaaagcatctatttgatggtctattatgcagctattaaaaaggataattatgaagacaatgtagcaacaaggtaaacttcttataatgtaatgtttaagggaaaggatataaactgtacctgtataacattacaaatacataaacaagtactttttcagtgaagcaagaaagaaatacactgaaaaaaagatactaaagttcttttagattgctattgtttgagatatatattttttatcttcctcttctatatatttattttaatgtatatttatttaatcttggaaaacaaattatactaaaagtccaatcctcttgttttttaaaaaattatgatttatttcactttgaaaaatggaatgcttcatacatttggatgtcatccttgtgcaggggagatgttagtcttctctgtatcattccatttttactgtatgtgctgtcgaagcaagcacaaaatgaactcttcttaaagaagtggggaaattatgaaatttcatctgaatgggtgagatatcaaattgcatatcatgttgtttttactttagaacttatggagctttttcagttataatatcatatgctacatgaataagaaaacaagaaataaagggaggaagggataaactattgctataaccaatacccactgtgtcaggacccaagaaatacatataggttggtacacaatcaaaggtcttatttgtgtgccggaactttcagaaatgaagcctgagagacctctattttatcccataagtcaggcacaggaagagccctgagtccagtcaaagaagtagcaatgaataagatgtgtaataaatgaggtgggcatgtcattctgtcagttgcttcctactgactaaccaagagcagataattctgcttctgaattcattaattttggcaaaaggtatcttggtctacctaattcagcttctccatttaacagtgaggaatctgaggcaggttcacattatgattttagtgtgcatttttgctttggggaggcctcttcatttataaacaatattaaaaattatatcttacaatgtcaaattaaaaatatagacttgggtaagcaaagacttttattctaaaggagtattgcaatggagagaaagtgacttgcagtaggaggaaggggactattgcaattagaagaaaactttgatcctgagatatacaaacctctcaaaggttaggcagaaaaggtcttttcttttctaggaaggaataaacaatactggaagtaacaggatgtcgaaaagtggaatgagttagggtgaatgatcttacagtagaaaagagaaaattctaccctatgatcacccgattttcaggaggggctcttaaggaggggttgtatcatggctcaggcaaagggcaggtcaaagctcaggggccaggagaaagagagaattctaactaaaattgggtcaagtcaaggtagcagatattctgtccacattggtcagtgggtgaaacagttcagctaatcattaatgatgcaaagaacggaatggtggagcgtctatgttcagctttgtcattaaaaaaacaaggttggcatcagcaagtcttaactaagtcacatgggggaggatctttccttgtataagctgttttctggaacactaaagagtgggagggttcctttaacccttcatgttttccaggatcacaggacttgggtaaaattcaacatggtcagtgactacattggtacaaagaccaacacattaaaataatatattacaagactttctttgacttaaatgttcttttgttcttttctctctgcccccattttgtgggcccccaaattattatgggtcctgggcaccgtccctaatggataagccagccctgatctgagacacagagaggctgagggtctctaagaccactaagctagctacagcagagctcagacaagagcaactaggtctagacctctttctacatttgcgactatga

SEQ ID NO: 13946 - DNA, 2300 bp, Homo sapien
tggctgtaagttgatgatgtaaaaccatttgaaacagatctgtttgtttgaagtggggtgtagggaacccctgtaaaaagagggattcctccctccccatatcttctctccacatgatctttctctgcccaatgcagaatagccttaatgagtttccacggtaattcttggttttcttatgaatagcttaaaaatcgatggatatttaagatgtaatccatcaatttttaagctattcatgaagtatctcaaattaaaaaacaaagaaaatatcagcagatacacagaagagtaactcctagcatcttaagtgaactgtgtttaataagtagttcctagaaacagctgtggaaacgaaaaggattaaataaacaaattccaagagggataagcctttccaaggtgcaaaacggatgcctgttgttttcgtccctggaaataattaccatttctcagtatgaattaagggtcaggctttgctcacacaaaggataaagtaaaataacaaaatttctgtgcagaacttgcacaatatttaagaaactcaaggagcccagaattctgtttgccccctcacctatttgccaaatctgggggtcatgctgaaggcctgggagctttacagagaagtctgacctgttcccataccttcacagaattaaggaaataaaatcccgcttgaggaacaggcctgcctcaaacacatagtttatcatcttctcatgatatctaccaaatttggaaatagcatggaatggaagggcaaacagaaaaacccaagacctacaaaggctgactgaattttcatagttatttagagatcaggaagtataaatctaccagtttccgaagaggaagcttggaacatgcctgaataacatgaatgaagcaccaacccagccaattattcactataatccatgattgagtagaagtgattaacacccctcacatgtaccctacccatcttacagaattcaacaggaaccctagaaaaaaggtaagctcaaccagatcctttatgtttccttaatatatgatatgcacatacaataaaaaattattgaaaatgtgaataagcaagaaaatgtggctgataatcaaaagaaacaaaataagcagactaacaatccaataatggatttagtctgtatctacagactgtaaaattgctattattaatatatcaaagggcagaagtatacatgcactaaatgtaggaatacatggagagtttcactaaagagttgaaatacgtgaaacaggttgatattctagagctgcaaaatacaatatatactattaagtccttattggatgggtttcacaagagaagggacatagagaagatactataaatataattagagatagttcaatacatctaaaggaagctctgaaagaaagaatactaattaaagaaaaagaaaatatcagtatatgagctacagcgagaaattcaaatatatgtgcaattggagtgccaaaatggagagcaaagacaacaggaaatcaatatttaaaaaccaaatcaatatttaaaaatcaaaataaccaaaaatgttccaaaagtaataaatggcatcaagttacgaattcaaaagtctaacagcacccaagcaggataaataagaaatgatcacaacaaagatcactgcagtcaaattattaaatatcaaagaaaaggaaaaaatatttaaaagcaatggtatgttcttttcaaaagagaagcaataaaacataaggttaattttccaatagtaactgtgaaagacaagagaaaataaaatgatatctttaagtgctaaaataaaaactagaattttattgactttattttactttcagggggtatacgtgcaggttcgttacctgggtatattatgtgatgctgaggtttggggtatgaatgattccatcacccaagtactgaacatagcacctgatagtttttaaacctttgcctcttctcttctccgctctgatagtccccggtttctattgttacatctttatgtccatgagtacccaatgttcagttcccatttttaagtgattacatgacatattttgttctctattcctggactattttgcttaggataatggcctccagctgcatccatgctgctacaaaggacatgatttcattctttttcatggctacacagtattccatggcaatatgtactaaattttgtttatccaatccaccgtggatgggcacctaggctgattccatgttgttgatattgtgaatagtgtgatgaacatgagagtgcatttgtatttttggtaga

SEQ ID NO: 13947 - DNA, 2300 bp, Homo sapien
ggtcaagtatgaattggcagggggtgggaaggaatatggaaagatgacaggagggaagcaagaagttactgatggagtagtgctgtgtattctgaaggtggggcttaagaaaaaaagtttatcattcttttcccttttctactccacagtctcttgacattcaaaagagtatgtcaccaatgattctttcttgtgatgtacattctcaaactttgactcactgtgactagcacagcccttaacctagagagtgttaattgtcattattctgggcaatgagggaaatcatattagctattttatcatagaattagtggagaaaggggtcttttaaatgtcacctttctccctgaacacattctcttcagttcttttcttctctcttttcttccatctttcttgacctctgcttcacacgtattctatttctttatgatcaaaattaagggggacatttagttgaagtgcacgactctgaaaataatttgctcatccttgacatctttcttacacatttgcaatggttttaatatttcacgctcactgcatttgatcctcacttccaaatatatgttatggcatcattactatgcatttattaattcattttatctttattactactttgttttcatttctattgacatgaattttatgacacatttagttacttgttagtagtaccatgttagtagtagtggataactgaagaagtgttggagttaggctcatgacgactaagaaaaatccattaagactaagtttccttatattaagctaagcagcaagaacatagaggccatctctctgctgacggaaaactggactataaaatgctattaatctgtcattagcctttgtagcctgttgcaatgacagagatgcctagctattaccgaggggcatgaactgtgttgttcatggtgaataagctgaccatgggcaagaggtcagcaaggggttttgtagttcaagtaagcataaggagaagctatcatcagtaatattagcatcttgttggttatattaaatgactggatttaatgcaataaaaagtcaaattcaatgtatcaaactcattccagagaaacaaatgttaatacctcttagaaaattattttaattgcaaaataatacatgcctatttaaaaactgaatattatcaagtttataacagggatttttctctttctctcacccattttcactccacagaggtaactacagttatcaatttcataattatttttctagatattttatgtgcgttcataaacatatatatataagtttagtacactcccatgtcagtatatatatatatatatatgggagtgtactaaacttactaatacgcaaacttgctttttttcactaaacatcttatgggtattttttatgtatgcgcacatatatttacctgtttcactttaattattcttcccattgattcatttaatcaatatgctattgatgaacatgtaaataacctagcttttattgctattatttaaagatgcaataaacatcgttctacaactacttattttaattctgtgcatttacctgtaggatgaattcagataaggggaacttgcggtataagggtaattaccaatatcttaaatatgtccatgactccttgagacattattctggagtttaatttgtgaagcagaagcacacaataactggtatttttataatgaaggtaatttatttagcaccatagccagaccaaacttgcaccaaaaatggtttgcttctgtttcctcctggaggtaagaagttccacagatcttacattttgattctttcctctgtgatactaacaggaaacagtgtgtccatccaggccatgtatatcttaaattttcaactatccaagaagatgagtcgtcagcaaatgtggtagctacagtcttttttcctcactcaacaaagtcctagaagcttgtatctttgcagctttgtgaatcgtttgaaaactatggtatccaggtcatctttttcacagactttataccatgaacagtggatgtttttcttacaagaagtcattttacccattgcaattattggttttattttgtctttcagggctggaggtggactttatggtattgacagcatgccggatcttcgcagaaaaaaaactttgcctattgtccgagatgtggtaagttacaactgtttaattctcttcgattgcatgtgtggtttttttccttactaaaatgtaatgtccttctcattcactgtctagcctgtaaatattccatggaataaaaatatatgag

SEQ ID NO: 13948 - DNA, 2300 bp, Homo sapien
tttcctaattatttttttaataacaagaggcagtcgttaaggacagaagtctgattcctttagatgaaaaatctctttatattctagctttgaatttggcagctattgtttgagcatttattgtgtgcatggtagttagatgggctcttcctgaatttagaaaaataatccaaagtatatttaactctccatgactttagcactccttcctagagcctttgagagcattaatagcaaaaataagaatagctgtttggaaatttgggagagagtcaacatttttatgacatttctaacctttaggacattccttgcctggctgtcacagaccaaacttttgagtcactttgtgtcttgcagggaacattttccagtcaccactgtcctttccatttagtgaatattaactacttgaataaaatatgcctatcagatagtttcaactatttactccagcctaagctaattttactatttaagaattatggactgtgtaaaccaatattgataaattaaaaacatattaattgcatgcaatttacaaatttgtagctattctagggacatgtttcaacagtgtagaccatttacaatgtccttttaaatcatctttagtggaattcattcttttttttgtcttccttttttttaaatgtcgtttaggtcctcaaagtttaaaataaaagataaagacaggtagactgctctttctaccactggaatattcatatcttttagcttcctctattcacactcattattaggaatatatttttccactctaggaaacaggtattacactttcaaataaatgaacatttacattaaattattgctgtcaaattgtatatgaatttatcataagtaaagttaatagttgacctttcatctcttgtcttactttctatacttaaattgggctcaacattcacaaattaggttcaaagaacattactgatattatcttttattgtagaaattgtgcttgcctataaattatcccatttaatctctaaatagtttatgagatattagtatgcctatctcagaaatataatagttcagaaaaaaatgagaatacaaattaggcaaacttacagtcatgtcaaagaaaattagagcaattactacctatgaacacaagtctttcgattattttcactgtatttcagttgcttctgtaccaaaaaaagtttgattttagcagtggcagttcctgtagacactggtacatgaccttttgctttcttactttaaactcactaaggaattgtggaaattgaaatcatggtccgttattaacttgtgtaatactgggcaacccagaaggccatacagaacaataagactatctagccagtagcttaaggttagggatccaataatggaattttagaaatctctcactgacagaatgatttgtgttacaaacaaaaatgcccagaaagttgagaccagtcatgaaaaacaatgtcccagaaataaaaaaagtttttagtggaaaatgagtattcagtcatttaaaagctctggatatattagagaaagagagttcgagtcggtgttctatcagttacattataggtcatttagtctagtagtgtccaaatcttctttaaacagctcaatcattttcttcccaagtaaaatcttacattctattttaatgtttagcaaataacagtgatgtgtttgaattattgctttccaagtgacatttgccacttatattctatctatttctcaattttattttggatacccattgaagaaatatgtgtggtatgtaacacatttgattgtgtctgttctgtttgctgcttttgaattctttttagaaaatttaaaccaaatttttgcacaacacctaatttagttcagtaatacaaaagaaaagcctgggaatcataggaggtcaatttacctgccaataacacaaaggagtactagttgttgtgaatctcagcatagcagttcattatgatatttttctaaaaagccacctgactccacagaatgaaagcactcattcattctcacttcctcctccttttcctccctcctttagccatcaaaaagtaatggcatttccattcacatcaccattgatgtttccatcataggagcagcagaaaagagttctaaacatggtgccgaagacaagactcagaccattattacagcaatgaaagaaagaatgaagatcagggagaaaaaccggccagaagtatttgaagtaatccaggaaatgtttcagatttctaaagaagattttgtgcagtttacaaaggcggccaaac

SEQ ID NO: 13949 - DNA, 2300 bp, Homo sapien
gttttaaagtagcccaaggacaatgaaaagtgaaaataacgcaaatgtgtatcatagacagaatatccactaatcttttctgctcctttttccccagaagtggcaaattttcattttatcagttttggttttccttccctctcttcctcctcctcttcctgctcctcctcgtcctcttttattataatcatctatcacttttgctcaggttttataagactggggcttacctgagaaatattaagagagaaagtgccttcctttccagagttccccccctactcttggctcagtttctagcattgctctttactctcaggcacagttatttctttggatggctccttgattcattatgtaaacagtcctccagagagcaccccaccacccttctaggtgatacagagtcaagaccaatctatatttatgtgtatccccctcaatacatccatgaaatcttttttccatccttaaatactgtgtttctcaaagaaaggaattgtcatattttttcatccattaaggcacctgaaacagttctggactaatagtcctctaaatactttcttcatgtgaaaatgttttaacattctttataagatccaggtgtagaacaatttaaaacttatgttttgtcttttactaaagagaagacattttttctgtgcctccttttcatagcatatgtagtttttgccaaagcctgtgttttcacagagcacctagctagaatcagtaaatggaatttcaaaggaccataggtttctttctgcctggggagggtatctataattgtaccagtgtttcttaagtttaaatcccatttgcctaatttctctggcctacaccctgaatctcctctacagtatactctcggaaagtacaaccagatgctagctaatacccataaaatttttctgcatctccccttgaatagggaaaaaaaaactgagaaaatcagctcattgaaatgtcttgcctgagaaattcttaaggagtgggaaagaagaatgacacatacccatttaggagagcgtctctgaataatttcttgagcttctttgacatatttcgttctgtgctaattatagatcacagtgagccacagttactagtgagtgctttgtttcctctagcattgttggtacgggaagagagaaagagaaccgtttatctaaacttaatagaatgttataaatctattatcatttataaacaggtagaaaaaaacatccttagttctatcatatatctctagacagtctgcatttccaagagatgtctgtctgtgcataacacttgtagtatgaaaaatgctaacatccctcagtgaccatatttattgtcaattaccatatatcttctctattatcttatttataaatattggaaaattttgagtttggttgaataaaaatagcaaaaaaaagtattattatatttatcagacacaaagttcaaggggtgttggatttccaaggaccactctgcttcgtcaggttggcctatatctgcaccactgtgtgattagaggatggggcagatggagtggcagacacctgacctagaatctcaaactggtatctggaaaatatgtggccggaagctaccttccctgtgaaattttgacaacccttggtatttttctcatattcaagaaacagaagtcaataaccaggttgataattgttacctaaacctgtcattctataaggattctgactgctacatcagcatgatctcatttgtttaaaatcttgcataagagataaaggcttaggccttctgggatatgaggtctgtgatgttgagtgtcatttcagagatgtctagggacctgaattagacgttaataacttagcaatgggaaaatgatggaaccatttttttgtatcttgcattgatcaaattgtattattccatttgagcttctctattagagtaataaattctgtcttccaatacttctctctaaatgcctcggcttatttttttttctttgtagcaatactttcatgcaggaggaaatggcctgaaaaagaatttcttggagaaaagcccagatcttcagtctctgagatatgctctcagtctttatacccaaactactgatgccttgataaagaaattcatagatactcaaacctcacagagtaagtaacacataggacctgagaataaggtaaactgaatactaaaataaaatttaacatcagaattattatacatagtcccaataattttttgctgttgtgaattgaagtatcattaaaaatggagagttatggttaatagagaat

SEQ ID NO: 13950 - DNA, 2300 bp, Homo sapien
aatcttggtttgccagtgagaaccaagccacagatcacagggatatactaggccacagaaattactagaagccagtattttaacttcagaacactgtttcttatctctgtttctccatgcttgtttgtcctttttcagagtcagttcaatacattctttagaaagaaaaaatattattaatcctatcttctacctgggagttcctcagcacagtttgaatttaggagattgttagagtgaccgttcttgtagagaatacagtctttggaaattgagatctattttttattttttaaatgtttcagacaaggtattagtccattctcacactgctataaagaactacctgagaccatgaggtaatttatgaagaaaagagggttaattgactcagttatgcaggctgtacatgaagcatggctgggagacctcaggaaacttagaattatggcaaaaggcagaggggaagcaagagcatctttccatggcagacaggagagacaaagggaagggggaggtgctacacacttttaaacaagcagatctcttgagaacccattcactgtcacaagaaaggcaagggggaaatttgctcccatgatccaatcacctcccacccgttccctcccccaacactggggattacaattcaacataagatttgggtggggacacagaaccaaaccatatcagacaaacagtagtttttatttttgtgtgtttatttcataacttctcctcaaaaggaacatgctctccttgcatttatttgaaaaaacaaaaagccagtttctctccactaaacagatgaagttcaagatttttagaagacaatagcattacgggataagtcagaaaactgaaatcatgtctatgtattccaggtctttttccaaaaaaaaacacttatatttaagtttactataaacattaaatgagttgttaaaactaatgtaacagaaattaaatagatcatcttactcaaataaaaacaaaaagacgtaaaggaattaacatttataagcaccaaatatgtgttagactgtaatttcaaccagtgtcacctcattttgtcctcatgatcttgtgaagggagtgtgactatttccaaagataataaaacatgaatctcaggaatgctaaaatgattgcccagagcacaggtatgtggtacagccagaattcaaatgcaaatctttcagatcacaaaaatatcttccagtagagttatttatgtatatattttattcacttctctgaaggtacaggatgtgatgcactcatttttatttttgctttctcgtttatatttctcatcacctagcaaagtggcaggtttaatgtgttaacaaacaaatgaagaaatcatgtttgtttttagtctatattttttatatatttcagattccagattcttattcagcactgtgtcacgataaaaaacaaaatacactaaggaagaaaaggaaacactgagggtttattgcattataccctctgtttattgtatctgctgggaaatgaaaccatatatattctctatttctcttctgacaaatgttattcattctgttcattacagttccttatcttgctatactgtccttgctgaattatgttagattagaccaattattgatttaaaagatcagagcagtacattaccaccctcttgccttttctgtaggatagttaaatttgtgtatgcctgcttcttgcagagtggctgcttcaaagtgatggtgagagttacattttactatttcaacattagcttctaatgtttctgaagtctctggtattaaatgagttctcagccaaatgttctgaaccctgggaactactgctgttaattgtggtcatctcttggatgtgtttgcattgttgtccataactaagctgatttcttttcatttcattttttaatggctttttactgctgctgcttgagtattttcctgggtgagcattcttgattgattactggaatgaagtcagttctgtcttctgctgtcacccaggtaccaattattggatcactgtggacactgctccatctacccattgatgtgcattaccaattttcctctcaacactgttcagtgactcactcacatgctcacaaattcagcaatttgttcatgatagctgcttggcggggtggataatatcctggtcaaaatgactgagccacatcagtgatgtatgtattctccagacagggaaaccacagggttttaaatcaatgaactgaacttgtcatctatattttcctgctctagttttctggttcttttttt

SEQ ID NO: 13951 - DNA, 2300 bp, Homo sapien
ttaattaattaaacaaaatgtacaatatgtgtttatatgaaagtcatattcttttctaaaataatcttagaagaatggtacaagattatgggatagaattttagatattgtcccccacctcccagcagaaacatcaacttgaaccactagctgtacatgcaaatgatttcacaagggctaagataatgagatgagagataacagtacctagttgaaggaagacatgtagtaaaatacatactgtagagagtaggaaggacagttttatattactcactgatacgatttggatctgtatttccacaaaatctcatgttggattgtaatgcccactgttgggaggtatggtctggtgggtggtgattggatcatgggggtgggtttctcatgaatggtttagcaccatcttcccttggtactgtcctcatcatagtgagttctcaagagatctggtcatttgaaaatgtgtagcatcctaccccttctctctctcttgctccttctcctgccatgcaagatgtatcattccccctttgccttacaccatgattggaagcttcctgagatcttcctagaaacacatgctgccatgtttcctttgcaacctgcagaaccatgagtgagttaaacctcttttcttaaaaattattcagtctgagatacttaatagcaatgtgagaatggactaatacacctacctcagccctcctccaacttcaggcagcagtgtagagaagagatactgctcacttgaggaaaagagaaggaagtgagactttgccttggacctgaactctgggcccaccacagtaaatgccagtactgagaaggccctgatggccccatggcttatacctgtggactgagactctagagttgcttcagtgccaggtaagaccagacagccccaaacttcaggcttgtgtggtaaacttgatttctggccttcgccactgccaggttggctctgaatggccctcagcagcaggcagacctcagtgtccctaggcttctaatatgccctagtgttccacttgccaaagtgggacccaggcttcctggaagggttagacaagctgaaacttcactaggcttctggcatacccagcactgagcatgccatagaactttcccagacaaagccagtctgtgaaggttgagataattacctacttcttcaagtatacagagatcagtgcatgaccacaaagatcaagaatgttcagggaaacatgcatcaccaaatgcacaaagtaaggtgccagtgactgaccctaaagaaatgaaaatggactgcctcacaaacaattcaaaataattgtttttaaaaagctcagtgaatttcaatagaatagaaaatcaattcaaaaggaggaaaacagcaagtgttcagaataaaaaatttaaaagggagattgaaataacagagaaaacctgtagttgaataagaaaatgaacaaaataaaaaatgtaataaagaacatcagcaaaattgatcaagcagaagaaagaatgtgaaagattatttgaaaaaggaagtaaaatattgaaaaagaaatctattggatttataggaaagcatcaaaacagcaaatttttaagtcatagcagttcaagaagagaaaggtaaatgagtagaaagcttatttaatgaggcggtggatcacgaggtcaggagattgagaccatcctgggtaacacagtgaaaccccatctctactaaaaaaaaaaaaaaaatacaaaaaatcagctgggtgtggtgacaggtgcctgtagtcccagctgcttgggaggctgaggcaggagaatggcgtgaacctgggaggcagagttgcagtgagccgagatgatgccactgcactccagcctgggtgacagagtgagactccgtcctaaaaaaaaaaaaaaaaaaaaggcagaaacctttataaacctggtgaaagaggtaattatcgattcatttcttttagctgttttatagaagtccatcacatgaatataccacattttatttgtcaatttccttattgctggatgcttagattgttccagtcttcactcttaaaaatatgctatagtgaggggaggagccaagatggccgaataggaacagctccggtctacagctcccagcgtgagcgacgcagaagacgggtgatttctgcatttccatctgaggtaccgggttcatctcactagggagtgccagacagtgggcgcaggccagtgtgtgtgcgcaccgtgcgcgagccgaagcagggcgaggcattgcctcacctgggaagcgcaaggggtcaggg

SEQ ID NO: 13952 - DNA, 2300 bp, Homo sapien
gcaccaccttgcctggttgatttttgtcttattatttttttttttcttagagacagggtttcaccattttgcccaggttggaacaatacaggattggaaatcatgggaaggaatatccttaacacatataccttacaataccttgtaagaatacagaaaaactatttttgaaaattcttatttcttaaaaatagaaaccttaggaagaagtttatcttgtagataaacttctgtatctataagagtttgagaagagtttagaagagtaagtttagaagagtttgagtttagaagagtttgagaagattggcttatttcacagtatctcatgaagtagatagcattattcccatttaaatatataggtagaaaactttgaggactaggtaacttgttcctttaccacacaactagaatatcaaggtgttagtgatttgtgtttatacaagtctgtttccctgcatttatgtaggattttatccagagccttgtgtatcaagtcttcacaagtccagataacagctaagagagtgacactcaacttgactgtgacttggtttcttcatctgaaaaatgaagttaataataggaccaaccctggaattctttgcaaggattcaatcagctaatacatgtaaaatacttaaaggccaccaccatagtaagctagtgttaaaatgttagctattaggattggttgtgtgtggccacacaaaacaacagcaatgagattcgacttgggagaaaggtggagagtgttaaggtttggggatagctgtggctaaattgagtgaagtccacttaatcaacaaaaacagggacatgtatggtttaaaacatcaattttagccttcaagtcagccagaaagttgttactaagaagagcatctcactacctgagcattttctgttgtgaagagtgggaaggggaaatacatttttggttcctcttagtttgaaaaaatgaatagtttcctgtaatcttaagggataatttaagtgacataagggaagttacttttccctttgccctttaatttacattttaaatggagatctggaaaaagacatcagactttaattgctcacagcttaaggtaaattctaatatccaatgcagagttctgtgtaaaagttaacatggcagcttgctgaattgtgttgaaaagacaaggggaaaacatcaacattaaaaacttaaaaactaaatttcaaggactctggaaggatttcccagtctatattccttgattaatatgttgtaggattgaacaggagatccacaaattgtaccttgcatgtcttcatgtttatttgaatcgtttctacaaaaggggaaattacctcttttgaagaatgtattccttatgctaaataagagtctaccttctggtgctgctataggatgacctctgatttaagctctcccgttttaatcttaatcaactgaagctagcatgtgggagaggtgattcttctgccgcatgatcttccctggggtaccagttacctggtctctttctttagcctctgattgattctgtgtctccctatgatcctgctaataagttcctttttatcaaagtttgcagccccaaattttaactggaaggcatcctccaacatatccaggtaatgcatttctatcataatttccaagagcgcggggactgtttgtttcttatcccaggcatgtattgggtaccaggaccatagaaggtgctcagtcaatgtcaactaaatggaaaatgagtgtgtagccatatgctaggtttacattagtctattttaaaaataaccagtaatttgaaagatacaaagaataaattaacaacagagagatataccaagaacagaagcagcccgtgtgactgtgacattaatgaaatctgtgctgttgggaaggcttgctggggagcagtgctggctttagggttacatatctgatttttgcttcttagatcattatcgaatggtagtaaaagctgcatttctgggtctggctggagcattcacatgtcgaagaatcccaggaaagacagcatgagctgtttttttggcaagtttcttaaagaacttttgtctggaacttgctttgttgatggaaatagtcctttacttcaatagccagagtataaaattagaaataaggagaacgaattagggagaatctgttgaaacagagatttttttcttcaagacaaaaatataggacattggctccttagtattgtaagaaactctttgttttcagaatgccaactgttacatacttgttttgtttagtgtactatatttta

SEQ ID NO: 13953 - DNA, 2300 bp, Homo sapien
aaaaaatgaataagaaggacaaggaaggaagggtgatatggtttggctgtgtccccacccaaatctcatcttgaattatagctcccataattcctatgtgttgtgggagggacttggtgggagataattgaatcatggggccagtttcccctacactgttctcatgatagtgcataagtctcacgagatctgattattttaaaggggtttcgcctttcatttggttttcattctctttgcctgctgccatccatgtaagacctgacttgctcctcctcggcttctgctgtgattgtgaggtgtccccagccataaagagtccattaaacctctttcctgtataaattgcctagtctagggtatgtctttatcagcagcatgaaaactaatagaaagggagaggaggtaaacccagttattcaaaaaatgacaataatttaaatatttgggcagtggcacattaacaaataaaacgatggaactgagtccagaaatggagccatagatgtgacattatgagtgagtgggggaaaggatgctttatcaacatacagcactgagggaaagacactggagtcttatgtcatttatacttaaattccagacgagttgaaaattcaaatgcaaaaaaatgaaactacaaaacataagagaaaacattttgaaaaacaattttggagtgagaagtgcagtttaaaggaaagtaccaaatccaaaatcataaaaaaattggataaatctgaatatataaacaacatatttctgcatggaaaaataccatgagcaaagcttaaaacattgatagggaaataatttctaaatgcatgtcagcaaaggactaaccttaacgtgtaaagtgctgttgaaaatcaacgaaagaatagaaaactgcgtaggacctgaacaggcaattcacagaaaaaagctgaaaaacattgtgaaagattcttaacatcatttgtaattaaattcaagttgaaataataataagataaattttcatctcaggttggcaaagatcacttttcacagcggggtagtgaaacagacatcttatttgttgatgctgagtgttaattggtaaaaacttttggaaggcaatttagtattatctgccaaattttaaaactatttatctatatccagctcctctgatccagcagttctacataaaccctctcctgaaaaagcgtaccaacagatacttattatatcaaaagataagaatgcccatcgattagtgaccaattaaaatactttcatacaatggcatatatatatgaaaaagaatgttaaatacccttttacagtaaaatatgtatcaaatgcctattatgtgccagggactgttctagatactgggatgtagttgtaaaccaaacgaactgaaatccctgcccctcatggagctcacattccaatgaagggatacaaggtaacagcaagatgcagaaaagagtaaatagcatattaactagtattataaagaagaggacgtagagacaggcaaacacacaaatatacatgtttgcctatgcacagaaaagctctggcaggtaataaatggaactgttttgcccctggggaggaagaccgcaggtctagggagggagtcgtagtttccggcgaaaatatttgtttactacatatgcatattaattaaaatgggggggaggcggataacacgattttatatttaaaaaaattgctggtaaagtccttggagcatcagcaactcaaccgttttcattgcaatgttcgaagcaacgctggattgcagggtcttcgccgcttacaccctgcaaatcactgtgggacgagaatcgagggctggtctagggcaggcagtagacaaatgagttaagagagtgctctcgagagcactccgaggcaaagcacaaaccaaagatacataatacttgcataaatgccgacacacagagagaaaaaactaggcgctgtgagagcaagttcacaaggtggcgcagaaccacatttccccaaagtaacagcgaacaggtctagtctgcagctctgcgcctgcgtcaaacggcagcgcatttgaccacacggccgccggaggcacagtcgtgttcgcatctggtctaacagacccgcgagaacgaaggacgcttgcctttttccggtcggggaagggggaagaaggtaacttccggtgacggggttgcatcacttcctctcaagcttggcgtttgtttggtggggttacacgcgggttcaacatgcgtatcgaaaagtgttatttctgttcggggcccatctatcctggacacggcatg

SEQ ID NO: 13954 - DNA, 2300 bp, Homo sapien
attacctgggcatcacctgggtgcttactaggagaaatacagactcctgagccccctacaggattttttttgtttgtttttgtttttttgagacggagtctcactctgtcacccaagctggagtgcattggtgcgatctcggcccactgcaagctccgcctcccgggttcacggcattctcctgcctcagcctcccgggtagctgggactacaggcgcccgccaccacacctggctaatttttttgtatttttagtagagacggggtttcaccgtgttagccaggatggtctcgatctccccctacaggaatattgaatcagaattagcattttgaaagatccctaggagattcctatatatcctgatggttgagaagtgctaatatgaacttgtaattaaaggaagctaactctaatgaattttaatctgggatttaaaaatctggatacattttcttactaaattgttctcaaaattctcgaggttgctgtgtgatataaaaaagaaagaggtgcattttcatgagattttcgtcaggtgtgaaacgaaaattccatttcatttaccatgagaagagatgtcagactggttgtgctcagacttttcttagttgcccacagttcttgaggccggtggtggtttttttagattggacagattgagtcttcagtcacacgttgagctgccataatgaaagcgtagcttctcctagaggcaagggatagattgattagttctatgtccgacatttcacccaataattcataagtgctcaataagtgattgtggggtgaatgaacaaaaaacaagatacaacccctgtcttcaagattgtcacaaagcaacagcaaagaccaagaaataaattgaataattagcatacaggggtgaccatttctagaaacagtaagcacagggaaggtgtatccagctcagcattgctggcacaaggagccaaggagctgattctcttagtgaacagaacttggtggatttacagcagcagctctcacactttagtgtgtatcagaatcacctggagtgcttgttgaaccacagacacctgtgccctatcctcagaatttctgattcagctgggtgggcccaagaatgtgcaaatctaataagttcctagaagatgctataatactggtcttggaaccacagtttgagaaccacttaacttagcgaattataaaacgtactgatggctggactctagcagcttataggaaggaggcggtgatactgaaggcagaagcttaaggagcagggattttattgtggagattgtggggagccattaacaggagagtgatggactctcatttgccttttggaaagatcactttgggtgtggtgtggaggatggatcagagtcaagaatacgtggggaccagaaaaccaaataagtggtttattatagccatctaagaaataataaaaacttggagtaggagcaagaagatgaatatccttaggacttggtggccaattggaagtgggaggggcagagagggaggagttaatgagagccatcagatttctggctgtgttgggattgtgtgattcaagacacaggaagagaagtgggtttgaagcaaggttgtggagaaaagcaaaggaggtgagtacgggacatgctggatttgagatgccagcaagatatctgggtggactcccttgtaggcagttttacttatgaaattggaggccagctgcaaggtctggtaagtaatctagccccatccctcctgccacttccatttgatcccccatattgtttgtttggatcaggcattgtatttgtaagcaacaatatgaatataacctttaagggccttgagaatacaaggcactttctcaagaaaacaaatgttctactgttttgattcacggggtaggtgggcggaagaaagagctgaagtgcagagtcttctaacaccagaagaggttaataaagccgccctctgagtggccagtcgaactggaacttggtaagcttgaaaggggcaaaaatcacttgactggtctgcagtgccatatgacaaacagctgagactaattagctggattgtgggtttttacagcgatgcctgttttgaaagttgatggagcgaactgcttttccaaagactcttttgaaaaactttttaagtaggccattctgactttaacatttctctttgtcttaacattagacaaaaagtaaccttcctgaagaggacatgtgattggaagttgtcaattgttgaagcattggtaactccagtctctaacgttttagaaaatcataac

SEQ ID NO: 13955 - DNA, 2300 bp, Homo sapien
tttcttcttctcttggtgtgctgagctgctttttaagcagatgaccaccattctgtctgttttgagtccctatgttactgtcccccaaattccagaagttttggggttctgaatccctgagactttctggagattctgtgatgagttccttcttggatttccctactggcagataaagagtcagctttccgaggtctgctaatcagttacctctagtccatctactctgtagcttctaccattttgttgcttccactacctgatctttgtccttgtgagtttatgtctaaaagaaataaaacattctttattgctatattagtgagattttgggaggcagcagaaccacatgtacatgttgagcatgccatctttattctgaagtctgaaagatattttagaaagctttcaatacaaaagcatccaaaaaaggttttgttgctttaagcagactatgaaaattggtattgtcataattttacttgctattcaaattatagttccagagttaggaatgttagtattacctgggcatcacctgggtgcttactaggagaaatacagactcctgagccccctacaggattttttttgtttgtttttgtttttttgagacggagtctcactctgtcacccaagctggagtgcattggtgcgatctcggcccactgcaagctccgcctcccgggttcacggcattctcctgcctcagcctcccgggtagctgggactacaggcgcccgccaccacacctggctaatttttttgtatttttagtagagacggggtttcaccgtgttagccaggatggtctcgatctccccctacaggaatattgaatcagaattagcattttgaaagatccctaggagattcctatatatcctgatggttgagaagtgctaatatgaacttgtaattaaaggaagctaactctaatgaattttaatctgggatttaaaaatctggatacattttcttactaaattgttctcaaaattctcgaggttgctgtgtgatataaaaaagaaagaggtgcattttcatgagattttcgtcaggtgtgaaacgaaaattccatttcatttaccatgagaagagatgtcagactggttgtgctcagacttttcttagttgcccacagttcttgaggccggtggtggtttttttagattggacagattgagtcttcagtcacacgttgagctgccataatgaaagcgtagcttctcctagaggcaagggatagattgattagttctatgtccgacatttcacccaataattcataagtgctcaataagtgattgtggggtgaatgaacaaaaaacaagatacaacccctgtcttcaagattgtcacaaagcaacagcaaagaccaagaaataaattgaataattagcatacaggggtgaccatttctagaaacagtaagcacagggaaggtgtatccagctcagcattgctggcacaaggagccaaggagctgattctcttagtgaacagaacttggtggatttacagcagcagctctcacactttagtgtgtatcagaatcacctggagtgcttgttgaaccacagacacctgtgccctatcctcagaatttctgattcagctgggtgggcccaagaatgtgcaaatctaataagttcctagaagatgctataatactggtcttggaaccacagtttgagaaccacttaacttagcgaattataaaacgtactgatggctggactctagcagcttataggaaggaggcggtgatactgaaggcagaagcttaaggagcagggattttattgtggagattgtggggagccattaacaggagagtgatggactctcatttgccttttggaaagatcactttgggtgtggtgtggaggatggatcagagtcaagaatacgtggggaccagaaaaccaaataagtggtttattatagccatctaagaaataataaaaacttggagtaggagcaagaagatgaatatccttaggacttggtggccaattggaagtgggaggggcagagagggaggagttaatgagagccatcagatttctggctgtgttgggattgtgtgattcaagacacaggaagagaagtgggtttgaagcaaggttgtggagaaaagcaaaggaggtgagtacgggacatgctggatttgagatgccagcaagatatctgggtggactcccttgtaggcagttttacttatgaaattggaggccagctgcaaggtctggtaagtaatctagccccatccctcctgccacttccatttgatcccc

SEQ ID NO: 13956 - DNA, 2300 bp, Homo sapien
cctttattgaggctcttatctcactactggagttgcctacttattcgatggtctctcaagtaagtcctgacgtcagggaccagtttaccttgtttactaatagggtgcctgacttgatgaatgagtgaatgaatgggtgatgaatgggccatagcaccatcctaggttttctgatctcctgtctggtatactcctggtgagagccttgcctggccacaggagtggggaaagctgaaggcaggctttccctgtgccatatcagccattagcaattactacattattggtttcccagattttagctgatcagtgattcccaggactattcctctggacatgaacatgaggctaccttttccctttttttttttttttttttttttttttttttttgaaacagagtctcgctcggtcgcccaggctggagtgcagtggcgccatctcggctcattgcaacctccacctctcgggttcaagcgattctcctgccctcagcctcctaagtagctgagactacaggcgcgtgccacgacgccctgctaattttttgtatttttagtagagacggggtttcaccgtgttagccaggatggtctcgatctcctgacttcgtgatctgccggcctcgggctcccaaagtgctgggattacaggcgtgagccacctaacccggcctttttctctcttaacctcaccaacagtctgatggcccttctctcacacgggaagagctcttgaagttatcaacctgttaggacatttgttatctctaaacccgagtttactgtgttatgtttgcctggaaatgttatatcaaatgtatgaaattgccaactgtttgtaatttcatatggttcatcctatatgtgattttgtaaattggacccacctgagaagctaactgctgtaatgccaactgtgagtagctacagactggaaaggtgatggagttgaccgggtgggcctgcgacagctggaatttgcggtggaggtagacacaagtcagcgagacggcttagaaggcagaagggaagctgaactaaggcttctcaacattttactctgcttagaagtggaaacatttggttcaaagggcctttgccttagactccatagggacaggcccaagggctgctgttcacacctcctggccactgagagggatgaacttggctgcctctgagtgggaaccacgaggtctgaccccctacgcagtcccaggttcactaccccgcaggccggagcgacaccgttggcgctgggagaagagagccgctgggtggcagcaaaggcgcgcaggtttcttccgacagaggcggttccttaacatactgtagttttcttctttttaaactcattgctctaacactcttagaaatttacagtggttttatattcttgaattacacagtgtgagcagagactccgtttgccatttcctcccggaattacattgatttttttcctgcgaaattttttacttatttttctcccatgttatttccaggaatcctgggcattcccttgccccggaaacgccgtgtccaggccgacctaagccaggagccgcaggggcgggaagccgggggcagggccgggcctgggacgccgcctcaggagccgcgcggactcgggaacctcgggcggggccggcgtgagtacgcccggcacctccggctgctacggtggcgaccgcgaactgatgccgtggaaaacacccttagaacatggctttttggggaggtgaataggggagagtccccaaacgacacctcgccgcgcaccggtccttggtgcagtttgtaaatgtccctcctgtgtcccaaaacgaaaacactcctatattttgtagcgccttccagaatggggcagcggaaactagtgttgggacaaaggaggcgagcggggccttttcggggctcacagaggacccctcggaggcgcggccgccggggagagcgcgacagcaccccgccccccgccagccgggcgggggccgctcccgaggtgacaggagaaggcgggaggtggaggagagaaggtcccgccccacctcgctctcctttacgggaagtgatgtggggccaggcggaaaatacccgccaacgacccaaaaaaggccggcggcgggtggacgcggcgcgcgaggacccgagccaggcggggacaggacggcggggcgagccaggtgagggggcctgaggagcgggaggcgcgcggcgggtccggtccctccgggagggccgagcgaggcgtccccctggggccgtcctagggctggggtccgagtgcgccgccct

SEQ ID NO: 13957 - DNA, 2300 bp, Homo sapien
tgagatgaaaaacggctgggattgaatgactgccaaaatatattaaaccaatctaactgcagggtaacggagtggatttctgcctgaggtagtttaagttggttcacatatctacaaacactattgcaaacacccttcccaattattatatacacactgagactggcaccccatgatactgcatatgctgaattcctagaaaaataaacctcaagtagaaaatattcctaaaatattcacttttgtttaaaaggaaattacttatctgtcctggtaaaaagacataaaatgacaaatatacaataaacattaaaattaacagtgttaggttaaaaaatcattatccatgatttatttttaagtacatctatgtttttgctagattagagttaacataattaaatggaactttaagcaattattacagttcatctccatgaggtatttgtgggtttttttgctttttgtttttttagatggagtctcgctctgtcacccaggctggagtgcagcagcgtgatcttgactcactgccacctctgcctcccaggttcaagtgatgctcctgcctcagcctcccaagtagctgggattacaggcgcatgccaccaagcctggctgatttttgtattttcagtagagacagggtttcaccatgttggtcaggctggtcttgaactcctgaccacctgatccacccgcctcggcctcccaaagtgctgggattacaggcgtgagccactgcgccaggcctaactccatgtagtattaacttttcttctcttctgattcttgtaccaactgcatcttttcttttaattccttctgatctttggcatactgttcaaatactggttgaaaaatatatactcctccagcaattccaaggacagtggcaaaaagcagttgtgcaaaagtcaatctcctaaacattgctgcaacaaatacagctcaaggaaaagctggttttggaaagtcacactccacacccaggaaatctcttcaaatctgcatacaaaaatggaaagcaaagccatcacttagtacaatgtccttttaaaagatgttatgtcactactttgcactggagtgaacaatatttttataatatgttactaattaaaacaagaatataaatacataaggagtacaggaagtgaattagggaagggtataagacaaaactaaaaccttttctattacagaatgttctcaatggttttaaatgcatactttttctttttttttttttttttgagacggagtctcgctctgtcgcccaggctggagtgcaatggcgcaatctcggctcactgcaagctccgcctcctcggttaacgccattctcctacctcagcctcccgagaagctgggactacaggcgcgtgtcaccacacccggctaattttttgtattttttgtagagacggggtttcaccgtgttagccaggatggtctcgatcctctgacctcctgatccgcccgtcttggcctcccaaagtactgggaatacaggcgtgagccaccgcgcccggcctggttttacttttaacaagaggagtgggccgcacgcggtggctcacgcctgtaatcccaacactttgggaggccgaggcgggcggatcacgaggtcaggagttccagaccagccaggccaatatggtgaaaccccgtctctacaaaaaaacacaaaaattggccaggcgtggtggcgcgcctgtagtcccagctacttgggagctgaggcaggaaaatcactggaacccgggaggcagaagttgcagtgagcccagattgcgccactgcactccagcctggactacaagagcgaaactccgtctcaaaaaaaaaaacaaaaacaaaaacaaaaaaaaaacctaacaacagcaacaacaacaaaaaaaataggaaccattcggcctgtttccacatctgtacaacaagctaaatcatccctaccctgcctacctcgttgaacaggcattttttgtgagagcaacgaacctgaaatgttaacaccaacactgacgtctacaattaccgttaccgtttttaataaccactcaggtacctccgactgttctgcgcctgctccacgtcactaaactcgctaccgcctgctcccctccagagaccgggggccttccagcagttttcggacccccgagcacagagaccgccaagccaaaggcgagtagcaatccctcggttcggaaacggcgaaaggaaaccgcaaggaggccaccacgtcgggtgggagctacgaagttgcccgttcccggttacttccgggcttgcga

SEQ ID NO: 13958 - DNA, 2300 bp, Homo sapien
ctacaggtgcacaccacttcacctggcaaaatctattttcatttccatttataaaacaatattttattttgtggcagtcttaaaacagcattttatactggatatttgcattaaaaattcaattggccaactaaactcttaacttcttcaaggcagtaatgtgttttttactttctctgtatcctccaagtgctaagtactgtgggaatgtatgctaacggctgtgtcaagtatattaacataaaagaaagatacaggagaaatatttgtataaaataatggtatactttgatgagttaaaattatttggggaaaatacggaaaactgaaaatatgtatagtagtccccccttatctgtggtttctctttccatgtttcagttgcccagagtcaaccactgtctgaaaatatgaagatattttgagagagaccacataaaagttcacataacttttattatagtattgtgttatacttgttatattttaatactgttaatctcttactgtacctaatttgtataaactttatcataagcgtgtgtgtattttttacatatataaaaacaatatatatagagtttggtactgtctacagtttcaagcatccactagggattttggaaactatctactgaagacgagggagcaagggggactactctaaaagaaactgagcacaatttccaagatgaatacacactcatagtctggaaaagaaaccacaaaggatatttgaaaaccatgtgatgtgaaacttcaagagactgccagtattcatctggaacaaaacttgtctgcactaaaaagcagtttaatattcgtaaagctatggtaaacaagagcagataaatattttctccaagaagatctgaaaaacagaacaaaacaggtaatagtggcacaaaagtcaggcagttccacttgcaaaacttaaaatctgctgctctggttggctccttgtaaggcacagtagtgacctctggtccctccacaccattcttaaagccaacttggttggttatacaagcaccacagcgtcatcactgggtgactgccactcttttagtttaaccaacttttcttgcaacttattgtgtaaagataatattaaaataaatacaaaaaaaaaagagtgggttaactaaggccttaggctaattaattaggtcatactatgtgtgtatctaatgaaagaaaccagctaacaaattactaatttgggaagcagccctttgtatatgtgcaatataaaatggtcctctgtacatatatattgatgattactattatatatgccaggcactgtgttaatttcttcacatgcatctcacttaatcctccaaacaatattatgggataggtattattagccccattttacagacgagcaaattgaggcccagaaattaaactgccttgtccaaataaagttgtaaattacttatcaggattcaaacccgggtctgtgtgatgtctccaaagtcctgctcttgaccacaaatggacagcctgtcggccaaatacagagtattttttaaaaaattgaatttagttgccaacatttaaaaatcagaatttatattaaaatctgtgtttccagcatttcccagcatttcaaaactcaagatctggcaacacagagctcaacgggcaactggctggtaatgaaatggagggggttccttttagatgggggtaggagctctccagacagtgtcccctcactcacccccgcggcgcctggcgctcttctcctgggtgttgaagtacaaggtagactttctctttcgcagctttatcttgccgtgggagcggttctggagaccatgcaaagtgaggctggcatctccgccccccggctccattccgcacttgcttaggggcctcctcatccctggccgccaccttcctaaggcggaagaaagctgcagtagcgcgctgctcgtccatccattaagtttggcctttgagagcagtcgtcgctcgcaagcccggaagtaaccgggaacgggcaacttcgtagctcccacccgacgtggtggcctccttgcggtttcctttcgccgtttccgaaccgagggattgctactcgcctttggcttggcggtctctgtgctcgggggtccgaaaactgctggaaggcccccggtctctggaggggagcaggcggtagcgagtttagtgacgtggagcaggcgcagaacagtcggaggtacctgagtggttattaaaaacggtaacggtaattgtagacgtcagtgttggtgttaacatttcaggttcgttgctctcacaaa

SEQ ID NO: 13959 - DNA, 2300 bp, Homo sapien
gtccatctcaaaaaaataataatcataaagacagttctattttaaataaggttttatccccaaacttcatttttaagttggaacctgaaatatttttttcttagaaataatactgtgacatgtagtaaggctcccagaatattacacaaaagctcatcggatccataatactgttgaagacaattttgaatggcaactgtttcagtatccactgtccccaagaaaactaagctatcacctgactctccctggcattgttcagctgttccttctcttcccagcattttctttatattacttctctaagtaatatggagattcagttctcactaaaatgatccatcctaaaatgagctaagctcagagagttaaaatcaccatcatgtaaggcaagcattacctaacttaagagacgctctgtctcaccagtactgaagatgctggaaacacaagcatgttatcttccagcattctacccagagtgctattttcacagtcttgatcaccaagtattcccattttgtgtcacccacctatactattgtattcctagtgccatagtttcttttttttttttttttttttttttgagacgacatctcgctctgtcaccaggctggagtgcagtggcacgatctcagctcactgcaacctatgcctgccgggttcaagtgattctcctgcctcagcctgcctcagctgggactacaggcatgcgcctccacacctagctaatttttgtatttttagtagagatgggttttcacgatgttggccaggatggtctcgatctcttcacctcgcgatctgcccgccttggcctcccaaagtcctgggattacaggcgtgagccacagcccccggccttgaatgaacaaattattaataagtgaatcactttacacatgctcaccttgtaagtatcttcaaataattgagaacaaactgtatcttctcgggccttgctgtaggatgggcttgctgtagtttggacgtttgtcccctaaaccttagttgaaatttgatccccactgttggaggtggggcctaatgggagatgcttcgatcatgggggtggagccttcatgaatggcttggcaccatcctggagtagtaagtgagttctccttatattaggttccatgagagttcccccgagtgctggctgtacaaaagagcctggcaccttccactttcttgcttctgctctctcaccatgtgatctctgcacaaactgactccccttcaccttctgccatgagtggaagcagcctgaagccctcaccagtggatgcttcttgtacaacctgcaggaccatgagccaagtaaatataaattagccagtctcaggtattccagtatagcagtacaaacaaagacaaggctttaatgtagctttttgtatttgagcctactaaaatagatgttgttttagcctaccaacctaagttaagtgcttcaacttatatttggggatctgctgtgtctgtgattggggttattacagatggttgaacttttagaatcctattttttaatttattttgagacagtttcactctgttgcccaggctggagtgcagtggcgtgatctcggctcactgcaacctctgacaccacgcccggctaatttttatattttagtagagatggggtttcacctctgttggccaggctggtcttgaactcctgacctcaagtgatccgcctgccttgtcctcccaaagtactgggattacaggtgtgagctaccgcacctggccctattttattcatttttattttcgtagagacagggtgtcacccaggctggagtgcagtggcgtggtcatagctcactgtcccctcaaactcatgagcacaggtgaacctcctgcctcagccttcccagtagctggatctacaggtgcgcactatcacgcctggctaatttttttttattttaaatggagtctcactatgttgcccaggctggtcttgaactcctggcctcaagcaatcctctcatctcagctattttatttcaaataaagctagttctaattatcattccttttagtaggttcctcattttaccatttcaaacatcttataaatgtagatttaagtgataggcttagttttcttaatcttgctacatttttcaccacaccacttttcagattattctttaatcagaactatttcaagtagattaaaaaatactaggtgacatggacatgtgatattccaactcatgaggtatgaactgtggatgatattaacatattcataggaggaacaaaataaaaaacactgc

SEQ ID NO: 13960 - DNA, 2300 bp, Homo sapien
tttcaataaaccaaatgtttaaagacgaaattttggactatactgaaaacactgcatataaaccagttgccaaaagtttttgttttggggccgggcactttggctcatgcctgtaatccctgcactttgggagactgaggcaggcagattacctgaggtaaggagtttgagaccagcctgaccaacacggcaaaaacccttctctactgaaaatacaaaatttagccaggtgcctgtaatcccagctacttgggattagctgcctgtggtagcgcaggcctgtaatcccagctactctggaggctgaggcaggagaatctcttgaacccaggaggcggaggttgcagtgagccaagattgcgccactgcactccagcctgggcaatagagggagaccccgtctcaaaaaaataaaaaagatggtttttgtttttcccttttagtttgttaattttgtgctagccattgcttaattttgttttttcctttccctttcttcatccttaaggatttcaacttcaattttttcttctcctgacttatattcttgtggcagtgtacgttttgttgggttaagaacactgcctgcttcctctttatgaactctcttccctgacaaaaagcaaagttggtagtgtagagaagtttgtattgtgtgtttttaagaaggcatggttattacgttttaattttgtacggataacaatgttaagtgataattaagtatttttaattcttttttttctttttagtctttataatatagctttatgcctctttttttcctgtttattcacaaaagaaaggtggtgggagaagctgtggaagattcctgagtgcatatggggatgggatgatcagctgaaacaccatgttcctagccaactcgctttccaaggtggtgtgactaaatctgaccagcttctctagagctgagtgtgcctagtcacatttactatttaccgagtgctttaaagatacctgttgtcatccgcaatactctaaacaggtgttcagaatctcttgtaaaggagctggccaagcttattgcatgcctttgcattgcttgcatctatgggccaaattaagcttttttaaaagaagttaaaaatcaaaatatttcagctattatatgtatgggttaaaaaagttggaagcattagataaggacatgaatatattaatgtgggttaggctgttttgttagaatatataatgaaggtaatgttaatgtagaattgaacaattatttaaataagttttacaaatggtttgtttttacatttacctatcttaattttatgtcagaaagcctgacttaaatactctaaccatgatcatgaatgcctttgtattatgtaatgctttgtttaagtcttcctttctttctctttgtccaagaaatataatctcacacctgaggcgacggcatctttgaaaaactagtgatcaagaataaccagataaacatgatgggcataagggtcatgaccaaaaagatctctcagtggcatctgtatcactaaatattaggaatattcattcatttcagtagtgccttctgtctttgtgtttattgttgtaagtgtgaaagtgaactgaatactccatgatccatctctgaaaaatattgcctaacctaaatcaccagctttcctgtggcatggatatcctgtcttctgaagaactgtttttgcttttctggagcatgaatgtttgttgttttagagctctttgtattcgagttcatattttatccttatttttagtgcttttcctctaagtagcttgtggaaattatttctgagtaattgaagcttctgtgtcaacataatagtttgttgacataagaaacagtgttaagaaattatgcatttggaaaaaactgaaggtgattttttccagggaatttgtttcctggacttgggatttcttgtgcaaattttccccactagtttgtttttctctactattattttcataaaggagcagcaccagaatagtccttaatatcggagatagctgttgtgtcacttcctcatgctgacatatttactagagggtaaaattaataaccttctagtaagagtggcagtcgaagggaagggctcatctgacttctggaaacctatgttaaaatacagtgctttgaaccttgatcatgggctaattaggttggaaatgaaactagagaccagatacacccaaggaaacttttggtagttattttactttataagtcacaggaaatgcttgtgtactttcctgtgttccttaaatagttgcacttaaattacctc

SEQ ID NO: 13961 - DNA, 2300 bp, Homo sapien
ttgtttttttttttttgtttttttgagataatctcactctgtcacccaggttggagtgcggtggccagatcttgtggctcactgcaacctccgcctcccgggttcaagtaattctcctgcttcagcctcccaagtagctgggtttacaggctaatttttgtatttttagtagagacggggtttcaccgtgtcggccaggctggtctcgaactcctgacctcaggtgatccacctgcatgggcctcccaaagtgctgggattacaagcctgagccaccgctctggaccctttaagtcatttctaaaagaagttatgttcactttttgttccatggtttacaaaattgcaattacactattttctaaactgttttcatctaagaaggagtatttcccacacctttaaattgtatttgggctgatttttaatcagcttttttgactgaaattccgccctcagcgtaaaaggttaaaaattatgaattaacgcccgcgcggtgggtcacgcctgtaatcccagcactctgggaggccgaagtgggcggatcacgaggtcaggagtccaagaccagcctggccgacacgttgagacccccccccccgccccgccgtctctactaaaaatacaaaatttagctgggcgtggtggcgggcgcctgtaatcccagatactcgggaggctgaggcaggagaatcgtttgaaactggaaggcagaggttgcagtgagccgagatcgcgccactgcactccagcctgggcaacaagagcgaaaccctctctcaaaaaaaaaaaaaatatgaattaaaataataccctcaccatctccatcttctgctatatgacctgaactcagaaaataaaagtaaaccattcacactggatgtgtgtgataaatatcccctgagacgtgtgggacccaatatgattctaatcttaaaagatacgatgcagtaatagcgatatttcaagcactatcctgtagattggaggagacaaatctaaaattcatagtactatatagttagctattctaactacaagaatgcccaactgtgtttttcaataaaagtagagcagaacagtgcaaacttcaccactcaataaaataccttacttggcgctcccaatagtgctaaacataaacaacgcgtacaaggcactgcatgggacagctgctaatgaggacaaatcgattagggagaccaaagctaaaggaggccactggaactggagaaggatatggagaggtatttgatcatcatcaggctggcgtgctagcggaagtctccgggcattatttaatatttaatctttctattcctgacatcacgggggctcaaatgtcatcaaaagacaggctggcattaaacccggcagggtgacgcacataacatcttaccatatggattttcatcagtccagaccgacaagcacctcaaagcctgcccagtgaaggaagaagggtggcccaggccgtcagctctcccacccttggcgcgcagttcggtatagcactcggggtttggaggctgcaagaccaccggaccggacgccccagggtcggctcgggcctccggagctgtgcactcgcgcacggcccgaggaggtcgcccgtgcggccgctgacaccaggcgtcaagtccccgcccgagcagccccagcctaggaggcggaccccgccactgctcctctactgagccgagcgtgtcggccagggactcagacagtcggcacaaaccccctcccggggtctaagcccgcctagtacagtacctgaaggggcagcgccacctccgcccgattgtgctggctgccccagtggcggcggtcacagctcgggcgccaatgacgcctcttataaaaacaacctgctcgcaggcgtctgcagccggcaggcggtgaccggctgggcgccgcagtgcatgccgtgacgcgtagtcccgcctgcgcctcctgcccggcagcggtgaagagaagaactaccactcccgaagtggagcgcaggccgccgccgggcggctgcgggaagctgggccaggcggccgcagatccccacaacatccgggagccggcgaccacttccagttgctatggttacgagttgcaacctccagaaagaattcgtggtttcacccgggaaaacagctccccggattaaacggataggtttacacatactgatccacccagctattcatcttctgtttgctgctttaattgggtgcggttaaaaggccacgtccctaggcgttcaccggctttcttgccatctgctgcatgaaaactgactttgccgaaaa

SEQ ID NO: 13962 - DNA, 2300 bp, Homo sapien
aatgtttatagattcagaaacaaaaggtccattgctttatactttacatcatagacaaccactgcagttttctaatatgggtttcaccttcttcaaacctgatattcttaaaatgtggagttcaaactgactatagttaagaacgaaacaaatagccaatacaaagaataataaaaggatgagttcaaattatctgccacatgtcatcaacttttattaaatgataaaaaggttaattaaaattgtaaatgatttttcagaagaaattacatcttaaaattggcctgtgaaagtggcttgaaaggtataaaaatctaccagtagctggtattagctttcttagtaatttaattttcagttagagaaagccagaccactttgacctttcgaagtcctttggtatagatacatatacatttaaaaagataaatgaaaacaagccattgattaataatgcccatcgcagaagctgtaattataaaattaagattttttgatgtcactgttgatgttgaatatagttaatagaaaagcaaaaataaaaaataaaaaaggtctaattttgaggcactcttttgtctctgctcaggtccaccgtcttccttgctaatgtttacgtttattattaatttttccatttatttatttacttttaccacaattaggggacagagaatgaaacctaaactttttattgcttctgtaaagagtgaatataaatgtaagattttttttttttgagacggagttttgctcttgttgcccaggctgcagttcagtggcgcaatctcggctcactgcaacctctgcctcccaggttcaagcaattctgctgtctcagcctcccaagtagctgggattacaggcccgcgccacctctcctggctaattttttgtatttagtagagacggagtttcaccatgtaggtcaggctggtctcgaactcctgacctcaggtgatccacccgcttcggcctcccaaattgctgggattacaggcgttgagccccggcgcccggccaccaaatcctttttcaaaacaactcccttctttgacacagtgcaatttaaataagtatacaattaacaaagtacgtttttcttgttcaaaaccatcactgaacagtttgcaacagtagggtatgaatgcatacaatctcgatggtctttacaccttcagaggctattcggacttaaggaaacgtgcatttacaagtgtaaatgtaaaagctcagtagttgccttgtaaagtgcttttcggggttgtggggttgggggtggtaggagtaggtggtgcctcaaattatactagcgaataccaacattcccaaacatctagccctctgcctaaactcacccggttgcggtctgtcattttcgctcttctttgttaattttttcggcaaagtcagttttcatgcagcagatggcaagaaagccggtgaacgcctagggacgtggccttttaaccgcacccaattaaagcagcaaacagaagatgaatagctgggtggatcagtatgtgtaaacctatccgtttaatccggggagctgttttcccgggtgaaaccacgaattctttctggaggttgcaactcgtaaccatagcaactggaagtggtcgccggctcccggatgttgtggggatctgcggccgcctggcccagcttcccgcagccgcccggcggcggcctgcgctccacttcgggagtggtagttcttctcttcaccgctgccgggcaggaggcgcaggcgggactacgcgtcacggcatgcactgcggcgcccagccggtcaccgcctgccggctgcagacgcctgcgagcaggttgtttttataagaggcgtcattggcgcccgagctgtgaccgccgccactggggcagccagcacaatcgggcggaggtggcgctgccccttcaggtactgtactaggcgggcttagaccccgggagggggtttgtgccgactgtctgagtccctggccgacacgctcggctcagtagaggagcagtggcggggtccgcctcctaggctggggctgctcgggcggggacttgacgcctggtgtcagcggccgcacgggcgacctcctcgggccgtgcgcgagtgcacagctccggaggcccgagccgaccctggggcgtccggtccggtggtcttgcagcctccaaaccccgagtgctataccgaactgcgcgccaagggtgggagagctgacggcctgggccacccttcttccttcactgggcaggctttgaggtgcttgtcggtctggactgatgaaaatccatatggt

SEQ ID NO: 13963 - DNA, 2300 bp, Homo sapien
aactcttgaactcaggcgattcgcctgcctcggcctcccagagtactgggccttaaatgctggaattataggcatgagccaccgcgcccagctgagaactcttcttgttatcaaatgaccctctttactactggttctagaatttcgttcagctttggctcaaaacataatgcagaaaacgaaatctagtaaaaacagaagacaaattagctgataaactttgttggcataattagtaccataaaatctggaaaagctaaatcttaaattaaaaattttttagatttccaggataattcacaaatgtttatagattcagaaacaaaaggtccattgctttatactttacatcatagacaaccactgcagttttctaatatgggtttcaccttcttcaaacctgatattcttaaaatgtggagttcaaactgactatagttaagaacgaaacaaatagccaatacaaagaataataaaaggatgagttcaaattatctgccacatgtcatcaacttttattaaatgataaaaaggttaattaaaattgtaaatgatttttcagaagaaattacatcttaaaattggcctgtgaaagtggcttgaaaggtataaaaatctaccagtagctggtattagctttcttagtaatttaattttcagttagagaaagccagaccactttgacctttcgaagtcctttggtatagatacatatacatttaaaaagataaatgaaaacaagccattgattaataatgcccatcgcagaagctgtaattataaaattaagattttttgatgtcactgttgatgttgaatatagttaatagaaaagcaaaaataaaaaataaaaaaggtctaattttgaggcactcttttgtctctgctcaggtccaccgtcttccttgctaatgtttacgtttattattaatttttccatttatttatttacttttaccacaattaggggacagagaatgaaacctaaactttttattgcttctgtaaagagtgaatataaatgtaagattttttttttttgagacggagttttgctcttgttgcccaggctgcagttcagtggcgcaatctcggctcactgcaacctctgcctcccaggttcaagcaattctgctgtctcagcctcccaagtagctgggattacaggcccgcgccacctctcctggctaattttttgtatttagtagagacggagtttcaccatgtaggtcaggctggtctcgaactcctgacctcaggtgatccacccgcttcggcctcccaaattgctgggattacaggcgttgagccccggcgcccggccaccaaatcctttttcaaaacaactcccttctttgacacagtgcaatttaaataagtatacaattaacaaagtacgtttttcttgttcaaaaccatcactgaacagtttgcaacagtagggtatgaatgcatacaatctcgatggtctttacaccttcagaggctattcggacttaaggaaacgtgcatttacaagtgtaaatgtaaaagctcagtagttgccttgtaaagtgcttttcggggttgtggggttgggggtggtaggagtaggtggtgcctcaaattatactagcgaataccaacattcccaaacatctagccctctgcctaaactcacccggttgcggtctgtcattttcgctcttctttgttaattttttcggcaaagtcagttttcatgcagcagatggcaagaaagccggtgaacgcctagggacgtggccttttaaccgcacccaattaaagcagcaaacagaagatgaatagctgggtggatcagtatgtgtaaacctatccgtttaatccggggagctgttttcccgggtgaaaccacgaattctttctggaggttgcaactcgtaaccatagcaactggaagtggtcgccggctcccggatgttgtggggatctgcggccgcctggcccagcttcccgcagccgcccggcggcggcctgcgctccacttcgggagtggtagttcttctcttcaccgctgccgggcaggaggcgcaggcgggactacgcgtcacggcatgcactgcggcgcccagccggtcaccgcctgccggctgcagacgcctgcgagcaggttgtttttataagaggcgtcattggcgcccgagctgtgaccgccgccactggggcagccagcacaatcgggcggaggtggcgctgccccttcaggtactgtactaggcgggcttagaccccgggagggggtttgtgccgactgtctgagtccctggccgacacgctcg

SEQ ID NO: 13964 - DNA, 2300 bp, Homo sapien
tatgaaagaaatgcataaaccctgtctttagaagataatgtaagatttggaaacaatatggtaaaagtaggaatagaacaaaagggggaaaatgacaaaagaaatttttttaaaaaagtccatgggattcgtgggtttctcagcttaaagggacaagggaaagcaagtctaggatgactcccagtattcaaagttaccagaagcttgagatgatgaactgctaaggtagtgagtgtgccctattttggggaaaagatggttttctcttcaagtctgttgctccttatctttcctcaatgaatttctaaggagcattgaaatttgtgtgaaagaaaggcttccaaaagtaaataagtttaaaatccagggttttgtattatactttcagatttccacaaaggcccagtttctctgttttttttttaaagttaaaaaaaagttgaaaatcaaaagccccaagtgggaagtaatttgtgtgtatctaaatattgtatacattcactgttttatcccagcaatttataaactgggtgtgcagaaagcagcctggagcaaaaacattgtaatgggagttaagagatcaggattttaatgatggtctgctactaatctatacgaaaatggtttgtgtataggtttcagattccttaaatatgtagaataagactacataatcttcaagcttctctgcagcacttaagttcagattctacttaagcacttacggaatgtgtcagtgtaattccaatttaccctattccagatttgtagcaaagcatttgtcagatgaatcatagggtggtttctcttcagttttcaaactttggagcaaaacctatataggtgcttttggcggccttacagttaataggatttgcaggatacaatagttttagacaagctcctggtatgtgttgtgaacaaacgttttctgaagaggaatttggagcaaagcaactatttcagggaacagtttgcaaactggggagttgaagccttaggtgtaaaacaaaggtgcattccagagaacaaagggagggtttgggttttacagcaaaagtttctgcccaggttcccagtcaggttcgtttatacaaatgaacgattgaaccgcacttagttctgattggttgatacagctgagccctgattggttgaggcaggtgagccctataagacccaacactcaacagaggtgtgggtttggggagaacgcagagtccatgtgtgacctctagtaggtaaatgaccacgtgtctctattttaaatttagacccagttagccgctctggatgttgacggattggctctttcaggttcacatttgttcacagtctgtatgaccaagaaatttgcaaaacagaacaactagcgctaactcttaatagcctcagtcagaataaacagacaagacactgcaccaagggcgtatgggcattgcacctgctcctcatgggctgctttcccgagccttatgcccacagccctccttagcattatcgcattatgaggctggaagtgcttttttttttctttctttctttttcttttctttttttttttttgagacggagtttcgctcttgtttcccaggctggagtgcaatggcgcgatttcggctcactgcgacccctgcctcccgggttcaagcgattctgctgcctcagcctcagcctccagagtagctgagattacaggcatgcaccaccacgcccggctaattttgtatttttagtagaggcggggtttctccatgttggtcaggctggtctcgaactcccaacctcaggtgatccgcccgcctcggcctcccaaagttctgggattacaggcgtgagctagcgcgcccgacccacagagtgcttttttttttttttttttttctcaagcagagggtatgggtctacttctttgaacattcgctcagatcgtaaggtaaccccaagaatcggcatcactctctggtctgggcgcctggatagtcacgcatggagtccgcgaggtgctggcgccggagcacgctgggaacgccgggctcccggccggcctgacccggaagggctggcgcatggtaaccccagcttccctagcaaccaagcaggcgcaagaagcaaccagccgcgctatccgctcccgttgctaccggaatgcctcttcaggttagcgattacagctggcagcagacgaagactgcggtctttctgtctctgcccctcaaaggcgtgtgcgtcagagacacggacgtgttctgcacggaaaactatctgaaggtaagaatgcaagtcttgcctgccggtct

SEQ ID NO: 13965 - DNA, 2300 bp, Homo sapien
ttttaattaaataactaggccaggtgtggtggctcacacctgtaatcccagcactttgggaggctgaggtgggtagatcccctgaggtcaggcattcaagaccagcctggccaacatggtgaaaccccgtctctactaaaaatacaaaaaaattagccaggcatggtggcgcatgcctgtactcccagttactagggaagctgaggcaggagaatcacttgaacccaggaggtggaggtttcagtgagccaggatcacaccactgcactccagtctgggcaatggagcgagactccgttttgaaaaaaaaaaaatgaaataagtggtattgtgccaaaacaagtctaataggaaaaacaatcaagctcataccctataaatatatatctaagatattaggacccaaaagaaaaggaaaattatgcagggtcacttcacattctacatgacctctacctagatattctcatttaattttaaatcacattatcatttccgaaagcccaaatttaaaatagtaaaataactaatgcatttaacacctagtgcctagagtttggtctgtaaagctattctccactaaatagaactaaaagttcttggagaatttcaattcctagagaaaaaaaaagaaaagaaaaacctttaaggtggacctaagtgatcttgctactagaatgagggatttttttaaatgccttttaaagttccaaagtggtgttaagaaaacatagaaagcaaccttttccaatggcaaaatttcgaattttgcacatcaaaagtaaataaaattataggtaattaattttaggttacgaatagtaaatcatacttaatttttgctccataatgtatgcttacactctctaagaacctcaggatatgaaataaggaaataagtatgcttgtgtactatagagattgttttgaaatttttactttaaacttgtaatattttttacaaacaaaataatttatggatttacatacataaactattaataataaaaggaataagtataaatctatcactgaaaattacagagagaggaaaaaaataacctggtgatatggtttggctgtgtcaccacccaaatctcatcttgaattgtagttcccataatcccaacgtggggacccagtgggtgataaccgaatcatgggggcagttacctccatgctgctcttgtggtagtgggtgagttctcatgagatctgatgattttataaggggcttccccctactttgctctgcacttctccttgctgcggtcatgtgaagaaggacgtgtttgctttcccttccaccaagattgtaagattcctgaggcctccccagccttgcagaattgtgagtcaattaaacctctttcctttataacccagtcttgggtatgtctttattagcagcgtgagaacagactaatacacctgtcagtctccttcatgctttctgattgcacgctttaatgcaatgaccagaatcaaacagaaacgaccttgggtgttttctctggattttcctgggcaaccagccagtgggacctggaccttctggctcacagttggaggggctacacctgaactcagcttttcatgggatggacagtttcttccaacacaagttccaacaactttctgtttgacccaaggtctccagatactggataatgggctttttcaaaaaatacctatcgggccgggcgcagtggctcacgtctgtaatcccagcactttgggaggccgaggggggcgcatcacgaggtcaggagattaagaccatcctggctaacacagtgaaaccccgtctctactaaaaatacaaaaaattagccgggcatggtggcgggcgcctgtagtcccagctactggggaggctgaggcagaagaatggcgtgaacccgggaggtggagcttgcagtgagctgagatcgtgccactgcactccagcctgggcgacagagtgagagtctgtctcagacaaacaaacaaacaaataaatgcctgtaaacagactgcctggtgctctagtagtttccttactgacaaaattctttttgtgtgtgccctataaataggagagcaacaagaggatgggattcctctcctattatgcaaacccacaccatggatccagcagactactctggccccagcatgctgctccttgggatgatgggagaagggggaaacctgtgttttctcttggttttgtaagtttcccctttccccagtaaaactcatcccttaatctagtggttctcaaactttggtgtgtatcaaaattatctggtaggctg

SEQ ID NO: 13966 - DNA, 2300 bp, Homo sapien
aagctccctaatatgttgccaccattatcattgcaaccaaaaaaattctgaagattgtgtggtgatctacgaaagagataaataattactgttatttaaacccaagtgaaacaatgacggcagcagcatattatcaagaaatttaaattatgcatgaaaatgtgatttaaaaacaatgtcctttgggtaacacacaagaacctacactttcacagacaaggactcgacctcacatgtcacaagctactaaagcaaagttaagtgacttgggctatgaaattttgtcatgtccattttagtcactggacctttattccatggactactgtctatcatttggagctttttctaagaaacaatgcattccccaatcgagatgaagtaactggaagatgttaacaatttatacagcctaacaaatgatgaattttataaaagttagacctttaatattctgttggaagaaaactattcatgctcctgatgcatattttgattgaataaaacttatttttttaaatacattgttttaattttgacctacaaaaacagcaatttcatatggtacaaggtaatacaaggttttctccatttacccttgactagttagaggtgagtacaaaatattttcagtagttgtaaaatatttatctttacaattttaggaaacaaaatgatataaactatacttctaggtactcctttgtgtgaaaactttaccagttgaagcaggttaaaatgcagtattttgggctgacaggcatttgatggtgttcagtagtgtacttgaagatctcattttacttggattttttattatacatatttctctaaatgtttaaggacctagttatgttgctcctgaaagtttaatgagtgctgatttttaataaatgatgcactgtatgctgtatgcctagttgtagcatcagatcatgatttattattaccctgaatagagctagatgatagatattttgagtagaactttccagtgttctcaggagttaacactttacatggtagtacttgagttgtgatcattactaaaatcaattatgcagtttcttaaaccctttatctctttaagtttcagtagttagctgtttttgtgaaaatgaaataacttctcccaagctagtctaaaggtatgtgttatgcaatataattcattttctatttccacatagttgtttttaaaaacctacaaacaggtgaatttttattcaggtgtttaggtcttcaaagcaccttacttaaataagaatctgtaaatattcaaaagaaaaactcacggttcattctgatagtgaatcatagccaaactgtaatcatagctgatgaatagcgttcatgtgtttgaattaattttcctgctagttctacatttgtctctacataatgctaagtcaaaagttatatagatgcttttggatggaataagtgatgaactgtaagaatagccagatgataatttgtctgaagaaggctattatacaaactgaaatggcttcttaggataaatgataagctgccttcaactttaaaaatatgcagtgatggaaaaaaacacaggtggaattgtaccttttttggtataatccctttccttcactgaaagtcctcatcttacacacacacacacacacacacaccccccacagtttctccaacatccttgagttttgcttaaattcaacctggctaactatgagcatctaggtttactcaccaaagctaggttattgacagaaaggtgggtttttttttgttttttttgttttgttttgttttgtttttgttttttgccagtcttgctctgttgcccaggctggagtgcagtgatgagatctcggctcactgcaacgtctgccttcctggttcaagtgattctcctgcctcagcctcctgagtagctgggattacagtcgcccaccatcacacctggctaatttttgtatttttagtagagacgggttcaccatgttggccaggctggtgtcaaactcctgacctcaagtgatctgcccgcctcagcctcccaaagtgctgggattacaggtgtaagccaccacgcctggccagacagaaaattttaaaaagcatcagttcctttctcagaacttgacttgctcatgcactagagaatttgtggtccacatgcttctaggtgttactcgattcactaatactgaaacagctcagcttgtgaaagataaattgttcttcagacagagtgcttagaattagatttgtgatcagtgttttccttttgtgtgaaatactttagagtactgcta

SEQ ID NO: 13967 - DNA, 2300 bp, Homo sapien
atcacctagagagcctttaaaaacagacgtctagggattctgactctagtaaatctggggagggacttaggaatctgaaattttggaatgctctccaggtaattctgattatgtgcaaggaagccatcaagatttggaagtaaaatcgatttaaaagactatgcccaagtaagatggtctttttattcttgatgaatcattaaaaagaagccaattcatttctcttgattttcatgctatttctgagtctctagctttagggaattacaataaagaactcaaaatctcttagcaatgatttttctgaaccattctccttccactaagagttataaaatgaaaatatgtcatttccatatttttctggaggggggacagggtcttgcttgctctgttaaccaggatgaagtgtagtggtgtaatcatcgctcactgcaaccttgaactcctgggcttaagggatcttcttgcctcagtttcctgagtagttgggactataggccggtgccaccacgcctggctaatttttaaaaattattttgtagagaagggtctagctttgttacccaggctggtctcaaattcctgggctaaagtgatcctcccgcctcaacctcccaaagtgttgggatttacaggcgtgagccaccacagctggccttcatttctttgttgacttaccaaagtgctttcaaattttcctccaaccaccctataacatagattattagattcaatctgctttatttttaatttttttttttttttttttttgagacagagtctcactctgtcacccagactggagtgcagtggcgcgatctcggctcactgcaagctccgcctctcgggttcacgccattctcctgcctcagcctcccgagtagctgggactgcaggcgcccgccaccacacccggctaattttttttttgtatttttagtagagacggggtttcaccgtgttagccaggatggtcttgatctcctgacttcatgatccgcctgcctcggcctcccaaagtgccgggattacaggcgtgagccaccgcgcccggcccccaatctgctttattatattaccatttgcttcggctttattacacttaccaaagccctgccaccccagtcgtcccagggccacttcaaatctctttattcatacatcaatgaatattttcccgaacacttactatgtgttactcagtattaggtaccagaggatacagcagtgagccagtcaaaattcctgcctgcatggcgcttacattctagttaggaggaaccttctcctcagagtgcttcctgtaagaatattttccttagcctgtcctagtctgactcttctaatcaggaattccataattccagaccacccttattagataaagggtaacatttgcctccggccacgctatgtcttaacgacgatcagccgctgtggcgattgtctggtatgcagctgttgaggctgtacattggcttcatgttaacatctgttctctgtgacactgtgcagctgaatgagttgggtgtctgtctccggaaggacgagactcctgtctgtagctagttctgtgtcctcccacgcttcatgagtgcttttcggtgattcttacatcaaaataagcccagtggataaccagaaaacctagcaaaacaaaaacaaaaacaaaaaacaaaaaacaaaaaccagggaaaacaatttcgtagaagtgcgttaaacaatgtcggagctagaagagaccttcgagatgtagccccactgccttttatagacaagaaaactgagacccagagaggttacctaagtcgcctccggtcacacagcccaactgaagaatgtggaccggtgatcacatctaatttacaatcacactgggggtgttcctcctaaaatttaacgtctaaatgagatccagccgcgtcaccgcttctacccacgctcccccctcccccgcccaccgtcctttctggtatttattctacgtcgctctttcttgaagagtcaagtcgttaaaataccaagtggaggcattctacagacaggtgtccacaccacggccacgcggacacggagtcggggaatctggatccccacatgcccgccgagaactctccagctcccgcttacaaagtttcctcgcatggtacgttcatctttccgatccctagctgcgaggccgagacgcctgctgctgtggcctccgacgaagttcggagatgccctttccttgcgaaagctgggcccggtagcgtcggccgcggggtcgggcgttctcgggcctggcggtcggcgag

SEQ ID NO: 13968 - DNA, 2300 bp, Homo sapien
ccaaggcattttttttaagtgcaggttttgtttagggataaatattcagagttctaccaccctacttgtgttttcttgaattctttagagaatatggtatctacttaatcttccttcagtgtcagtgctgtgaatgaggaatgctaactccaggagtgagttaatcctcttgcaggtttgaaatcagcaaattgtttactcagctacataacataggccttttctccgtcatgagacagttacctaggtgccgagcagtgggagaggataaagaactaaacgcgtgtagagaaggggtcccatatccttttaaaagtattttttcaaattttctggaagtgacttttgattctcattttaaaaggaatcataatgggtttacacttgaaatgctttgttcctagaggaggcagggtcatgttcactgatgttctaaaatcaaaggaatattagcagataatagtcccagcatcatctgctagtctaatgactgtagatataacatttttaatttttttaaatctgtaattttgtgccaaactggatgtgattaagactaaagttcaatgccagcaaccacttctgaactaaactcagagtcccccagttagttatctaagtacggaattcatcgcaaaacaaacaaaaaagcagagctttaggtgaacagtctgcagcaaggaaaaatgctgctcctgcctttatagctcctgttttatactacctccttttaaagttattctagtgttattttttttcctgtactcagggaacgttttgttacttttgagctgcctcatggaagcataggcagattgacagggtatagcgctttgtggttggtaagtagaagtatatagggccaacttttatcagtatctaaaattaagtacagtgagatcattttatttttaagctttcattaaaaggcaaacaaaatctaaagctgaaacatcatccatcatggttatggaagatgtgtctaggactacatgaattcgagtggttttaaatggctaaaaagacgagctaaagtccttgaggaaagtattttgtttgtttggtttttgatgaataggcttatagttacaatagaactttaggctataactatttgataattatttaacagtacattttttaccttttcattttgttcttatacggactttttcataataattctgttaccaaagaattttcagtagaaaataaaattttgattataattccccccaaattgaattaactagaagcatttatagatatgaaacttacacaagtagttactaacccaaaacaatagggtttatattgattgttgtagttaaatagattagtaatgttaactaccttattgttaccagagcatttaaaataagttgtaatactttctttaccagcagatcgttccaaagaatttcaggtatagttttttcttcagcaagtaaatcttcaactatacagtattaaagtatttttatattgttgaaactacttgttggagagaaaattttttttttttaccaaaaataaatactttggtctcattgaataagatatttagtaatacagcaaagacttctttttacttgaccaaatcaagcttctttgaagtcttaagtatgaaattgtaattaaaatgtgaagattttcactcatttttcatagtggtattacttcatggtattgtacttcaaaggggctaatatgcaaatggtaactattttcttttccaaagatgtatttgctgtaagtactgatacctgcatgtcatttttatgccaaatattacaagatactgctcatcagtattttcataccaaagaccattaagatgtataggttagcctgtaagtaagtaaagatgagcagatttgaaataaatttatttagaggccgatagagaatctagctttagtagcaaaaaatatcaaagggctaagtttacataattaaaagcaatacaattatattggtatttatcagtgtttttattcaagtactttttatcagcaaattaaaaagaaaaaaaccaaagatatttaaggttacctccgcatataggcaaatatagttgtacattaaactgttgtttcttgtttttatgttaaaccaaacatgtctcttcggaacacagtctgtatacaaataacatgcatgaggactttccatttaatctgtgattcagccacatgatgtttttgccaaatgatgtgatactttccaaagcaccttgagtgtgaaatgtcaacagaaatatcagcaagcttttatgttgcagagtattatggtacctc

SEQ ID NO: 13969 - DNA, 2300 bp, Homo sapien
gtaagaaaacatgattctagatcatttcagtatgaacattcgtatgttttgtcaatttcaatgaataaatgtgttttaaagaaaatatcctctttttggttaaaaaacaggtatgttaaatttgccgttcaaaatctcactcttgctttttgccagtaacataaggataaagagcactttcagaatataaaatttaataataaaattcttatattcccattgtatttcttcaaaggttactagtttaaattgtaaatatgttgcaaacttttttgtactgaatagaacattttctaggcatgaataactgtaatgactgttacatattgagtgtatgtagtgaccagggccagaggtactggacttctgaaacttggactttatacgatttatcacctgtcaaaaaattcttagcacttagtacctgttgattaactacaatatgcttatactacttaagggggaaaatattacttgttcagtttgtttcctaaccatgggttgaaaattgagttgtgattcttttagggaaggccagatattcatattattcttataatggtgggaaatttcatccatattaagatagcccgagagaactgattatcctcctctgagtcttcataccatattgtaaaagaagggatctgtctttccagagtctctagaagaccttttttagtaccctgcaatgtgaaggggaatgatttaatacatgcttaatcaatactgttctcacttagcaaatgttttatcctcaagcaatgatctgctcttagtttttaaaatgtttttatataatctccaaatctcctttttttccatttagtcccagatctcttattatatctttatcatgccacttatttaggtgtttataaaatcagacttagaataaatgaaaaaaggttcacttatgtggttaatgaattccaaattttagttttcattgaagagcctgttccactttagagtgaactacagtatatatgacatctctagttacctcgttgctattaacaacctctgttatgcatgtctaaggtgaaaagcaggctaataaagatagattttgtgtgtgtgtgaggtctgttctccctctatatccttgaagaaagtgagtcttagcatagcagggaaacactgtaaaaggagctattattattttcttcattttgtgtctgaagaaacctaggtaagagaggttaatttggtcaagatcacagagtcgtacatggtagaacaaggtttcagacacagagaagctaactctagaacccatctgaactcttagaccacctgtcactgtatttgactcattttcctgaaatgcagttttattaaaatgtttggaggaaaaactgtttttatattaaacaacatatgttgtaattaggaatacaaaattcacattaatttttaagatgcaactcttacacttcaaaatattatttgcttggttataactgtagaatactaggcttccccacccttgtataattcactctcccttgtttcgaagccactttggtggaattgtttgagaagtattctcatattttgtatgaatatcaaatattctcatattcattccaaacaacaaaacaatcacagccacagtgaagaatatcttatattctttgtttccacacacttagccctccctcattattttttcttcttttttctggtttgtactctgtttcactgaaaacctctgctagggctgaaagtgtctcttctttattatatgttgctaattaagagaattcagttactggtgtgctaagtggcaattcgattctaaatatttataaacaacctgatttcttctatgactagttcccctgagacctcctgaaattagtttgacaagtcgaagtcccactgatattctcatctcctggctgccaatcccagccaaatatcggcggggccaagtggtgctgtatcgcttgtctttccgcctaagtactgagaattcaatccaagttctggagctcccggggaccacgcatgagtaccttttggaaggcctgaaacctgacagtgtctacctggttcggattactgctgccaccagagtggggctgggagagtcatcagtatggacttcacataggacgcccaaagctacaagcgtgaaaggtgaatttctgaagactgttaagaaaatacagtatttttacttttgaatcaagtttttcttctctaaattatgtttatatttttaaattttgttttacaaataaaaatattccatagatgatggacttaattgaaaaaaattaaacttttta

SEQ ID NO: 13970 - DNA, 2300 bp, Homo sapien
taagtactccttgctatcaaggatttgttttcagtacgaataatgccttacataatccataaaatatttttgaaatttggtggcatttatcttctttgataaaataatctatcacctatgtatctattgttttctaaatttcatgttgtgtactttgtatatgtaagtatagtttaagatttttctgtttagaaacaattaccagctaatgcaaagcatcactgcctgcttagaagttacaaagtggtgtacttacgaatttcattccagacaaggtataaattccttaactgagacttaatataccaacttatgtatgtagttacattagaacagtggtttgactgtttagtaaaataataaactatgtatatttattatttttaagggagaaagtaaacattgtcaaattccccatatttttgattttgtatattttaagtattttgtatattttgaatgttttctgaaatcatatagaaccctctgaaaattgaacaggacattctttactgctatctcatcatataaaagtagaaatcaaatgtgtcttccaatttttgttcagaattattggttctattttggagatttaaaaatttttcttatattttacttttagcaaatgtcttagaggaaaaagagaaactactgataaatcctagaaatttctctcttgctttttcatagaaaccatggtagaggcttagaaatttcagttctatacttcaacagcctagcttttatggaatatacgttaaaaacaaattcaaacacctaaggatggggatataataaaattagccatagaaacaggtggtttgttgttgctgctgctatttgttttttgtactttgaagtagggttttgaaaaggaatattttgaatgtaaatcaggggtcatggaagcaagaagaatgaaagtctgataactgagcatgctggagtatgttaattccctttttagtgatttatgaaggtaaaaggaatgctggttttggtggggaccactcttgttccctattatggttgtttcattagagcctccacatgaggctcagtggtctattcaggaatggaacaaggctttttaattcgaactcaaggaccttgtttggtaggtcagaaatcgtactatgcagctcctaattaacaagccattagccagtctgttgtgaaatgcctgtaatcttgtctaattaaaatgctatcaagttaattcagaaatgtgggaaaacttaatactggaatttgccttctgttttgtttataaatccagtgtggggagaagggactccgtccttagagagatttgattaagttgacatgcgtttactgtgaattgttagcaaagcacagtggctgccaatgctcttgttccactttacaggtttgctctgtaggaattaaatcctacaaagacaaatcctcttctataccttgtcatgcatatttgattaagagttgctgagaatttttttctcttaaaaaaaaaaactcactgtgggacaaagcattttgaggcacattctgtgactcccagtttttttgccctcagtattataaataaaagaacaacttatgtcagtcaaatttaatagaatctctaggggcaaaatgagatctttcgcaggacaacttctggtttggtttgtttttctaaagagtggagccattacattccctactgtctctccatttatgtttaaaagaaaaaaaaccccatgagttgaagcaagtaaagtttacactgttatgaattacaatattctgttgtgttaagctctgttatgttactactgtacattgtctctgctgtgggttttgactagatggtaaatgaagtttagagaagatgaattcttttcagtttgatttattcaggaaaaatgtcctctaataatttgtagtgaaatatggttacttttagaaaataaagaccttcctgttcacattttgtaaaggggcacagaagataagagattgagattagacccaaggaccagtgtttcacagtgcaggaaaatggtcttgttaattttattttgaatatctgtcattttaaaacatggattctttaatttaggtttaaataatgaagagtatcaagtagtcatcggaaatgacacaactcattatattattgatgacttagagcctgccagcaattatactttctacattgtagcatatatgccaatgggagccagccagatgtctgaccatgtgacacagaatactctagaggatggtaagaaaacatgattctagatcatttcagtatgaacattcgtatgttt

SEQ ID NO: 13971 - DNA, 2300 bp, Homo sapien
tccagacttctatctggtgtcttctggtacttactttgagcccaggatgagctcaggagcatcagaagaaatgtgtagttatggcccatgctctctggaaagttaaaatctagttaggggacatggaactgatgcttatagtgaagcttaccaaagagaagacatttatctgaccaaatacttggagttcattattttatatgttaataatgagaggagcttttcttatttcctggaagttttaggccacagacatgaacaattagatctcattgattagcctattagaagggattcattctttgagttattagaccccacacttaatcccagaaagaacgctgaagtcatttgaaggcagagtaaaacaggactcctccttatttaaaagaaaaagatgttaagagaatattgactgaagtctgtaaaatcataaaggaggtggtttatacaaaagcaaaaataacataataattgtattactaagttttcaactattgtacgcattcaaaaacagggctgtttcattctagtcaaatgaaatgcaatgaattcccataattctgttttgtgtcttaattgattaaaaatctgtttagaaaattctgatcaaaaacagatctatcttaagcagttttttttttttaacaaagtatgagtatatgttttacatatttgcttttacttaggaaaaaaaacttacttagcaaaatacaacttgggtgtagtagcatgtggtataaacaacggaactattttaccttttactttcctatgaatgagccagtatatatttattactggagttccagctataaaatttaggtgaggggtttaaatataccctagagtattatttaaaaataaatttgtttctttcaaatagaataccaaccttggtctatggcatttgagagagaaattaaaatattaaattttgattgcctagtaaactgaaaataaaggttaaataaatacaaagcagaaaaaatatatatacaaaatcacaacctctaaaaggacaaacagtccactgttctctactgtgggagctttatcagcactggtgagtaattccacctctagggtagggctagctctcaaaaatgtaaacaagtatgtacttcgtttatataaagaaatgtgcagcttggtttgtatttctttatagatatcaaacagctaaatggattgtttcaaagtaccagcaggggccagcaaagagctcttagagtttttcagaacagaattggcattgagacatgtttatttgatgtgctaaatcctttttagacttctttacttaccacaacactctcttaagtgaatgaattgcagagacagtggaataaaatatcctgtgtgttcaaactatcttggggtatagttttttttttctaatctgcatatatttttattggaatgtttgcttaggctatttcttggcagttttaatagtcaaaatataaatggcatcatttaaagactgttctacttggctggaaaaggccttaaaattacaggagaaaatgcttagtgacagcttctcttaaactttttttcttgaacctatgcttcagttttgcaatggtattactaggttaattttgtagttctgtccttaagctttcactttttatgtaactagcactttggaagctaaaatatgtatctatttgatgtagtgctaaagttttaattcattgtaaagttttggtatttccaaatttacctaactgtttgaattcacacattaaaaaaaaaaaattaacagtccctatattaactaacttgactagattcctagtatggctactatttggaaattcaatctttgatttgatgcttaattacatggggttttgttcctaccaacttcctgtaattctatacctatgggtaaaaatattagtgggcaaagtcggctggagaaagtataggcactgtgattcacatagttaaatgttcatttagtagagctggggtgaaaaaatactgtttcaacttgaaatgttagaagattgttgttcttgtgttactcattcatgcaaattggagaaggtataattgaaacaaggttggctgtgtttgagtcagtgtgctgcagctgagctcagcttaaaggtcgctggaaatcaagtgctttgtaagtgaaggcattttgactacaagcgattcaagacattttggaaacgtcagtctctggaatgggtcgtctttttctttctatgatatctggtatctaatgttttacttaggataaagactactacttaatagctcttttaggcaccacaaat

SEQ ID NO: 13972 - DNA, 2300 bp, Homo sapien
tctttataattgatagtattttcaggggacatatcgtaagattatgccaatatcctatttctcgtcaagtcttcatcctcagttttagcatccattgatgaattctatctgaaccaaacaccactattttgttttatttccatctctgttagttggcattctatgtaagaagagctttccttttcctgtcatttatttatatcagcatagacttgtaaaatcccactttattcagcaggttgtaatcagttactgtcattaaatattttattgctcatactgtcccagtttgtccagtgggagccctttcaaggaggttcctaggtcttcgtaacaagtccccatcattctttgaacactttctggcagaagttgttccaggcttctcttgtattttgcttggctcagctatctacaatcagccattttccctagaagcactggtcctatttagtataaaatggtttttacatgctacaatttgggtacttggtgtgctcattgttactgggatatactcttggaccatctctgaacagttaagcgtgtgtgtgtgtgtgtgtgtgtgtgtgtatgtgtactctacacacatatataagtatacacaaagatctatagctatttctatatcaatctgtaaatacataaatttaaaaatcatgaattcatactgattttttccaattcaaacctaatacctgagttcctttatagccataagtaccttttctaacagtgaaaaaatttgacttttattatccttaatatatttgttcattgacttatgtgttcagtgtaactaacttcctgaccacgcagacatctcctctgccacttcagctcttcacatccttggatgccagtgggaatattgctattctctatgcagcatccctgtgcaacgccgtcctcccctcctcagtacccttgccagtgggcacccttctgatgcatctctgtatggtatctccctcctcccctcagtgccccgtgctggcgagcatgccaaccatgcacctctgtgaaattcaccctcactccacagacattttctgtagtggcctgtgattgactgctctgcgccaggaacagaaaaggagaaggaactataatttcttttataggtaattaggaattcatatatcacataggagtagaatctttgagctggaagagaccttgtaaataaatcatttagggtgagcaggggtatagaaaatgggattcttttgtgttggaattctggccctgtcacttacttggtgaatcttgcataattaaacatcagtcagagcaggatatttaagtctgctgattctcccatccccttgctgtctcagaaatattctatagcatttggagacatgcaggaaccagttgaacacaattgcttctcaatctatcatggttatctactccagagctgaatctttaagtcagatagctgatttgaattgctgaacccattgttctgctgaattctgtggcaattgatgttacttcttctttaggacttctatttcttctggcctccttgccaatagtatcaaagtttaagaggataaatgaatggggaggggataggagaagtctggagataaatgcagggagaaaggcacagcacaaacaaaaagcattttgataaggcttttctgaaagttgagtaaatatgtctgtagcccattattataactcatggctggactcaaatgtctggcttcaactgatgcgagacatgttggggcaatgaagagagtaatatgaacaaacaatcatggccgtcaataaagatgctttagtgaaagtattctcctttgggaaaaagagtcaacctaaataaatagcaactgcctttaactgaatacccactctgtgccaggcaccaggttagattttttcatactttagctgtaatcatcacaacattattgcagaagtaggaagtattacccccattttagagataaggaatatgagattctgatttgttcaagaaccttctcccagtagggagaagtgttatattcataacaaacacttggtccttccactttcctgctactaatacgcaaataaaataatttaacagaagagactttttctcaggaatatgatgaatgtgaatggaatgtgtgcaaaattaacttgtaattgttatgctctcatttccacatcttctgtcttttcttgataaagcttttaggtggacctctgaagtacttgatttctgtatttgcttaacaaatatttgatgaacactatgtatcaggcacgtgggtcagggcatgaggtataatgat

SEQ ID NO: 13973 - DNA, 2300 bp, Homo sapien
tcctagctgttgaccgggatacaataattactctagttcatcttgtattggtagctgtttaattcttcatgatttcatattcggaaagacagaataagaaatcatgagtcaaatcagtggtctttagaagtatcatcactaatacctattggatacatcaaatggccaatttgctttactttataatcccttggggatttactgatttttttttttttaattaccagttttaggctgtgtatacttctcatatattcattaaattttagtagcagtaacggaagctgtttttacacgtttgtaattgtgccctgaaatgacactgaattaacttaaattcaaatgacttaactaacttaaaattaaacataaaaatgtgtatcatgagagatgagggaaatattcgcaaaatagaagggcacacaatattttcagattattttattcttaacccacaaatcccacagatatgtgacaacttaaaaaacaaattaatgctctcatggctttttcgatttaggtaagccaacaattcctgaccattctgtaattttgtagtcatgtttgattaagtgccatctctttccccctaatacggataaaatctgaattgtgtattaacagaattttgatacatattatatgaatgaaatggatcctaccaatcataaagtacgacaattgaggtggagtcttgttctgtcgcccaggctggagtgcaacggcgcaatcttggctcactgtaacctcctcctcccaagctcaagcgattcccttgcctcagccacccaagcagctgggactccaggcgcccgccaccacgcccagctaatttttgtgtttttagtagagacagggttttactatgttggccaggttgggctcgaactcctgacctaaggtgattcaccgccttaggtttcccaaagtgctgggattacaggcgtgagccaccgcgcccggccaagtacgagaaaaatcttacgtaacaaaccagtaatatgggctatagccttgttcccacgtagcatcttaaactgttaaaaataaatcagagttattctgaaatcattgaggaaaataaaaattagattttgagattgcagaattctgcaaatttctgcaaatgtataaaaacaacatgatataaattgtggcctgggtgttcataattctccccagactcttttatggatgccttatttggtggaggtcttcctgtaattatggaattataaagcccatcagacaggaatattaaaaagcatgattattccataaccttattccacaggaggagttattccacaggaggagttattctacaggaggtcctagttcactttatttttccctcttcgtcactgccttctggtggtgctgcggatcaacgcccagctaaagcaggtttagagggtcagcctggagattggattgttactggtgggatttaaagatggacagaccataggacaacaaatagcttaggaactggcactgtttacaaatcctagggagagaatttcagatcccgagtccaagactgctgcgatccctccaggcctccccatttgctgccacgctcaggctttccctggcggtccccaggtccagcttcttatgggaatgacacccttaaccgacaagaaagcgctatgattttccgtttgggatttaagcggggattaagctcacggattcccaggcgtctagtcagaggccgaactctgggtcggatctcagcgagacttgttgctgaggaacactgcagcttggcttcccggcgcttcccggcgctccctggctccccggcgggcccgtcaaccacccacctcccgggaagggaccgagggcgcgccccgccacgcgcgctccccacgccatggtccccgccgcgcgcgctcatcccacccgagccccgccgcacgccctccccactccccgagccccgccacgcgcgcccccgcccagccccaggagcgcgcgccgccggccttttcccgccgcgctgccgggtgccgctagtgcccgctcgccgcgggaggcgctgctgtcgctgagggagcgcctcctcctcttcctccaactcttccccgcctcctcccgcttctcctcctcctcctccacagttgcctgccctgggcgggggcgagcgcgtccggtttgctggaagcgttcggaaatggcaacttgcgcggtggaggtgttcgggctcctggaggacgaggtgcggggaccgcggggctgcggggcgggcttcccttcgggttattcagcagccggacccggggaggtagcgg

SEQ ID NO: 13974 - DNA, 2300 bp, Homo sapien
tatgtgggatgtatgtgtgtgtaacctctccttttgtggtcaattgaagacccatttcagaaaaagagtgtcacagagtttttcctgtctgcatgtaaactgtatgacctaagtctgtttattcattgtactgaccagcaggagaatgcttgaccagccttatcgagctaaatagctcacttatgttacctcatttaattcccccagcagtcctgtgagataggtgatatttattcccaatttatagacttggggaggtcaattaacttgtccatgggcacataagtaatggagccaggatttgaattctgatttgtctgtctccaaagcccagcttcactcaattatatcataatgtcatatagtaaaataagctttaaaaggaatgaacccttcagtttgctctgctgtctttctcctgcccctgccaacacctaaaagagtacatcaacagatgaaggatttaggaggtatcatggggaaaagaaacatctctttcctatttctgtcattcacaaagtctaactgtgggaaatgttgaatgaattgaatgaatgaatttttaaggtctaagtgcaaataaaggtgtgagtttaacaaaagtattaaaaattacatatattaaaaagacactccatttttgaaagcaatcagcctgagagggtaaatactttaccaattgtatcattactcaaaacatttttagaatgtctctcaaaattttgatctcagcccttactatatttttcaaaaaagaccttcgatagtagactaatttttatcctttgaaggtgaatttttttttttataaatatagtctccatattaagaacaggttgtgttacaaatgtccttttgtaagtcagctgcttggaactcattcctgtctcaaaaccctggcaggaaggataagacagccaagctatgagccattggcagaggctctccagagtgcaggtgctgagaagccagagctgaggcttggggtcggaaaggggcaaaacaactggagctggatttgagatgaaaaattgtgatttttaaaaggggctgggggttcaacagatcctcatcattattgagtatggggagagagttatagcttcctcattgtctatttcctgctccccacaccaagttgttgttgttaactagaatgatgaaaagcagaaattgggatggggaaaagaaaagaaagggcaaggtgtaccagcaggatagttgttcctctcctttcttctcttcattgtttttactgcccacaacttactttctaatgatctcaatgccacgccctaaatctgaaatgagcttttaaaaaatttttattttataatccatttttcctaaaatttatattttgcttattttgtcaatttttttcagtgtttatcttactgttttaaaggttttctcagtgacacttttttggaatatcttaactttagtcttgttaagaaattctgcttctgaatttcttctaggtcatactggaatcattgtatagtagcaataaaataatagtgcctatttccatgaattgctggtaggattaaaaactgttttctccatacaaatttattccattatgaggagtggcttcagcaaatatttattgaattattgaatgcccctcatgggctaaatattaaaatcatgaaaatacatgtatttatttctgattagaaatggggggagggaaatttactgacctttgagaaaatgtaaaaatgctgtgttggcatttatctcagcttctgcacatttacgatatagctacggtttttaaaatcctgttgttaactgaaactgtcacctgattttaaaatcctgttgttaactgaaactgtcgcctgagttgaaccatattgtaagatgacaaaactatattgacaattgtttataaattcgaagtctaatgcttcataaagaaattgtgagttaaaatttgccattttggttgctttgtccagtagatggctacattctcaaagaaattcaaaggaacctcccttctataaaggagagtatttattgcagctttcctttctgtttattttcaggaatgaaaggaattacccagccttctgcttttatacctacagctgaaagtaattcctttcagcctcaggtgaagactttgccatctccaattgatgctaaacagcagttgcaacggaaaatccagaagaagcagcaagaacagaaactacaatcccctttgccaggagaatctgcagcaaaaaagtcagaaagtgctacaagcaatggagtgactaatcttcctaatggaaatcctt

SEQ ID NO: 13975 - DNA, 2300 bp, Homo sapien
ggaagatacttgctctgagagtgagagtgagagtatattgtgttcattgttgctgtgtggcagtcacaagccattgggacagacagggtgtgtctgtggagtgcttcagcaagcagcacctgaatcttgcctttatgagaacattttgccccttgcagccttgagccttaccctaccttctgggcacaacataagatgttatatctccattcagctgatcatcaagacactgctgctgcatgggtgggctttccatgtgcttggtttgcagtaagaggtcggttttcctggtcattcagttccacagatcgtaataattactatctgtctggtttttttttcccacaagaaatcagtgttgcaaaattgcctataaatggactaataaaatacagtcttttagtctgtcaaaatttgaattgaaataaacatgtataaaataaaaatgtttaagaaaccccaaaataataaatgaacatttaaattatgaaatatttaaaagtcaaatgttatctgcttttataaagtgcaggctcagatgtgcattggtggtttattattgagtgatacgtgtatttttgtgcatatctttccagctgctgaaaatgctttcttaactagttggagtaatggtaaaaagatagataattgcaaatatattcttctaactcctttgtctataggtaattccatttcttttttgataactttgaggttttgttatttgaaattttatttacttgaattttcatatatttaattttttaatcaaagctttaggaacttataatttattgactcaaaaagatattacaaaacatgctaacaaaaaccacagttacccaaaccactaactcattgcctgtcagagagaaccaggtgctttctcttcttttacatccctacctctgtccagtgacaaaaattggccagagaggaagggagccctactgatggtgaaaagtccagcttcctgggttatcacagagggtagagagtgatttcaaagagcaaacagaaaatagccagcctaaatagatttaatttctaagatgtctctttttaactttctgaatatactttaaaaatatatgtatatagtatccaatttgtgtttcttgaatgccgtgtcttcccttaacctttgtgaggattaaaattttgttttctttttgcacagtgttatttcttccaagtaagggtttcacccccttttttcctgtctttcatattagagagttttttccagttgtctgtccatctgagtatgtttaagagtggggcacaaaaagttgataggaagctcttcatgtgtagatggtgcttctgctgtctgattcagtaggtctgtagtgggacccataaatttgcattttaactagttcccaggaatactgataccgttagtccaggaatcatatttttttaagaactgctttattagggaatgcttttgtgattcatatctatggaagggaatggatgggaaggaaacagcttgggcagaggtgaagttgaactgtaatgctgaagagttctgaagatagaatgaccaatcaaagctgtcccaggttgggggaaggggctgggccttaatatccccatgttgattagtgtctagatatgggctgtccctggaaattggtatgaccttgagaagtgatatttccttcagcctaagcaatcatacccaagggtacagacactgaatgctgacagacacccatggctttgtgctgcactgcactgcactcccagcagtggacaaaattctttcctgaaaaggggaaatggagcattgcattatgttgtctgtacatgatccttcccagtgagcagggaagcctcatcctgagacagatactttttctaatttttcctttaccatggattaattttatctactctagaacttcatataagtaaaatcatatagaatgaacttttctaggtgttttatatggctcagtataatatttattagattcatccatgttcctctgtgtatgtatgggttacttttaattgctgagtagtattccattgtgtgactatgccacaaagcgtttatttattcttacattgacatcatttggattgattccagtttggaattataaagatgctatgaacattctttttcttcaacatctgttttgtggacatctagtttgattcctgttggataaatacttatggtaggtttatgtctaaatgctaaactagtccaaggtggttttgcctttcacattcccaccataaatgtatgaaagctatggttgcttcaaagccttgccaat

SEQ ID NO: 13976 - DNA, 2300 bp, Homo sapien
cttctatctcccagcatttcaccatgttggccaggctggtctcaaactcttgacctctggtgatctgcccgcctcagcatcccaaagtgctgggattacaggtgtgagccaccgcgcctggctatccatccttttgattatcgccattctagtgggtgtcaagtggcatttcattttggttttaattttcatttccctgaggacaatactgagcatcttttcatgtgctttttgcctacttgtatatgttctttggagaaatccctatttctttgcccatttttaacttgggttgtcttttttaaaaatttttttaaattgtttttctttttttttttgagacagggtctcactctgtgacccaggctagagtgcagtggtgtgaccatggctctttgcagccttgatctccctggctcaagtgatcctcccacctcagtctcctagtagttgggactacaggcatgtaccactggacccagctaatttttatttatctatttcctttttttttttttgtagagatggagtcttgctgtgttgccttggctggtctggaactcctgggctcaagtgatcctcctgacttagcctccaaagtgctcatattacaggcatgagccactgcacctacctatttttgaattttaatacttctttatatagtccagacacaagttatttatcagatatataatttgcaagaatttcccctcttcctgtggtcttgttactttatttatggtatcttttgaaactaaaggtttttagttttgataatgtctagtttatctatttttttttccttttttttgtttttttcttgagatggaatttcgctcttgttgaccaggttggagcgcaatggtgcaatctcagctcaccgcaacctctgcctcccaggttcaagcgattctcctgcttcagcctccccagtagctgggattacaggcatgagccaccacacccggctaattttttttttttaggagtggcggggtttctccatattggtcaggctggtcttgaactcccaacctcaggtgatccacccgccttggcctcccaaagtgcttggattacaggcatgagcctctgtgcccagcctcttttttcttttctttttttttttttttgctactgcttttggtgtcatatctaagaatccatcaaggattctcagaattgtaattcaaggtcataaagatttacaccaacagtttctttgaagagctttagagttttagctcctaagtttaggtctttgatacattttaatttttgtatatggtgtgaagttaagggtctaattgcatttggatatccagttgtctccccatctgttgaagacaattattttcccattgaatggtcttgcaccctttctaaagatcagatgaccatacatcatatcacggtttatttttggatgtcaattttattccaaaacaattgaaattgttaaccgcttacgtgtttcaggcatgatcctaagcacgaattcatttgcttctcataataactgtgaagtgggcactattctcacttccatttgacaaatgaagtggccgatatacagagtgatttgcccaaggccatataactggtaagtggcagtgccaggataataatttaggttgactaacttgagagcctgagtcttagccatgcatgctgtaaacaaaaattagaaatcaaaacttctgaattccactgaagagctcactttaagcaaacggggtgaaggtcggattagccactaacggtttgaaaagcacaacagggagggattgcctcaccagcttgctttctatagagtagcggcaaaggacctgcctgttttggctgaaactctttcaacccccacaagttgagaatttgcactaactaagtcgaatttgcagttaggaagccttcctgggttcctgggacagcgccgagtgctgcgagcaaaggccgagcccgctgccagaggctcgcgccgctcgcagcacagaacctgagagtgggaaggcgtaggcgcccgggcgggaggcaaccgggatgtggaaactctcgcgggaagatgcgtcgttgcctcggtaaccgcgtcgcagtcgccgaagatggcggggcgaagtctgtgtctcacggtcagttcaactccaggctcctggggagcgtctgggttccggcgactaggacgcctaacttcctttaacttcgggtctgaaagtctgtggctcttttacagagaagcagcgttccagggactccgttcccgccacccgttcagcaaccctctacacctggacccgacc

SEQ ID NO: 13977 - DNA, 2300 bp, Homo sapien
caaccctgaacccatgcctgtctcctgtctcttctatacagtgcccaaccctttgcggagatggatatgccaagaagagaaatttatagcaggctgcctgctttgctccattccagatcaatttacacagaacacccagagggcaggtttacgccttctctccatttctctcaaacagtgatggcaatgagtggagtactagagacaacatagatatgcaaccacgggataaatgaccaaaggacagagagacgagcgacctcagttgtatgatggaaccaagagaagtcgctgatttttagttgttttgatctggttgtaaggatggggtgacaacttccaagcttttacacgtcagcactgaaactgcaagtcccatttgttattaatctttaagcagacatattgctacagaagacggactccaaattagaataacacaaagttataccactaatcaccttatacaaatattttagtgttgacaagatttctctgaatgtatcatttctaaaatcagtatatctaatttctctgatccattatcattcttaaacttcccatttaaaatggactttagtgtctaacctgcctatggaatgaaccagatcaacatcctgccatcatgtaacgtgctctctcttggtacctggaccacatagcagagtaagattcatgtggctcatagattttagtcccaaaatttaccagcagcttctgcggggggggggggggggcgggggggtgaagtgaaggctgctggaagctcgtgctaccctcagtgcctcacaacccagcaaaggggacagcgacctggactcccattgctgaggattaaaccagtcatcgtccctagcagagacctggctgactaggcacttagtgtgcgggatgctccatgcgtggaaatttccttcggctccatgcattaggcagtagtttgcgtatttctctgtgcgcagtctccacagtcccgaacttggctcccaaacccactgaaaccacagttcggccgctggagggaaatcgagcttccctagcccactgcaaagtgcttgggtcaggccacagtctgaacttcccgcttttctagtttagacctatagaagtagccctcctgccctggtcctaagaagctcaatgccgattgtatcttatcgcgtccaatgggaggccacgttctgcgtgggtcacttttggtcgagcggagggcgcgcagctccaccgttgccaagacgccgcgtaaacacccgagcgcgcgcagccaggtgcgctccttggggctgctggctgctgcgtttgcggcgggaggtggtggccgcggtcccacgagagggggtatttttcgtcagccaagatggtgagccagttgggggacttgaaactacttgtttattgttgatttaattctagtttggcgctcatctgcttctaaaaaaggattttaagtgcttaatctggtcattaattggggaacttgtatttgctttcggaggcttcaggtgctattagaagggacgctcgcggtggtttccagcttttttggcacttttcgcatagtgtattaaatacatctttaaatctgcccaatagaacctctgaagaaataagtagatataaaagtgtaggagaaagcgaattgataaatagcggcgaattgacctattacatttatgttaggaaaatctgaccagcttctgaacagcactttatggccctgtggtggtagtcgtggtggtggtggtggtgggtggaatgaggggaggagaaattccctggtggtagtaaagatctgggtctgtagggtgcgattaatcctagcacagctatttattagctgcagaaccttgggtaaagttacttttcatgtttcatctataaaataggtaataataacagtacctatttaatcgatatgtgaacatatttaccacgtttactttttattcggtatactcctttgaatttaggaaggaagccaggctcttcgtatcctttcttactaaggtttatatcaatacattttttaaaattagattttggaatatcaaaatatgcatctttttttttcttccatcgtagggttccaaaaggagaaatttgagctgtagtgaaaggcatcagaaattagtagatgaaaactactgcaaaaaattacatgtccaagctctaaaaaacgtcaacagtcaaatcaggaatcaaatggtgcagaatgaaaatgataaccgtgttcagcgcaagcaatttctcagattattacaaaatgaacaatttgagttggatatggaagaggccattca

SEQ ID NO: 13978 - DNA, 2300 bp, Homo sapien
ttacaggtgcaagccaccactcctggccagatacatgacattatgtatttctcaaaacccacctgggagcagtggctcatgcctatactcccagcactttgggaggccaaggtgggtgtatgacttgaggtcaggagttcaagaccagcctggccaaactggtgaaactccgtctccactaaaaatacaaaaatttgcttgtagtctcagctacttgggaggctgaggcaggagaatcgcttgaacctgggaggtagaggttgcagtgagccgagatcatgtcactgcactacagactgggcaacatagccagacttcatctcagaaaaaaaacaaaacaaatcctcatagacctgtacaaaacaaagagtgaaccctaatgtcaattacgaacttaatcatattaatattggttcgtcaagtgtaacaaatgtactacactaatatgtaatgctaaaaataggggaaattgtatgggtgcggtggggaggagaggtgagacggggaattctctgtattctgtcaatttttctgtaaacctaaaactgcttcgaaaaaggagcaaagtctattaaaaatgtagtaattgttaggataattttttaaaggttaaaatcagctaattgttacaattgattaaatttgtcttggatttaggtcaatattctggccaaaaatctttttctcagattacctatgaaattatatgaatccttctaccatatccaagggtatactggaaatgaggaattataactgaagttccctttagagacgaaagtcttcatttcgagaagtaaacagtaaaaaacatacatgtttgctgaaatactttgcaatgtcactatttcactattaggaattaacaaattaaaccccacactctattgaatgtgttataccctgttcaaccctgaacccatgcctgtctcctgtctcttctatacagtgcccaaccctttgcggagatggatatgccaagaagagaaatttatagcaggctgcctgctttgctccattccagatcaatttacacagaacacccagagggcaggtttacgccttctctccatttctctcaaacagtgatggcaatgagtggagtactagagacaacatagatatgcaaccacgggataaatgaccaaaggacagagagacgagcgacctcagttgtatgatggaaccaagagaagtcgctgatttttagttgttttgatctggttgtaaggatggggtgacaacttccaagcttttacacgtcagcactgaaactgcaagtcccatttgttattaatctttaagcagacatattgctacagaagacggactccaaattagaataacacaaagttataccactaatcaccttatacaaatattttagtgttgacaagatttctctgaatgtatcatttctaaaatcagtatatctaatttctctgatccattatcattcttaaacttcccatttaaaatggactttagtgtctaacctgcctatggaatgaaccagatcaacatcctgccatcatgtaacgtgctctctcttggtacctggaccacatagcagagtaagattcatgtggctcatagattttagtcccaaaatttaccagcagcttctgcggggggggggggggggcgggggggtgaagtgaaggctgctggaagctcgtgctaccctcagtgcctcacaacccagcaaaggggacagcgacctggactcccattgctgaggattaaaccagtcatcgtccctagcagagacctggctgactaggcacttagtgtgcgggatgctccatgcgtggaaatttccttcggctccatgcattaggcagtagtttgcgtatttctctgtgcgcagtctccacagtcccgaacttggctcccaaacccactgaaaccacagttcggccgctggagggaaatcgagcttccctagcccactgcaaagtgcttgggtcaggccacagtctgaacttcccgcttttctagtttagacctatagaagtagccctcctgccctggtcctaagaagctcaatgccgattgtatcttatcgcgtccaatgggaggccacgttctgcgtgggtcacttttggtcgagcggagggcgcgcagctccaccgttgccaagacgccgcgtaaacacccgagcgcgcgcagccaggtgcgctccttggggctgctggctgctgcgtttgcggcgggaggtggtggccgcggtcccacgagagggggtatttttcgtcagccaagatggtgagccagttgggggacttgaaactacttgt

SEQ ID NO: 13979 - DNA, 2300 bp, Homo sapien
atttggaacctctgactccatccgaggtacttgagtatgaagccacagagattcttcagaaaggtagtggtgatccttcagccaagactgatgaagtagtgtctgatcaaacagatgacattcctggaggaaataaccctagcacaacagaggcaacagtagacctggaagacgaaaaagaaagaagttgaaattagtcattttaagtttcagtgtaccaacgataagggcatttggaacagtgctatcaggtgagctcagtggtgctgttgtaggttcagaaatggaaatatgtaagggaggtcacacatacactttacctgtatgttcaacctatgttatcaaacaaatcaattcaccaataatagcatgattagtagggattcccaaaaagtttttaaaaacacgaacaggattttaatgataattaaatttgcagtggaaaggtctcatttaatggttttcaaggaaatgggatttggttgctgacatgaattgatgatattagtaatatttataaagcctttcaaacttccatcaatcctaagctaaaaatctttattacctgtatatccttttcagttaactgagaggaagggatttggaaaccatgtacttttggggagtaattgattaaaaacaatggctgattggcattgttaatgaaggctttatttgtgaggatgatgctggtaaatggagcatgcttagagtactaaattgatctaatgagaatttggatgaacataaacttaattttggatttaatataacattccagtcagacgcatgtaaacagaatatttgaatctttgtacctccatacaagtgttagcctgccaggctgtaagcttaccttaattaaactttcagtgaaagtggaattattaagatataaatttatatttgtgctttttgtcagtgtgtaagctgtgtagaaattctttgatgtattagttgtattaatgtaaagtagaaacccattgttgaaactcctgtagctattatgcttttaatattgttttaatgatcttccttagaaataggcccataaaaatggtctggaagccaaaccaaagtatggtataatgtagatattgtaaagcagtaaactgaaaacatgtcctggcatgtattcagccatgtttaagtgacttttctgtaattgtaaaataaaaacttcaaatgggacctaaaacagtgatgtaaaagaactggttttggaaatttagcctaatttatctataagatggctgctaaattgatttttcagttctttttatcatctagaatataatagatatagaaatgaataatatgaagaacagtagtttgctttgaaatactaataaacttttatttaaaatgcttcatttttacttcttaaaatgtgctttggattcttaaattttgtttcactgaatgttcaatgttttaaatggcgattaaaatactctgctgtatatagtagtttttgagtaaatatttgcaataaaaatctgcccccgaataattctatttttccaatcactgcttgattcagattacctttggtgcctttagaaattatatacttgttcaagaaatttaatatcagtgttagtggtgaggattccattctacattctttaactgctgatacattattttaaattaggacttaaagtacaggggacaatattgctaatatttatgagaatagatttgctttataaattcttttacttcaagagaaatagaatttaatattatacttttctatctgcccaacaatttaaagaggctaaataggcaaaatatattatgaattatttggagtattttggggaggagagctaatatttttatctttcctgctcccaagaaaagatagggagagagggagccattagctctcatccttcaccttgttaaaatgtaattctgtatcatggaagatttttggaataatataaaccttagaagagcagggttaggaaaaacgcctgtctctataaggaccacttgtgagtctcattcagtctgttgccacattatcacattatgacaccataatccctttggagctttgctacatcagcccccatataccttttgagtagtggtattcaaagtagcaggtcaatgaactgtttgtacctatatactatgagaaaaggaacctatactggactgtaagtgcttcattgagaaagtctggcaatgaaaaaaaaaatagctgaattaagaattgtatttggtaccatagctggtttacattctctttcaatctccttatctccaatcaggaacaaccaatc

SEQ ID NO: 13980 - DNA, 2300 bp, Homo sapien
ttttgccactcttttttttccttctaaatatcttgttgtcttggcatcttttcttgctttgtggtcttccaaatagaggcagttgcttcattatgtttttaaaatttgtggctactgttttcatctgcaactgctccacggcagcataattctgatgtttttgttagaattttacatttttctgttatttgccttcttttattacatggtatttttgtttagatgtgagtgcctatagtgtttaacaagttggattttcttgggccagctgttttatacaagttccttttaggaggaagcataggttgccaggatagtctcacagcttgctagctggtttaaacagctttttgctgggcagaaggcttcctgcaattgtgacttgtgtgtctgattctttatgtagcaccgcctttctgcttctctgtactgaatcaggtctggggtacttctgctgccatccttcttgcctcagcttctgcacctgtttttgcaaacagaggatatacccttgtgattcagaatatgtgtttcacctttaagatgtgtatttttactgaccctttaagatctgttaccactgggtcccctttacttctctggtttacttctagctaaatgccatctgcccgatgttggcttctttgaatagtgctttcgtatattatggagtctgtggcttttatctgacccttagtttcaatgataaaccaatttgtggaatttggttgtgtagcttttggatgactctcaggaggaaaagaggaaaatgttgactgatgttggatgttcacatgagaagccctatttaactataaaaataggatctcacctcctttgctctgaaaaacccacctaaatttttagggcactaacaaagcaacagaacatggtctgtgtactgggaggagtaaagataagaatgatagatagatggtgcctgatatttgtcaaactatagtatatggcattaaagtacatatttaatatttgcagaatctttaacccacaaaaataagggataaataaggagttgcagtgaagatctattaataaaactaaaaggtaccagggctgaataaaagatgaccagttgatattgtaccacagctcagctatgcccctccgtagcttgctctatcctcctataaaaccttaaatctaagcttggttctcatctcttaaggtgcttatttgtttttttggataagcaaggatactttgccgttctcaatgactaaatccttcaccctaattcactacaagttgttgtccatttttggttgtcaatggtttattattcagctcttttatagagatatgaaacattgtttaaaaggtactctgtgaacaaagtttatatgtttatttaaaaaatctgatcctatcctacttttctgttaaaaaaatagaaaaacagcaagtaatttatcatctattatgggtatcataatttatagctattttagggtaatctttaatgttcatagactaactttgcaatgttatttgataattttacatttgggacagaagattatccacatttctaattaaggagcctattctatattatataatttttgtatattttaatttttcctcaaccaggctttatgaaattttatatatcacttgataattaaatatatacatcaaggcatataaacatttcctttctatacatcttgacgtggacatgagatgaatgatttttagttaaggaacagattattattaaatatttacatctaaaaaggcaaattgcaagggtaaagctgttagagctatggccatgtcttggttttagggtttctcaaatctttttgaatttttacatgaagataataggtgtttattatttgaatttttagactatgtacatgcaccacaaatttttggtgactatttttctagatatattacaagcatagttttaatggtctggccttaggtgtaaacacacaatcactttttggtatgtggtttttttaaagaataagtaaggcttgttttttttttttttttttctctttcagtattgttgtccagacatgataaataactttttgggactggctaaaacagaattttcaagtacagtaaataaaaacacaactattgattcagagaaaggaaaattgatcatgttagttaatgacttttattatggaaaacatgaaggagatgtccaggaggaacagaagactcacacaacctttaaatgcttcagttgcttgaaaattctaaaaaataacattaggtatgtaaatacttgtttttatttctattgaaaattg

SEQ ID NO: 13981 - DNA, 2300 bp, Homo sapien
aaaatgtatgacagtgcagagaaacaatgtacaaatttcagggagaaagagaaaatagatccttttccatttcatttacttgtttgtttgaagccaggagaatttaccaaagaattttatgtacccagtttaccagcgtgtgtgtgtgtgtgtgtgtgtgtgtgtgtgtgtgtgtgtgtgtgtgtgtttacttaccatggtagtgcttaaaagtgtgattaagagaccaaaattttttgaaagcctagttcttgcttcacttacctctaaacttggattggcacctttattcagttttatcagagagagagtaatttcaccaatcgaattttcaatactgtttcctggggcacattggtcatctctcatggaatgctaagtggagtgccacttggattataaaatgaattaggcatgatggcatcgtcggtgatagtgggacataatattctattggttattgttttatactgaaatattatattgcaaaattcaaactcttattgaaaacatgacagttaagattcaaggtgaatttatactgattgtagatgactcttcatggtattcgggtagaacactgtacattagttttaaaataattccatcaagaaggggattaaccccaacagaatttcttttctacagtgttaaggtgaataatttaaatggttttattgttgttttatttgtaagccataaaatatgttaacatatggaacatgagttaaatgtttatataaaactgcaagaaaggagggcaaaaacttgtgatccatagactacacccactaaatagtactacagcaatagctctttcatggtttgagtaaatatttaatcctgaatttctgaatgaaaacagtttcaagttctttgagtagatctttctctaataagacttctgtagtgtttaattacagagcactgcattgaccttatcagaaaacaaccatatttctgtgtgaaccattattttatagaattacttaatgggatctggtttctttctactgtgaggaagataaaagaaatttttatgagatttggtgggtggtttttttttttttttttgggtgctttttacctttttctaaccagcaattttaggcaaatcctcatgcttccaaactataatttgataagctagaagttacagagtttacatgcatgcaagaatgaggaactttaaattgatcctcaaagtcatggcaggctcagattgacttctggtgtagtggtaaatttgaaacctcttaactaataaaatgctatgatgaactattggttcactttagtctgcaatctctgatagtttttcttttttaactcaaaactaatagtagataatccgatgagattttctgtaatgcaacttcaaggcttttagacgagtgaatgcagtgtagaggttgggcaaggatttgattttgaatcataggaacctgactgtatgtaacagccctgtcatcatgcaaagaaagatatacatttaaattataggttatatataaatatgtttttggaaaatttttatcaagtatgtgatgtttctttgcaagcacaatgttttgactcacctgtagtcagatttgtcatttccttctgaattttggattttgagttacaatgagaaagattgttcttagtctgtaaaacaaaacctagttatcttgtttcttttgtttctttagtaggtaaagatgtatgtgtttaaaatgaactatattcttaaatcagtgattagttatatactccttccataaatctgtttaaatgttttcaattcatgatttctattatcttaatatgtatttcattcaaacaatgtattttaaaataaatataatcttttatagatattttgaacagagttaaccccagctcatattcaaggggactaaagaatggtgcactcagtcgaggtacagtattattatactattttaattttaaagtgaagtattttgacaaaattgattatgtacaaataatttccatatattgtgttactttaaaatacaggtattactgctgcattcaagcctacaagtcaacactacacgaatccaacatcaaatccagtgcctgcctcaccaataaattttcatcctgagtctagatcttcagatagttctgttattgttcagcctttttctaaacctgtaagtgtttctaaaactatacggccagctcagggatccattggatgttgtttatcaatatcaacagtacccagttacaattctggactgtcataagtagtcatccagtagaagcatagttagcatcagaaaatg

SEQ ID NO: 13982 - DNA, 2300 bp, Homo sapien
tgtgtctgttggctgcataaatgtcttcttttgagaagtgtctgttcatatcctttgcccactttttgatgaggttctttgtttttttcttgtaaatttgtttgagttctttgtagattctggatattagccctttgtcagatgagtagattgcaaaaattttctcccaatctgtaggttgcctgttcactctgatggtagtttcttttgctgtgcagaagctctttagtttaattagatcccatttgtcaattttggcttttgttgccgttgcttttggtgttttagacatgaagtccttgcccatgcctaggtcctgaatggtattgcctaggttttcttctagggtttttatggttttaggtctaacatttaagtctttaatccatcttgaattaatttttgtataaggtgtaaggaagggatccagtttcagctttctacatatggctagccagttttcccagcaccatttattaaatagggactgctttccccatttcttgtttttgtcaggtttgtcaaagatcagatggttatagatatgtggtattatttctgagggctctgttctgttccattggcctatatctctgttttggtaccagtaccatgctgttttggttactgtagccttgtagtatagtttgaagtcaggtatctttcatagaattctgtgctttaccaagaaaattctgaagccagtagatacttacctgataacttaaaaacattatgtatgagtccataggatatgtaattgtgaatcttaaaaatattccgtgttcctggtattgataagtccttaatgtgaagcaaggattatcacgtatttatctgaaataagcattatactgttgctagtgggacaagctacagctattcaaaaattgagttaaaagatttttaatagtacaactttagaactaggggatatttagttaagcacaagattcgctagagtctcatgtgatagtaactctgaataactgaattaataacaataacttctgaaattaaagtaataatttttcctttgtagtaattcagtttacatactttagaaattgaaaagtaggaaagcttgcttttgtcagcctaaggataaagaggaaagtgaaggttgaattagttatatattccagtgttttagatttccattgtttaattgttgacgttttttgctttataactcagttttataaaagcttgtttattttgtaaaattcatgctattgcgtgtgcatggaaattcaaaaaacagattcccagtttgaataaagcaattcaaatagtttttaaaaaaatgtttattctaacagcatttttaaagccaaataaattattgacatactagattgtaaacttctgaagtcttaagaatgtgacttactcatttttgttttcccctgagcttagcacattaccttccatacagaaggccatgagtagttattttttgaatgaattaatctatgatgaaatatttccaatgaattttctgttccctttcggttgataaaaagccagaaagatataaactaaaatttgtttaaaattgtgttttcttgcagaaataattacatgtatttctgaaatacaaagaaaagataacgttaaagattaatgtcactcagcgtttgaaaagttagatttccaaaaccagtacattgtaaggtgtttactcgtttttactaaatactttaaaaaattatttgtaatttacaaatcatcacatttcttcgagtattaagtgccaagtataatcaccatttatttattaaatttgggtttattcaggaatgaaccaattatgtaaaatgaactatatgtgtatatcagatatatcaaacataattgacctctgtataggagaaaagattaaatatgtatacatctaatttaatgaagtccaccctaatagttggtatctttattttataggaaggaaaacagaaataacttgctggcttgtctggagtcacatggtgagtttagaggttaaccttacatccaataatttgtgaatcccaagtttcatgtttcaatatttggtgttacttaaagtgactcattaaattgactgatatcatgtgtcagtacttaggtgacaatttacagaaagtcatctctgcagcttgatgggcgacaacccttttcaaccaaaaagtaagtgttgctgccacaactaatactaatatatgtggcttttgtatcactttacctcaggagaaaggatgaaagttgggagacattttttaaaaaacaaaaatgcttaaaattgttaaagtaacaaatgt

SEQ ID NO: 13983 - DNA, 2300 bp, Homo sapien
actgcagtggcaggatcatggctcattgcagccttgaactcctggactgaaggaatcctcttgcctcagcctcctcagtagctgggactacaggtacacaccaccacacctggctgctgttgttcttacaatattaatctggagtaacctggtattaaccaatcagttttctttctattattctgtctcagtgccccaccttacaaggaaagtaactttgaaaagaccaacttgttttttgttgtttcttctttcttcagcccattttctgtctataaagccaaccacatctgctccattcatgggaacacctattctgttttactgaatgaagtggtgcctgaatctagaattgcaataaagccaaccgagatctttaaatttgttgtaatttcacctgacactgtagcatgctttgctaacctttagggacatttgaaaaacgatgtcttaagaatgttccaagattttggaatttttaaactttccatgtttgctgttttgactattttctgtcttttcctgtaaggtttatttttcagggccagcagaaaagggaaagctgggtagatgatcccaggcccatgtgggagaaggataggtcatggttacctccaagtacaccagatctgtaggagtgatccaggtggtctttggggaagattaatttgggggcagtaatcaatatggagactacagtaatgataaacacttgagaaaaactggggaaagccagatgagagagaagaaactgaattcgaataggaagatgaattagcaagattcagtgattgaacagggtgtctgttatggatcctaacaggcaagatttcaagtcttggtcactcacaagctgcaccagtaatgccattgctcttgagaagacaatcagtttaggaaactttccttacagatcagaatacaacctttagcaagtatttacgcaagcagtatcttggcaagtgttcttcttgtaaatttcttatacttctcgttgtcaaactttaaaaaatgctattacaggttaatatgcagatggcagagttaggaattagagtgtgcaagttaatcattctaattgggtcactcttgtcatagccaactaaaagaatggagaagccagtgctgggggaagccctcagggcacataacattgctctaagaatggaattctcagcaagcctggctgctgaaaccgcctgctgtaacctgaaacaggttttatcttcaggttttagcttctcaaagaacctgctgcagctgtagggcaagctttaccaagccccttccctcaccagtcagaactaaccagctacccaaaactttactaaatgtcaacgaactttctagaaaaacaatagataactttttttaaaaaataaaaccccctaactcctctttgttcttctgacatactgaagaccaccctgtatgtgtaaataacctgaacttgcaattcctgtgtcccaaataaaacgctaaatgtacagattcgtctcttcgtatttgacctcgacagggaacgcaagcaaaaccacacatttaaaacagacttggtaaaatcagctcgttatttaaagaaacggacgattcctttttctctcctggtttagtcttcgacccacaggccccttgcttctttcgaacggcggctgtatcccatgaccttttcactttccaagccaacggactgggggtcgttacacacgcggagggcccggaacgcacggctcctcgcctgcaaattccgagcagtccggattttggggctgcctcccggccacaccagccagcagctcgcacccacatggaggcagggccctggccctcgccccggaccggcgcgtggcggggcgcgtgggtcttcgagggcccgcgacgcggcgcacatgccggtgcccgcctcccgcgtcggcgagaagacagggagctcggacacggggaggctgacccggagcctacccatgaggcagcgcgccggctgcacgagagcccccccctttccacggctcggctgccagctccgcaatgggagccgccgccgtcgccgcagtgtagtttttcgtgctcctccttttcctcctcctctttctcctcctcctcagggctccagtcaggccgatccgctccgctcacggtaagcgcccccccgcccccgcccgccctgcgctgcagcaggcagaggccctcccgcgcggcctgcgccgcctcactccgggggcgctggactgggggtcttgaggccggcgcgggtcgtcgggagcgcccagagcgcgggggaggagaccggctgcgcggcg

SEQ ID NO: 13984 - DNA, 2300 bp, Homo sapien
ctttttattttcataggtttttggagaacaggtggtgtctcgttacatgaatacgttctttagtggtgatttctgagattatggagcacccatcacccgagcagtatacactctacccaatgtatagtcttttattcctcactcccctctcacgctctccccggagtccccaaagtccactctatcattactatgtctttgcatccttataacatagctcccacttacgagaacatacaatgtttggttttccattcctgagttacttcacttagaacaatggcctccaattacatccaggttgctgcaactgccattatttcattcctttttatgaggatgccattattttggaccaaactcctgcactaagccccagcagactagactaaaaaccaacatggagttacccatgctcacaaaactgaaactgagttgttatgtggccttctgagaaatcaggagagagataacagcctaatttcccaaacaggccagtttaaaccttcaatccccatgataatgaagttccctgttttaagtcgtttttgtttgtttttgagacaacgtcttgatctgttgctcaggctggactgcagtggcaggatcatggctcattgcagccttgaactcctggactgaaggaatcctcttgcctcagcctcctcagtagctgggactacaggtacacaccaccacacctggctgctgttgttcttacaatattaatctggagtaacctggtattaaccaatcagttttctttctattattctgtctcagtgccccaccttacaaggaaagtaactttgaaaagaccaacttgttttttgttgtttcttctttcttcagcccattttctgtctataaagccaaccacatctgctccattcatgggaacacctattctgttttactgaatgaagtggtgcctgaatctagaattgcaataaagccaaccgagatctttaaatttgttgtaatttcacctgacactgtagcatgctttgctaacctttagggacatttgaaaaacgatgtcttaagaatgttccaagattttggaatttttaaactttccatgtttgctgttttgactattttctgtcttttcctgtaaggtttatttttcagggccagcagaaaagggaaagctgggtagatgatcccaggcccatgtgggagaaggataggtcatggttacctccaagtacaccagatctgtaggagtgatccaggtggtctttggggaagattaatttgggggcagtaatcaatatggagactacagtaatgataaacacttgagaaaaactggggaaagccagatgagagagaagaaactgaattcgaataggaagatgaattagcaagattcagtgattgaacagggtgtctgttatggatcctaacaggcaagatttcaagtcttggtcactcacaagctgcaccagtaatgccattgctcttgagaagacaatcagtttaggaaactttccttacagatcagaatacaacctttagcaagtatttacgcaagcagtatcttggcaagtgttcttcttgtaaatttcttatacttctcgttgtcaaactttaaaaaatgctattacaggttaatatgcagatggcagagttaggaattagagtgtgcaagttaatcattctaattgggtcactcttgtcatagccaactaaaagaatggagaagccagtgctgggggaagccctcagggcacataacattgctctaagaatggaattctcagcaagcctggctgctgaaaccgcctgctgtaacctgaaacaggttttatcttcaggttttagcttctcaaagaacctgctgcagctgtagggcaagctttaccaagccccttccctcaccagtcagaactaaccagctacccaaaactttactaaatgtcaacgaactttctagaaaaacaatagataactttttttaaaaaataaaaccccctaactcctctttgttcttctgacatactgaagaccaccctgtatgtgtaaataacctgaacttgcaattcctgtgtcccaaataaaacgctaaatgtacagattcgtctcttcgtatttgacctcgacagggaacgcaagcaaaaccacacatttaaaacagacttggtaaaatcagctcgttatttaaagaaacggacgattcctttttctctcctggtttagtcttcgacccacaggccccttgcttctttcgaacggcggctgtatcccatgaccttttcactttccaagccaacggactgggggtcgttacacac

SEQ ID NO: 13985 - DNA, 2300 bp, Homo sapien
caggtaatgggaacactcaaaaaaggtagatgaatatcacctacctttaaatactgaagcatcaatagtatttattctggaggcatagttctaaaagctgcctatttctctgcttttttgactaaatttttctttttcaatttaatggccgttactttgaggctatctgaaataataggtgctatctgaaacatatgtaatctgatcttttcctaagtgaaagtcactttgtactggtgcttccttgctcaaagcctttgaaagtcacatctctgtttggaatgtagaagaagtagtgttttccaaccctgcaaagtcccccagtggtggactctctctattacctttcatttctgtttgtaatgttagggctcagagaacgatacctcaaagtatggggctttggggtgtgctgagcacttctgaattaaagaaacttggaaacgcttagaagttgcctcagaataaaggactttctaaacttcttctgtcctcgcaacccccaaacacagggagaggctctccctggaagttcccttatctttcagaagaaaacttttttcaaaagaaattgcatttccaaagaaatgcaattgttctaaagcctcctccctaggaatctcatcaaataaccagtgaagattaaccataaggagaagagaaaagactaaaagtcatcatcatgcccagacagactgttcctctattcttctcagggcaactgagattacctgggagactttatctgcataagaagaccgtctttgttcatttccgttgctcaggctggaatgtagtggcaggatcatggctcactgcagccttgaactcctggactgaaggaatactcccgcctcagcctcctcagtagctgggactacaggtacataccaccacacctggctgctgctcttcttacaatagtaacctgaagtaacctgatattaaccaatcagttttctttctattattctgtctcagtgccccaccttacaaggaaagtaactttgaaatgaccaacttgttttttgttgtttcttctttcttcagtcctttatctgtctataaagtgaaccacatctgttccattcatgggaacacctattctattggtgttctattgcccctcaccttccttcaacttgttgccacctccctcagagctcagaaaactttgtcccagaccattgtctgttctttgagctcattcacgtcttctgaaaatcatttgctacccctcaaaattgcttatgtcttctattttcttctctgctatgaagagggtatttgagtgtcaactgtctggcccttctttgagtcttatgttttgtatgactcctgtgcacagtaccatgtgaatacctttgtatgccttttctcctgttattctctctgttgttggtaatttcagcagactcaaaccttcagatgtgaaaaatttccttcgcccccaacaataaactggttaattctgttctatgctaatctccttctgataacatcttgctaaaaatatcaaaaatcaccaacctctaccattaatattgctttctgaactcttcccttagctctacaagttatgtagatactaatctgccttgtgagatattgtaagcaagagtttagccactgcctaaagtgaaccttcagctgtccaccctcctacatctatttcctcgattcccacctgattgctgtgctaagctaatgacacacattttagtttttatcattgtaggccatcactattattaatcagagttagtgatttgagctattgcaacaaaccaccctcaaatctcagggtcttaacccaataaaggtttattttttgctccaatcagtccagtgaggatcagtgtgttgatgcaatttttaagaaacccagagtccttctatataatgttgctgccatcccccagcttctcagagttttctgtatctagctgactggtgtgtgaaaaacaaataggaactataaattactggaagttttaaggtcaggcttgcatgggagggtcactgcttctgtttacattccactgtccagaattagttacacagcccaatataaaaggtaaggaagctgggaaacataggtttcctgggtgcaaagaggaaaataagatggtgaatatgtatcattatctctgtcacacttaacgatgatttcagttgcaggtaagagaaaattcaactcaaattggccttgtgggggaggaaaaacttttcttctactttttgaggttctataattgggggcctgtgaataaactgacaaaggacaagagaagacagat

SEQ ID NO: 13986 - DNA, 2300 bp, Homo sapien
gggcatggtggcgcgcacctgtaatccctgctatttgggaggctgaggcaggagaatcgcttgaacctgggaggcggaggttgcagtgagccgagatcctgccaccacactccagcctggtgacagagccagactacatctcaaaaaaaaaaaaaaaaaaagtcaccaaagatcagatctctatgcatgtttgttttcttgatgtcttctttattttaacccggctagacttgtatttggaagatggctacccaccatccaggggacccgtttttttgaggacatgcagaaagaatgggttacctctgaagcgctctcagaaaatgaaagaaaaacttttcccaacaaagaccaggaaattgctcctctcattggcccaaatatgttacgctcattgccagccaataactgtggcagggaatgggattctgctgatttaggttggaattatgctacgttgcttagattgggaccacatgcccctgtaagtaggcagagcagggatgtgactcagaactgggcttgtttaccaagataaggaagagtggatactggggagtctaggccaccataagtttcaggtacagccaatgcaaagccttggaaatccacctgacagctccggttgtaccgtccgccctccgtatctggggtttccaaattccgggattcaatcaactgaaaacaaaaaatgtagttaggcttaccaggcctgaaaatacatgaaaatatagagcctaaaatatagcctgaaaatgtactgaaaatatagagatttctttggatgattatttcctaaatacaccttaacaactattcacatagcatttgcattgtattaggttttataagtaatctagatatgatttaaagtatatggggaaacacaccatttttatgtaagagacttgaacatcttagaaaatccagagtctgggaaccaatcccacggatatagagacaactgtactaactacagtaatggcatatggtagctgaatctacctctctttccatcccagtccggaatccaaaggctccttcttgccatgttgtcctcgggcgttggctgcttcctcccatttgttactttggaagtgtcttctttcctcagtgtttcttctgcgtgggccttaccggtctttactgcactcacttacctaagaggcaaaacaatggctgccattcaagaaaatctcacttcagcccagaatcgaagaactggggcttattttgtcttctttctactctggggcttctctgaggccaagttcagaacttgtgcacaagacagtggctgtgtgacagagccacccagggctgtctccgttagatgaagagactggcttgatccattcccaagaactagtcccacgtgcagttcggttgctccgaatgggatttgggtgcgaggggctgactggagatgtggggtctgggtgagtggggtatttgagaacctgaagctcacaaggctttgtctggtttgaggtacgttttgccctttctcccgcattcggctctgcatcgaatctgaccggccgcgcctactctcggaacggccgaggaggatgggtctcccgtctccacacgcgcggtgtctgcgccgactgcagccctcctggacgggagcctctgggcccagcttagggtggcgtccagcgtgacctactcgggaatggcagccttcagtgtcctgcggcctcgggttccgggaagctcggggacctgggcagcggatccagatgcttccacagctgtgtctccgtcgctccgcttcgggggccgagaaccagcaagaccaacgcgaggaggcgccacggtacctgccaccccgctcccaggaggcccggacgaggcttcgtcggcgagcggtcggggcctgcttctcgaggtgcctgcgagcgcctcatgcccctccccaccggccccaactccgtcccgcctcacccgaccgcgggctttgtccacccgccgcggtgcggctcctcccagtccccgacagctcctccccgccccctctgccggccccacttcctaggcggcggagcgggtcggggagggaagggttaacccgcggctcttcccggcgcggagggatccggaggcgagccgagcgcggtggtgaggccgcctcagcgaaaaaaatgtccgcctgaagagacccacaagttctattcggggggaccgacagcccgccccgggaggaaggggcggccaggcccgaaagccgcctccccctcccagacccgagagctcgtgcggggcaaagtgaaccgagccgctgggcggtgcaaggg

SEQ ID NO: 13987 - DNA, 2300 bp, Homo sapien
cgcgagcaaggggcgggagggctcagtgcccgcgccgggtcccggaatccacgcgttcctcgccgcggcccgagatcgacgcggcggctcccgcaactcgccgcctctcccccaagtttccgagccagtctctgccacctcctcggcgccccctgctccgcgccgccgccgggtgctccgcgcgccgggcccggccgcggctggggtctcgaggagcggggtgaggggcaattcggcgtccagcgagcggagcggcggcgagcggagatgcgaagtgactcactcgctcggcaacaatagaactgacaagttgcagggaacgcgccgctcgcaggcccgcgtctgcggccgccgccgcccggacgtccccggcgggcccaggaggtcggaaagcacccccagctcatccaaggggcgtttttaaacagaaaacagaaaccccgacaactagtctcgctctcggccggcgtcctcctccccaggctcggcctcctcccacttttgctgccctgccccggacctgccgaacaatgagcctggctccgcggccgaagccgcccgatctcccgcgcgccccggagcctgggcgccggcccgagtcgggcaccgaacggggcgcacaggccgagcgcgccgccagcgggcctgagcgcccgcgactcgagcctccgcccccactccgctccccaacttggaggggaccccgggtttcgcgctgtacaaaggggcgcggagttgaggcgggggacgggggcgcccccactccggcagggacgcggcggcgccccgcagcccccagccccgccgcgccgccccactcccgctcgctagcccgcaattacctgccgccccgtctccgcatccaaccaccccgattaaagttcactttggccgggagaacgggcttgggcttccccttgcaccgcccagcggctcggttcactttgccccgcacgagctctcgggtctgggagggggaggcggctttcgggcctggccgccccttcctcccggggcgggctgtcggtccccccgaatagaacttgtgggtctcttcaggcggacatttttttcgctgaggcggcctcaccaccgcgctcggctcgcctccggatccctccgcgccgggaagagccgcgggttaacccttccctccccgacccgctccgccgcctaggaagtggggccggcagagggggcggggaggagctgtcggggactgggaggagccgcaccgcggcgggtggacaaagcccgcggtcgggtgaggcgggacggagttggggccggtggggaggggcatgaggcgctcgcaggcacctcgagaagcaggccccgaccgctcgccgacgaagcctcgtccgggcctcctgggagcggggtggcaggtaccgtggcgcctcctcgcgttggtcttgctggttctcggcccccgaagcggagcgacggagacacagctgtggaagcatctggatccgctgcccaggtccccgagcttcccggaacccgaggccgcaggacactgaaggctgccattcccgagtaggtcacgctggacgccaccctaagctgggcccagaggctcccgtccaggagggctgcagtcggcgcagacaccgcgcgtgtggagacgggagacccatcctcctcggccgttccgagagtaggcgcggccggtcagattcgatgcagagccgaatgcgggagaaagggcaaaacgtacctcaaaccagacaaagccttgtgagcttcaggttctcaaataccccactcacccagaccccacatctccagtcagcccctcgcacccaaatcccattcggagcaaccgaactgcacgtgggactagttcttgggaatggatcaagccagtctcttcatctaacggagacagccctgggtggctctgtcacacagccactgtcttgtgcacaagttctgaacttggcctcagagaagccccagagtagaaagaagacaaaataagccccagttcttcgattctgggctgaagtgagattttcttgaatggcagccattgttttgcctcttaggtaagtgagtgcagtaaagaccggtaaggcccacgcagaagaaacactgaggaaagaagacacttccaaagtaacaaatgggaggaagcagccaacgcccgaggacaacatggcaagaaggagcctttggattccggactgggatggaaagagaggtagattcagctaccatatgccattactgtagttagtacagttgtctctatatccgtgggattggttcccagactctggattttctaagat

SEQ ID NO: 13988 - DNA, 2300 bp, Homo sapien
taaaggaattaaacccattaaaaataaaagcagtgggcccttaggtttcagttgatgtttttaagtcatttcccatgttaagaacataatacacacacacacacacacacacgtgtgtgtgtgtataaaataaaagtactctgtttcagaaggctcgaaattctagctctggactacttttcttgtcgctgacatctttcaggtaccataaactacatctgatactggagaggaaaatggtgaggagtactgaagaaaaaaacaacactttttcatataaagtacaagatccccaataatcatcgcggtgggagggtgactcaaccaaaggtcataattacattgttctccttttaactggttaaatcaaatgacccctctggcattaaagttttaaatgtgcaagtctagacattacatcaaagttcaggtgtccaacttgggggagctggactccagccctgagaactactgcttaagcagaaagcagatggagttcacgctgcctagtctccacgttgcttcccctcaccctttatttaaaagaaacaaacaaacaaacaaacaaaaacctcagcagaaccccaagatgccatggaaagctctcataccgcactgaagtccagtaggtcgctcagctccttgtcggtccctatagcggccatgcgttgttgctggggattcatcttcggccacttctagcaggtcctagggcagaggaaacgggctcagcgagagaccaccgaggcccaaagtgtgtgagggaacagagagaggtactggggaagattacgcaagagcgctgggggcgccgggatgacttccaggaccccgactcgctcccaccgcggcgcgagcaaggggcgggagggctcagtgcccgcgccgggtcccggaatccacgcgttcctcgccgcggcccgagatcgacgcggcggctcccgcaactcgccgcctctcccccaagtttccgagccagtctctgccacctcctcggcgccccctgctccgcgccgccgccgggtgctccgcgcgccgggcccggccgcggctggggtctcgaggagcggggtgaggggcaattcggcgtccagcgagcggagcggcggcgagcggagatgcgaagtgactcactcgctcggcaacaatagaactgacaagttgcagggaacgcgccgctcgcaggcccgcgtctgcggccgccgccgcccggacgtccccggcgggcccaggaggtcggaaagcacccccagctcatccaaggggcgtttttaaacagaaaacagaaaccccgacaactagtctcgctctcggccggcgtcctcctccccaggctcggcctcctcccacttttgctgccctgccccggacctgccgaacaatgagcctggctccgcggccgaagccgcccgatctcccgcgcgccccggagcctgggcgccggcccgagtcgggcaccgaacggggcgcacaggccgagcgcgccgccagcgggcctgagcgcccgcgactcgagcctccgcccccactccgctccccaacttggaggggaccccgggtttcgcgctgtacaaaggggcgcggagttgaggcgggggacgggggcgcccccactccggcagggacgcggcggcgccccgcagcccccagccccgccgcgccgccccactcccgctcgctagcccgcaattacctgccgccccgtctccgcatccaaccaccccgattaaagttcactttggccgggagaacgggcttgggcttccccttgcaccgcccagcggctcggttcactttgccccgcacgagctctcgggtctgggagggggaggcggctttcgggcctggccgccccttcctcccggggcgggctgtcggtccccccgaatagaacttgtgggtctcttcaggcggacatttttttcgctgaggcggcctcaccaccgcgctcggctcgcctccggatccctccgcgccgggaagagccgcgggttaacccttccctccccgacccgctccgccgcctaggaagtggggccggcagagggggcggggaggagctgtcggggactgggaggagccgcaccgcggcgggtggacaaagcccgcggtcgggtgaggcgggacggagttggggccggtggggaggggcatgaggcgctcgcaggcacctcgagaagcaggccccgaccgctcgccgacgaagcctcgtccgggcctcctgggagcggggtggcaggtaccgtggcgcctcctcgcgttggtcttgctggttctcggcccccgaagcggagcgacgg

SEQ ID NO: 13989 - DNA, 2300 bp, Homo sapien
taggtattaataggtatattgttaagaagtgattaggctgtgagggcttcatcctcatgaattgattaaagtcataatctcaggagtgcatttgttacctcaagaatgagttataaaagtgggtttggccctctctgtctctttcttgcatggtggttctcttttccctctgccttttgccgtagtatgatatagctacagcatgaaggccctcaccagatgctagcaccttaatgttggacttccaccctttgggactgtgataagacatttcttttctttataaatttctcagtctcacgtactctgttgtagcagcataaaacagactaaggcaaggtttctctgtgtatgggtgtttgagatgtatgtttatagttgttcatcaaatttgaaaacatttcggctgctctatctttaaatattttttggtccactctcttacctttccttctaggacttcaattacacatatattagcactcttgatactgttccacgggttctcttaattttttaaaatattttccttctctttacaagtcagttttaatagtttctcttactgtgtcttcaggctaccgatcttttcttctgcagtgtctaacctgtttattccatccaataaacttttcatttcacagagtgtatttttttatttctagaaactcttttgtttttagattgtcttgcatttctttcctcaagatattcctgtttttcttttaagtcattgagcaatttataatagttgttttcaagtttttgctggtatcacctttttattctgggcctatttctactgacagatttttcttctggttatgggtcacatttttctgctgctgcacatgccttgtagattttgatttagttctagacatagtgagtgttacattattgagtgtttggattttgtcattttttgttttttagagatgtaaggctttttttctggcaggaaattaagttattagggatcaactcagacactccaagagttgtttttaagcttttgtgagtgagtctaaagtaccttttttttttttttttttttgagacagagtcttgctctgttgcccatgctggagtgtaccatgatctcagctcactgcaacctctctctcctgagttcaagctattctcctgcttcagcctcccaagttgctaggattacaggcgtatgccaccacatccagctaatttttgtacttttagtagagacagggtttcaccatgttggctaggctggtcttgaactcctgacctcaagtgatctgccttcctcggcttcgcaaattgctaggattacaggcatgcaccactgtgtcctgccttagagaaacttttttgctaagaatagtttagctctattgctaagcattctgaggtctttactgaatgctttgggcattcaacgtttaggctgtattcagactgcttccagctgaaaacatctcccaatcctgtttgagctctgggaattgttgaatttacaactctggttgtttttcgcctgccattgtggagttttactgtgtgtgtgtgtgatttgctcttagtaatatagcgggactccaaggtgactccatgcacgtttctggagatccttctctgcgtagcttcctcctctagacctctgctgtgcaaattccagctgccttttcctcccagaactctaatttctgtcccctccattcagtatgactgctctgctcaaaaatcccttttcttctgcacagtaatctacaaattgtttccagataggaaatcaggatgatggtagagttcacctagtttcttttttctcagggatcacagtcttgtattatttgttttccagtgttgggaagcagtcttttgatgtgtgttttctaattttttaattgtttgcagtagaaggtttatctagtcccaattactgcatcatggctcaaatcagaaattctctttccttttaggaaggtaaatatggttaacagaaaatgtgtagtggaagagtagaggcagggtgcttgaaggagggcagtattaatgaagccatgacagccacatatatctggtcaggtattacaatgcaatgtaagtgatgcccctgggggtcactgtatttgggtgcacagcctaaatggtggccttgcatggagcagagctgggtgagaatacaagtgagagcctgcagatgtaattgacaggaacttatcttaatttagttggctctaaggcagagtatatcatctgagatgatgtcagggtttttattttgtgtgacttatttatcacttttgtaagggttatta

SEQ ID NO: 13990 - DNA, 2300 bp, Homo sapien
ttcagattatcatataattgcctctaaaataaagaactggtgttaaaatattaaaattttcattgtgctttaataaccaaggttgcttagttgggtttacattatgatgtttgttttatcaaacaacatagtaagtaccctctctgttttctgcccggcatcagggaaatgggcttaactgtcataggtggatgttttttaaccaatataagaaagttttctcagattgaagcgatgattataaaaatgttgaagtattgtcagtgctttgtggctcccctcttctccctattcctcctcaatttctattgaaaagtaagtgttatttttaataattaatagaaaaagaaaattttgattcgattttgtttgattttcctttttttttgttttgagagtagccgatctgtcagtagagaaagactgtgtatggaagactaaaatttacttgaatggttttaaggcatgctattgttaattgtgaatcaaagctttttacacagttctccaaggattgaaatgggtctttgtggtctctcaggagggaggaagttacaaaccactccgcagactggcattttaatagtctgctgtacagcgatgttcttttgcagctgctgcttagccttttctatatctggagagtgtggggaggttttattgttgttccaatactatcagcttttaaaacattgtgaagttagttgcccttattgtctgatttagtttcgttactataatttgatcaatatgttagtaaaaatgaggttggggggatagggggtcccttatagtatattcctagaatatttcacagaggatttctgcttcatgaaaggtacctttaaaaaaagtgatgtgcccccttttgcagcttgtgagctctcctctgattaatacaatcccgttagaacctacaaggcatagagggaaggatagtacaaagaagttttgatgaagggaaatgacacaaaaagggaaagttgctattctgtttttccaggttgtaattacagcaaacgattgattggaaaacatttaaatagcaaaacgtgtctgtgtaagagacacatgtttttgtagacaacttttaaaaccttttgacttcgaagtatgagttagaaatgtctgtaagacatttattcccacacttcttatttttcctttctgagaaatgtgagcattagcataaaaatatgaatatacaaagtattaagaacaataataaacttagaggaaagacttataggaaactgtttagtttattctctcatactttatatgaaagatgtgtgaattttttttaagaacagtcctattgcaggacattataaacttttgattggtgttgtgtatgaagaattcaaggagctttataactgaaaatctgtattattaagtgtttccattttaaaaacaggtaatttagtttcaagataatctatctgatttttggactaagctttttaataaaatgtgttcctttcagttttcctcaacataatttttgtagcttaaagtatggtttgttctagctagttaagaggtatttgcatgatggtctgctttctccaggaagtgattttgtacaagatttaactgtctagatccttcttgttacacatgattcagtgtttccaattcctgattacttgatcatgtgtttatcaaagttgaagcaactttagaccatggcagatggtaacgctggaggtgtagcaagctaggtttctctgccacaagtgctctaatttaattaaaactaaaaacagattagcagaaaatctgtcagtatgccttccttttgtgtgtgtatatatgtatatatgagacaaatctaataatttcttgggttatttttattcagggcatatttatttagcgcttaaaagtgacttgcatttttttaatacctcaaattttgtcttattggtatcctccaccaatgcaaggacttgatggaaattgaaagaggttacttacagcataaaccctccctctgtgctctgtgagttggttcagtcctattttgcataagttccttttgagtagatccatgtgtgaatgcatagtactgaagacttactccctttgcctgtgtggatatatgtcttggagagaggctgtgtgcattagctacaaatagtaacattttcaaaatcaacatgtattgtgcttatcctgtccctggaatgggcagcaattctttgatgtattactacaatgggaaaacggtaagcctttttctttgtatagcttctaactcacttgtttaaaggaaagcagtatacattactcgc

SEQ ID NO: 13991 - DNA, 2300 bp, Homo sapien
aatccctgctgtctgcagtaggccaatcaagtgtccaagaattgtgagaatgtgcttccccatcaccaccaccagcccacacccacaccaaaatgtgtcacccttcaatcccttcaagtctgtctgctcagcatcctgatccaaacaagccactttaaaaagtgcagttatgaaacaattcgaacactgactggactactgtttatatttttagatgtgatactgtggttatgtttctctaaaagtccttgtctgttagagatacacactgaagtgtttacagagagaatgatacaatcgctgtctggaatccgcttcaataccatccattgttggagggtgggtagtggggttagggggttttgaggaaacaagattggcccggtctatcagcattgatgctgggtgagataggtaaatgggggttcattatacactttacttttgaaaatgaagtttttcgtaataaaaagttgaaagaaagaaggaagggagatgggaaggcagggaaaggagaaagggaaggagagaaggaaaagattctgctcaaatgtccctttggaaaccttccttgacccccgcgttggtgtggggccgggggaatggggaggctgttttctgctcagccagagcaacaaggcccatgaggagacaggagggatgtctggggagcagtcccaagccacagagtccttctggggaccagccacaccatgaagagagagcagaacagggagcatagcacagacctatgacatagcactgtgccatgacatcagctggcaaaggcccatgggaccaggagggaggcattagaagggcgaacactagcagctgttgagtaggaagaaatgtgagccgacttctctacctaaggaagcggtggcaaggccgtggaggttcgggatggggacgggttccaggattagagtgcttttttttttctttctttcttttgaaggaggagaggctatgggagcctcaggtaccgagcatctggtgtctggagagatgcagctactcaaggcagtttctgatctggaaccaggaagtctctgtttccccaccagccagcaaacgttctggacttggtgctgggcctgccaccaccaaaggtggagatgccccacatacctgcgtcaggcatgacaggtcacccctgagtccttgggtctccccaaggcttctccagggcttcccaacagggctgagattcaagaaaacgctcaaggtccaccccactgctccgaccctctcaccagaagaaaagggctgtgtcccaagggcagcctgcttgggaaaagaatatgtggggtgacttgtccagatctgcccagggaggctgggaatggagagagaaaggaatctgcccaccagttgggggaaaagtggatttcgcaacaaccttgatgatattaaatgcttggggggcctgggaagaccaaatgtttaatatttggagaagaggctgtctaaacagagtaattaggaggctcctttgtagtgatatgaaagagatgaattgggtatatttgacatcaaagacaggagatccagtggggaatgagacccacggccgggcgtgggcagcgctggaggacaggctctcccagtgtgctgcgggggagggcagcccctgcagtgtgcgtgttgagtgctgggaaacccccaagtaacacttcccccctcatttaacacacttcctaaaacctctcctccccaaaagccactttgcaaaagcagcgattaccaccaaccacgagaaacacaggagcctgccttccactgtttaccactgggcaggaagtcgtttatggaccagtctcttgcccaggctaaactcagaagtggacactgagggccggttgtgggtgccaccaggcaagctagggcatcggagttcagcagagctgggtgggaattctgcttctccctccactacctgggtaaccctgggcaagtcacttagcctctccgagcataaactggtttgcttgtaatatgcaaataataaggggtgggggaaatttttttttttttttttgagacagagtctcgctctgtcacccaggctggagtgcagtggcgtgatctcggctcattgcaacctccgcctcctgggttcaagcaattctcctgcctcagcctcctgagtagctgggattacaggcgcccgccaccactcccagctaatttttgtatttttagtagggacgaggtttcaccatgttggtcaggctggtctcaaactcctgacctcgtgatctgccctccttggccttccaaagtgctgggattac

SEQ ID NO: 13992 - DNA, 2300 bp, Homo sapien
tggcaccccctgcttcttctccctcatccctaaaacatgtggggtactgggtgccaaaggagatctgaagatggccaccactcagaccagcagtagaggccaagaaggtggtgagaaattttaaggtattgtagcatatgctctccagggtgaggacacaggatgctgggacctaaggagggagaagttaacccagagagggcccaagtcagggaggacctgactgtggtgacagagccagtcatgctaataataggagcagtggttttgcaatcacaaatattggtctgggggactgcgggcccaatgtggtgggagttttagagcagggacccctccactgtacgtggattcttatacttgctaagttgcactgaattctcaatcaacccatttggaggctctcaccaagacaggagtccctttgaattggtaggatgttaaaagcttcctccagccattgaccctgggtcccattggtagaaatcagataataaatcagattttccaggtaatcctcagtttaatgtccattccctcattcaatcaattattcaattacaaatcatttttaatatgattttatggttcaggaattcaggcagggctcagatgggcagttcttctgccccacatggcattggctgataacaggctaccccaaggaaatcacagtgtaatgggagatgggaaataggttaacacaaagttactatactacaagaaaaatcttcaaatcttcaatcttcattcttcatgggtgtgagtcttctctggtggagaagagagttctttgctaaattatattcctgtgttagccagccaagcacacacggagtacagctgtcccttgctattcatggcagattgatcccagacactgccacccccagccctgtgaacaccaaaacccatggatgctcaagtccttgatataaaatggtatggtatttgcacataacctacacacatcttcccatatactttaaatcatcactagattacttataatacctaatgcaatgtaaatgctatgtaagtagttgctacgctgtattgcttagggaataatgacaagaaaaaaaggctgtacaacttcagtacaaatgctatcattcatttttttatctgaatattatgatccatgaatacagagggctggctgtaaaaagaatgtacagtttggtactttactcctagtttaagtcatctctttcggcccatacaggttgcctggggcagggcggtggtgagtgtgttgagtcggccctataccctgttccacaatgcctggtgtccttggcacgtagcttgcagggctgcttccatggatggctgcctcatcccccacccctccttcatggcaccctcttttctccaactccttttcctctgctgagtcctaccttttcttgccagaccagggatttgccaattattctggatgggcacagggaaggggccctcagatcctgcagagggagcatctgaaagacaatgagaccctgtacacaaccaagctgagcctcctgtaagcacatcctctgggtgtcactatgcgaaaagactctttgtctgtttacattgcacaacgaattgtccctctgattgtcctagcgttggtgcatgcatggatccaggaagagcaggtatttggacccaacgagacaggttcatcttggcagtttgtctcctgtggttgctttgtgcctgccccgtatctatccacccaacttctggcagcaatccctccaggacccacctctgtcttcatggtttgtgtgttctgatcctgctccttggccccagaatacaccctccacatctaagctatgcagtgcctcatccccacagctgcagcgattggtttaggaatgggaaaataatccaatcaaagtaagattgtctaatatctgatcccgcttaccccggagccagaagtcccacctttccaggctcctccatgttcctttctggagcaatgaggaggaaggttcattcccttctcagggaacttgctgcggtgtcccagtcctgactgtcccctctctacccctgcctgtggctctcccgtctcctggcattctaacctgccactgaattcttcccacgccaaacgcaggttaggaacctaagctcggatgaaatgctggcttagacctcattgctactgagaagcagaaaccacactttttagttggtagaggtggatgtggattggggccataaagtttcctcaatcattgaataaggatttcattatttggactaactaaatacattagattatttatactaac

SEQ ID NO: 13993 - DNA, 2300 bp, Homo sapien
ccatgaatacagagggctggctgtaaaaagaatgtacagtttggtactttactcctagtttaagtcatctctttcggcccatacaggttgcctggggcagggcggtggtgagtgtgttgagtcggccctataccctgttccacaatgcctggtgtccttggcacgtagcttgcagggctgcttccatggatggctgcctcatcccccacccctccttcatggcaccctcttttctccaactccttttcctctgctgagtcctaccttttcttgccagaccagggatttgccaattattctggatgggcacagggaaggggccctcagatcctgcagagggagcatctgaaagacaatgagaccctgtacacaaccaagctgagcctcctgtaagcacatcctctgggtgtcactatgcgaaaagactctttgtctgtttacattgcacaacgaattgtccctctgattgtcctagcgttggtgcatgcatggatccaggaagagcaggtatttggacccaacgagacaggttcatcttggcagtttgtctcctgtggttgctttgtgcctgccccgtatctatccacccaacttctggcagcaatccctccaggacccacctctgtcttcatggtttgtgtgttctgatcctgctccttggccccagaatacaccctccacatctaagctatgcagtgcctcatccccacagctgcagcgattggtttaggaatgggaaaataatccaatcaaagtaagattgtctaatatctgatcccgcttaccccggagccagaagtcccacctttccaggctcctccatgttcctttctggagcaatgaggaggaaggttcattcccttctcagggaacttgctgcggtgtcccagtcctgactgtcccctctctacccctgcctgtggctctcccgtctcctggcattctaacctgccactgaattcttcccacgccaaacgcaggttaggaacctaagctcggatgaaatgctggcttagacctcattgctactgagaagcagaaaccacactttttagttggtagaggtggatgtggattggggccataaagtttcctcaatcattgaataaggatttcattatttggactaactaaatacattagattatttatactaactaaataaattagatttatttttcgaagtttaaaatcattttcaatagtgacgaaaaaggctgtagatgagatgggagaatctttcgacgccaaattcttcccatctcctgcctagtatgtatcactacaccttgcccagagagactgtaggggtgctcagcaaaaaccatggctggttgattccctggaaaaaggggtgctgtcccagggagctctgtgcccttcctgccaacactggggtctagaggaggcaagttcccctctgaaggtgagtatgattcactcattaaaactaagaaatttacattggtatgttactgttaactaacctacagactttttttagatttcaccgttctttacactctcgtcctttccaatttccgggatccaatgcaggataccaggttgcatttttggatgtgtccagtctgtgatcatttctcaatctttcctcattttctcatgacttttgacatttatttatttatttattgtgtgagactgagtctcactctgttgcctaggctggagtgcagtggccccatcctggctcactacaatctccacctcccgggttcaaatgattctcctgcctcagcctcccaagcagctgggattacaggcgcacaccaccacgcctggctaatttgtatttttagtagagatggggtttcaccatgttagccaggctggtctcaaactcctgacttcaggtgatctgcctgcctcggcctcccaaagtgctaggattacaggcgcaggccaccacgcccagcctgacttctgacattagagtacagggagggattctgtagaatgtccctcaatttgggtgtgtctggtgttttgccatgagactggggttatgcttctgggtgccacacagaggtgaaatgtccttctcatcacattattcgagaggtacatggtaccaatgggacttatcgctgctgatgttaaccttgatctcttggttcaggtggtgcctgccagctgtctccactgtggagttactatttttccttttccccattttattcatcagaagccagtcactaagcgaggtcaaactccaggacaggggaattaagtgccaccttctggagagggagcattcacatttattacttgggatcctt

SEQ ID NO: 13994 - DNA, 2300 bp, Homo sapien
tgttgcccaggctggagtccactggggcagtcacagctcactgcaacctcaacctcccaggatcagttgatcctcccacctcagcctcctgagtagctggaactacaggcacatgctaccatgcctggctaatttgtgtgtgtgtgtgtgtgtgtgtgtgtgtgtgtgtgtgtgtgtgtgtgtgtgtatgcgctttttttctttttctttttcttttttttttggtagagacagttttcgccatgttgcccaggctggtcttgaattcctgtgctcaggtgatccactgccttggcctcccaaagtgttgggattacaggcataagccactgcacccagttggaaaattctttcctgtccctccctgctgcaactccccatctaccccatgactctgctggttcctaggccatgggtctcccccatctggttcccagggccatttaggtgccctctattgcatgcaggttccattctagtcattttgaggtgtccaagtactgtttggttgccttgagccccctcactttggcatttgatgccttttccaccctctgaccccatccacctttctagtatgcctcatcccattttctagcatgtgtgtcctgccccaggcagcctctgctcaggaaagctggtccaccctctgggcactgttcacacaccccatcaccttggctgtcttccccaacctagacctgctaactctggaatagtgcaataccgcttcctccaaaaagactcccttgaccatgctgcccacttgggataagtagcatctttttttttttttctttctttcctggcaatgaatcactattattaggtcggagcaaaagtaactgtggcttttcccattgaaagtaatagcaaaactgcaattacttttgcaccaacctattactttttcaagtccttttatattgttttgaattgttaagttttcaagggtctatttcattcaatatgtcagcaaacatgtattaagtacaggttgggcagggcgcagtggctcacatctgtaatcccagcactttgggaggccgaggcgggtagattacttaaggtcaggagttcgagaccagcctgaccaacgtggtgaaaccccgtctctactaaaaacacaaaaattagccgcgcgtagtggtggccacctgtagtcccagctactcgggaggctgaggcacgagaatcgcttgaacccgggaggcagaggcaatgagccgagatcgcgctactgcactccagcctgggcaaaacagcaagactccatctccaaaaaaaaaaaaaaaaaaaaaaagtacaggttgttgttttctcagggaatcctcatagctggtgaagtatccagcttttcattttacggatgagtgaactggggtttagaactgataacattttgcccaagttctcacagctagcgagaggcgtgccgcagtttatcgtggggtgggtctaaacaaggacctaaaaactgtattcgaatcccagccctactaccgccagctgtgtgaccttacgaggcgcctcactttactgtttctccaacagagacagacatttcttgttaccgcgcaagtgggataacctccccaccagtgtctagacacagtaggtgctcaataaataggtgtgggtttgcggtggcagaagagcgctatcccttaagtttctgacagtgagggggaaaaaggctaagcagggaaaggaagggaaaggggtaaactgagctcggcgcagtcgagagcgcgaaatagggagggcttcctgcaggccaggaatttggagaggccgaggctgggagaagaaaaatgcccggtgacggcggaggggaggtggaaggacgaacggctccgggaaggggtgaggtctaagcgcagccccgggcccagcggagccgagggcgggtggtgcgggggttcctgggtaggttcgtcccgacgggccgcgggcggattgaagggagggttgggcccgccggcagccccggcgggtccaggcccccggccagcccctgcccctcctcccaggagggcgggcggcgactgcggggcggggcgcgggctcgctcggcctcccggcggcgccgcggcccttgcactccggccgggctctgctggctgcggcgggagctggacgcgggaggaggcggcggcggcggtgagtgagctccgggctggagcggggcggggtgtgcgccggcagccgggtttcggggtgctaggggccgcccagggcggcgggacccccaggggttcgggctcagccaggtgcactgtgctcagtccgcgcgtcca

SEQ ID NO: 13995 - DNA, 2300 bp, Homo sapien
tccaccctctgggcactgttcacacaccccatcaccttggctgtcttccccaacctagacctgctaactctggaatagtgcaataccgcttcctccaaaaagactcccttgaccatgctgcccacttgggataagtagcatctttttttttttttctttctttcctggcaatgaatcactattattaggtcggagcaaaagtaactgtggcttttcccattgaaagtaatagcaaaactgcaattacttttgcaccaacctattactttttcaagtccttttatattgttttgaattgttaagttttcaagggtctatttcattcaatatgtcagcaaacatgtattaagtacaggttgggcagggcgcagtggctcacatctgtaatcccagcactttgggaggccgaggcgggtagattacttaaggtcaggagttcgagaccagcctgaccaacgtggtgaaaccccgtctctactaaaaacacaaaaattagccgcgcgtagtggtggccacctgtagtcccagctactcgggaggctgaggcacgagaatcgcttgaacccgggaggcagaggcaatgagccgagatcgcgctactgcactccagcctgggcaaaacagcaagactccatctccaaaaaaaaaaaaaaaaaaaaaaagtacaggttgttgttttctcagggaatcctcatagctggtgaagtatccagcttttcattttacggatgagtgaactggggtttagaactgataacattttgcccaagttctcacagctagcgagaggcgtgccgcagtttatcgtggggtgggtctaaacaaggacctaaaaactgtattcgaatcccagccctactaccgccagctgtgtgaccttacgaggcgcctcactttactgtttctccaacagagacagacatttcttgttaccgcgcaagtgggataacctccccaccagtgtctagacacagtaggtgctcaataaataggtgtgggtttgcggtggcagaagagcgctatcccttaagtttctgacagtgagggggaaaaaggctaagcagggaaaggaagggaaaggggtaaactgagctcggcgcagtcgagagcgcgaaatagggagggcttcctgcaggccaggaatttggagaggccgaggctgggagaagaaaaatgcccggtgacggcggaggggaggtggaaggacgaacggctccgggaaggggtgaggtctaagcgcagccccgggcccagcggagccgagggcgggtggtgcgggggttcctgggtaggttcgtcccgacgggccgcgggcggattgaagggagggttgggcccgccggcagccccggcgggtccaggcccccggccagcccctgcccctcctcccaggagggcgggcggcgactgcggggcggggcgcgggctcgctcggcctcccggcggcgccgcggcccttgcactccggccgggctctgctggctgcggcgggagctggacgcgggaggaggcggcggcggcggtgagtgagctccgggctggagcggggcggggtgtgcgccggcagccgggtttcggggtgctaggggccgcccagggcggcgggacccccaggggttcgggctcagccaggtgcactgtgctcagtccgcgcgtccactctcggtgacccgcgccgcgcgtgtcctggggctcgaagatgcgacccggactcccgcgccgcgccccgccgagggcaggcgcagaacagatgcgggcgatccctggggaacccgcttcggggcggggtgggagggaggaggccctgcagaacctccctttagtgaagagggactttctgccttcgcacccctgcctggaccctccggctctagtgacagctgggagagactcacacgaagcagtttctgacctatcctgtcgtacacaagtcctcggcgtgctcggccggaccatcccctggaaagaaaggggcgtgtgacctttctctccccgatcctccagaccactgcgccgcccagggaggtcatccccgagagagcccccgcctcactcggagcacacattctagctctccccgggacttttccaagttgcatcactgtttggcctctagacaggtacttggctgtcatgttggagttagttacacaggatttttgaaactttgtatatttgctttgtgtgttcttcaccctaaggccgctgccctcccgactctgcttatgccgctcaaaacgttgctcaaagctcgctgggaatgcttttgcgggcattggttctcaaacttggccccacat

SEQ ID NO: 13996 - DNA, 2300 bp, Homo sapien
atccgtatatttgctcacagagggaagctcaatatatttaaaaaggaagaaatggtagagacttcattttctgaccacaatacaggtagagattagcaacatttacaaataaagaccctccaaacaaaaacagcacagcaacaaaatactacatatgcaacaactttctcagaatcaaatcttgggtcaaagcagaaatcaaaaccccaaagagaaactatctagaaaatagtaatagaaacattactgtggtggaaactgtttactgcctttctaaagtccattctcctctctctttttactaacagaacattgattttgttgcatgttgatgaccagcttaagtaccctattttccagtctcccttgcggctgggggtggccatatgattaagttctcactaataagatataagggattattgttaggtggggattccaggaaagctatttaaaaagaaggttgagtcacttggcctaagcttttgggctatgtgatgctggatcagctatcttgtaatcataatcataagctatctttaatcacatgttaaagacagatgagtggaaagatagaaggggtgctccttatcccagggtctctttcagtcctagacttcctatctctggggaaaagttcctgtcttaagctgctatgtggggagtctattagtaggaactgacataatttttaagtgacatagttacaaaccacaatttatgtgattaaagaatgaaaataaacaagtaaagcgtccaagtcaaggagtcagaaatagaacaacaaaataaaacaaaggaaagtggaaggaaataataaaaatcaaactagaactcagtaaagttgaaaattaaagaaaaaaatgcttgataaatccaggagctagttctttagggaaacaatttaaaaaaatacatacacatatatattctaccagtgtaatcaagaaatagaagaaaacacaacattagataataaatgatttatcctacccaaattctgcaaataaatttgaaaattggatggaatagatgattttcttggaaaatgtgctagtagattgactctagaatagaaagaaaactcaaaaagtctctcaaaagtggaaaaaaaaaaagacaactgttatttgtgaccagttgctactgttcttcctggagtccctttgccattgctgttttgcaaagtgttagaagtgaatttctggtgaggaacctcggagtgtgaggcagggtgagcatcctgcttggtgagctctctgcagtcatctggcaaggttggccacacaccagaaaggcaacggcaactattcttggcatcaggacccatcacaaaacacagagccctgagtgttcttcattttttaaataatattttccagatcaatatgctattgaacttttttgctaagaagaaaagattgaaaatgatttataatcatttaatttcactgtcagtctcacaaacaactgattccttatggtaaaagtgttggaaacattatattcaaatagtagtgttaaagattttgcagcaagattgtgggtaaaaaaggctgaaagtgttttgagaggaaaatgaactgcagagtaacaaagaaaaatggtgagcgtcagaattccttagctcttaattattttcatggaaaagtacctagttctcaaatgctggtaactggaacatcctattggttaaaaataaacagcataaagtttcaggaaaccaactaaacagcaaaaaaaaaaaaaaaaaaaaaaaaaaaaaaggcaaccagaacagcccaaaacagaataacaaagtcagaataatgaagctacgccaaaagtgtcaggtcattacacgggttgtctgccctcaggccagggttcaaacccagtggtgacaaactcagtggccacgtgggctgaagggcatccagaaagtcctgctgggtcaccagagggctgcccttcagcacttggttctgaggtgtctttgctgtttaaaatgtcttgttttctttgaactttgaagtttccccttcctaattatttcagtcttcatttaaacagatgtaattctaacctaatgtcctctttttaccccatctctccctggtagctggaacagtgaaccatggagctgtatttcggtgaatatcaacatgtgcagcaggaatatggggtccatctgagactcgcaagtgatgatacccaaaaatcaaggagttcccagaactccaaggcaggctcctacggtgtcagtattcgggtccagggaattgatggtcacccctatattgtcctgaataacacagaac

SEQ ID NO: 13997 - DNA, 2300 bp, Homo sapien
taaagacagatgagtggaaagatagaaggggtgctccttatcccagggtctctttcagtcctagacttcctatctctggggaaaagttcctgtcttaagctgctatgtggggagtctattagtaggaactgacataatttttaagtgacatagttacaaaccacaatttatgtgattaaagaatgaaaataaacaagtaaagcgtccaagtcaaggagtcagaaatagaacaacaaaataaaacaaaggaaagtggaaggaaataataaaaatcaaactagaactcagtaaagttgaaaattaaagaaaaaaatgcttgataaatccaggagctagttctttagggaaacaatttaaaaaaatacatacacatatatattctaccagtgtaatcaagaaatagaagaaaacacaacattagataataaatgatttatcctacccaaattctgcaaataaatttgaaaattggatggaatagatgattttcttggaaaatgtgctagtagattgactctagaatagaaagaaaactcaaaaagtctctcaaaagtggaaaaaaaaaaagacaactgttatttgtgaccagttgctactgttcttcctggagtccctttgccattgctgttttgcaaagtgttagaagtgaatttctggtgaggaacctcggagtgtgaggcagggtgagcatcctgcttggtgagctctctgcagtcatctggcaaggttggccacacaccagaaaggcaacggcaactattcttggcatcaggacccatcacaaaacacagagccctgagtgttcttcattttttaaataatattttccagatcaatatgctattgaacttttttgctaagaagaaaagattgaaaatgatttataatcatttaatttcactgtcagtctcacaaacaactgattccttatggtaaaagtgttggaaacattatattcaaatagtagtgttaaagattttgcagcaagattgtgggtaaaaaaggctgaaagtgttttgagaggaaaatgaactgcagagtaacaaagaaaaatggtgagcgtcagaattccttagctcttaattattttcatggaaaagtacctagttctcaaatgctggtaactggaacatcctattggttaaaaataaacagcataaagtttcaggaaaccaactaaacagcaaaaaaaaaaaaaaaaaaaaaaaaaaaaaaggcaaccagaacagcccaaaacagaataacaaagtcagaataatgaagctacgccaaaagtgtcaggtcattacacgggttgtctgccctcaggccagggttcaaacccagtggtgacaaactcagtggccacgtgggctgaagggcatccagaaagtcctgctgggtcaccagagggctgcccttcagcacttggttctgaggtgtctttgctgtttaaaatgtcttgttttctttgaactttgaagtttccccttcctaattatttcagtcttcatttaaacagatgtaattctaacctaatgtcctctttttaccccatctctccctggtagctggaacagtgaaccatggagctgtatttcggtgaatatcaacatgtgcagcaggaatatggggtccatctgagactcgcaagtgatgatacccaaaaatcaaggagttcccagaactccaaggcaggctcctacggtgtcagtattcgggtccagggaattgatggtcacccctatattgtcctgaataacacagaacggtgcctagcaggcacatcgttttctgaaaatgggccaccctttccacctccagtgataaataacctgcctctacattccagcaatggttctgtgccaaaggagaacagtgaagaacttcagcttccagaaaacccatacgcccagcctagcccaataagaaacctgaaacagcccctgctccatgagggcaagaatggagttctagatcgcaaagacgggtctgtgaagccatctcacctgctgaactttcagaggcatccagagcttttgcaaccctatgaccctgaaaagaatgagttgaatttacaaaatcaccagccttctgagagtaattggctaaaaacgttgacagaagaaggcatcaacaataagaagccttggacttgctttcccaaacctagcaattcccagcctaccagtccctccttggaagacccggccaaatctggtgtgacagctattcgtttatgcagctccgtggtcatagaggaccccaaaaagcagacctcagtgtgtgtaaacgttcagagctgcaccaaggagagggtg

SEQ ID NO: 13998 - DNA, 2300 bp, Homo sapien
tatctgtatcatgttgcattcccacaagcaaagaatgagtttctgttactccacatccttgccaccatttggtgttgccagtgttttgaattttggccatcctaattcgtatatattggtatctcgttggtttgtctgtttgttttttgagatggagtcttgccctgtcacccagtctggagtgcagtagcatgatcttggctcactgcaacctccacttcgtgggttcaagcgattcttctgcctcagcctcctgagtagctgggactacagacgtgtgccactacgcccggctaatttttgtatttttagcagagatggggtttcaccacgttggccaggctggtctcagactcctgacctcaggtgatcgttctgcctcggcctcccaaagtactgggattactgcatgagccgccccacccagcctcattgttgttttaatttgcaatttcctaatgacattgtctgtgcttataaaattttattgtgctgtggtttggaaatggagtcatggagaacccagggtgaatgtggggctacctcctgtcttttcctttgtaaggatcataactctgtgttgcttgcttttcagtgcctgtcaacaattgttttatatatttttgtctagctttcatagtttttgctgggagggtaaatctgatatttgctactctatcatggcaaaaccagaattctaacaatcatttactgagatttgattaaatttatgagatacattgggttctgtagatacagaggtgcataaaacctggtccctgccccataaaagttcataatctcctgatgtagtaattctcaaaccactcttaagaaacactaaagctaaactgtattctgccattaaaatagaaaaaatgactgtctttacttacaaaaagattttgttgctgattttttgctaaccattgatttccatgctctggaatatagaatttattatggagaggctttttaagttttattatcctaaatttaatgcattgctattttataatattctacagaatacattacggacttctaacaaatatgccatgtatgcaagttttagtcatattggactagtgttgatatacctgatgaaacaatacctgtgattggtaaatgctgtagaataaagttcactggagtcccaaggcaggcagtaacattaactctgcccaccaagtcagggaaggttccctgaaggggttgatgtttgaattgggtcttaaaatgtttagtgttatgcctcatctgttactgcactgattatatttggagggggaagataattaaaataaagcaccctgaacatttaaattagtatatctttgcaattaattataggcttgtaattccacatctgaagtcaaagatctattggaacagaaaagcaagttgaccatagaagtggctgaacttcagagacagcttcaactggaagtcaaggtatctggtttttcctttatgttattttttccatttctgtcttggttgataaagaatattttacatgcattgggataaccagagtgaaagccaattttttttcccccaaaagaaacattcctctaatcactgaataaattcctgtgtatttggctgctgctgtccaaagaatttttttttttaatgtaaccaaagcctatagagactgtttgcttagacagagtaaaagaaaccctgttggatttaggcaggccaatgggaaactaaatgtatataaaacatctgaactaaatcatagaaatagcagaatgaggtttggctgtgtttgtgttttcttttacaagtattacagttcattaaatataaatgtttgatgttctttctagttaagaactcctgtgccttaattatatagtttgattaagttgtttaataatgtaagtgcaaagatatggagtctgcttgttgagaagtaggcttctgtggggttacgttaatgtacagtggaggctctttaaaatcacactgattcctgttagaatcaacagaacattaaagaagagagagagaggatgagagcaaacctagaagagctccgaagccaacacaacgaaaaggtggaggagaactccacattgcagcaacgactggaagaaagtgaaggggagctccggaagaatctggaggagtaagttctgggctgagagcctgttgcccttcccaggttctctatgacatgtagctagaaactttctgtccatttaatactacccagccttccaaatatttataaaggcagctggcttttccttttcttcctcttatctttgtaaaattatgaagct

SEQ ID NO: 13999 - DNA, 2300 bp, Homo sapien
acccacagcccttggcgattgtcagccagctttggggaaatggcctggctgggacaaccctggggctcttgttgcttcagctgccaaattgcttggagtccctggcccaccctaggagctgggttggcaaggatcttagtttctgtttttcatgaccatgagtgagttgaaatcttactctgtaataacatttcttcattctttccacatttacttgcactaccacacgtcaattacctgctctagatattggacaggcagagatgtaaacaagatccagcttctacacagagctcacaagctagtgagctgtctgctgcttttgtaaagaaatataacaccgtgtgaataggatgttaacaatatgaaaaagacttgggtagattagagggcttcgtggaagtggaatgggaaggaacctgtcatgaacaattttctttttggaagggataggtggatgggaggatgcagagaggagtgtagcagaaaagcagaaggacttgggttagaagactagatgtgtagtctcagctgttcaccaattaacctaatgtctctggcctcagtttcctcatttgcaaaacaggggcgataactgtagcccaccttgtggggcattgtgagaattggttgagaaaatgcatataaagcacttaggacacaagcacagctactgtgaggatgacgatgaggatggtgaagaacaggctgtgcaactttgggaaagtcacttgtatacaccggcctcagtttcctcatctacaaaaggagtgagttccacaggatcatctgtaattctgtttagcaacatttttttttcagcatcttccctgttggtgccattgggcattcagagagggtcaaggcctggcctctgccctccagaaggacagggtacaggcacacacatagataactctaacagaagacagggtcccgcggagctgctaagttcctgagcatgcgtgtttggggaaggggtttctggagagctccgtggggaggcagtgcttgacctgggctttgaagacagagattgtgtctttccctgctgaaaaacactttgtcctcaagataaaggccaaatttccagctaagcacacaggttcctcatgatgtcctcagctcccttccgctgcttctccactgttttcccactgcactgtgatacttccaattcttgaaacatattttataccttcccttgctttccttccatctttgtgcatgctagttcttttgacctgggactccctcctccctctgttaggggacagcagaggggacaagcaaggcactagggtcggactgggggattcatatcctacctttgccactgagaggccagtgggtcgcctgctgtgttgctcaatccctaggtgagtcagcgtcttcatctgcaaaatggggatacaaggtaacaacagtgactccctcaaagggcaatggtgaggattaaatgaggtaacacacgcaaagtgctcgccaggcaggcccacagtaatcattgaataaatatgggcagtgtggcccactcctacttgcatttcaggtcttagcttagtcatcacctcctctgaggttggctgtgtgctcccttagtacatggtatctcctcttctaccacagcccggcacctgtcatccccaccacactgcaaactctccgaggccaacagccagtcgactgggttggctgctggtggggacgcataataggcattcaggaaatactgaatgaatgacatggggtgagggtcccagtgatacgagggcgtgcagaggctgtagggggcagtccggggtgggggtaggtcgtgagactgaatgggcaggtggatctcaactctgcgggggacagagagagcatgggcgtccaggctgtccagggctccttcttgccctgggactgaccctgggagggcgcagcgccctgggagaggatggtgctcaactttaaccgggtcggcgccctcgggagaaaatgcagcctgacgggtcgggtgagcgcgctcggccccgccccggcccggcccggccccgcccccggccccacccccgggccttcgcggtgcagctgaggctgcaagtagccggcgccgtcccgcgtcgcccccgcgcagggcgggccccgcacgcttattctgcccgggaggaacgccggcgtccagcccgctaccgaccgccgctgcgggatgctgcgctccacgtccacggtcaccctgctctcgggcggcgccgccaggacgcccggggcgcccagcaggagggtgagtagcgggggcgggagccgccgccgtc

SEQ ID NO: 14000 - DNA, 2300 bp, Homo sapien
atatagtacttcagtatgcattgggctcttcagttaaactctctagacaccccgtctagacactgtgtaaaactctgggaggcccagtgattgataaggtctctgtcagctaagacctgagagtggcccctgcgtgctgtaggcatggggcacttgtcttattgtagaatagcatggcctctcctactcactcatctgtacaactgcaagtgttacatgctgtgctactgctaatagcatttttagagctgctctacttttttttttgtcttgtgtgaaaaaaaaattgcatttagttgccgggtgtggtgtctcacacctgtaatcccagtactttgggaggccgaggcgggcggatcacctgaggttgggagtttgagaccagcctgaccaacatggagaaaccccgtctctactaaaaataagaaattagccaggtgtggtgacacatgcctgtaatcccagctactcaggaagctgaggcaggagaatcacttgaacccaagaggtggaggttgtgttgagctgagatcgcaccattgtactccatcctgggcaacaagagtgaaactccgtctcaaaaaaaaatgcatttagttgatgctcaataaacatttgttgggtgaataagtgaaagatacataccaaatgaagaacataggcaggtgatcagtattatcacatgatttatttatttaataaaggccttggatgaagtcattcctgcttatgtttcacctctttgtgtgtgtgtgtgtgtgtgtgtgtgtgtgtgtgtttctctctctctctctctctgtctcctcactagaatatgagctccatgagggcagggattttcatctctttcactaattgcattctccctgggacctccttagagcaatgcttggcacatactaggcactcaatatttgttgaatggagccatctccctgtagcatttgacaatccttcctaagaagaaaggaaggattcctcagcctatttcctacccttgcaggacttttctctcctggttctccacctatctccctggtctgtccttctccagcttctctgatggcttcttttcctcctccaagaccctcccatggtagtccacatggctctatcttggttccggtactttctgcaaagattacatcaagtctcacagcttcacctctcccctctgtggctgagccacagaagtgtgaacctttctcttgaatacaagtccttgttccccacagccttctgggcacactcccagctggtgtctgcttggtcttcatacttgccgtttcatggccgagtgcgccatctctttcttcaaagtctctcctcttaggagtgagtaagaatactggcttggaagttagacctgggtttgggtcctgagtccgcctcctgctttatctgcagctttggcaaattcctaccctccttgattctcatcttgaaaaggatgattttggtggcaatccctttggaagcttgttgagaggattaagggaagtaacaggcatagaatgtccagtggaagtgccccgccttttcatatttctgtggctgcagccactgctttcccagctacctaaactcagtatattgcagtcacttctgagtcagagaattattttgctccttgactcactcactcatactgtgctgttcttttccttcatgacttgactccttctttcccattcctcttgctgccagcctgcctcagactgtctaatctactcagtaccatctctctgcctcactttctcctcctcaaattcttcccctccttcatctaatctttgttttccataaatttctagtgaccaaggatctcttcataaagagagagggaaagggaaggggtgagaggggactcactgtgggttcaggagttcacacacacacacacacacacacacacacacaaatgtatgtgtgtatttaaagactcaggagtttagtttgaaaactttgatatatgttaattaaagccattgagaacaagtgcaggtcatctagccttcatttacaaagaaaaatgaaaaaacaaaaacgaaaggaaaagtgacttttctttcttctgccctgtagtgaaacttggtttccagcaaaccagcaaacttggttttcatcaattatgtcttaataggtgcaatatgatgaaaaatattccccatggtcataagtgctcagcacgtagtaagtgctttaaaatgcttatattttcgtatttcttttgcaaagaccagaacacaaagtagctttttgtcaaagctttatttgctgattctgctattgttttcccc

SEQ ID NO: 14001 - DNA, 2300 bp, Homo sapien
gtgagggaggcttgcggggtgcttatcactgtaaaccaaaaataaaatttgaaggtccgccctcaaccgtctgaatggacttcctcctgtagtccagggtcctccaaatttaacctaaaagactggcttaggccatgatgggaagctgaggtcagacatgcctcattatgcccttctttcttttagaatccaggaaaagctacacagcatttaatatcaacacatataccttgagtctgataagaaacacaacttactttctctgaagcctgctaactggaggcttcatctgcatgataaaatttcggtctccacaagttcttatgctaacctagacattcctttaaatcaattaccaatcagaaaaaaacttaaatttacctataacttgggagcccatcttgccccacacccgctctgctttgagttgtcccacctttgtggattaagccaatgtttatcttaaatgtatttgattgatgtctcatgtctccctaaaatgtataaaaccaagctgtgcaccaaccaccttaggcacgtgttctcaggatctcctgagggctgtgtcacgggccatggtcactcatatttggcacagaatacatctcttcaacattttacggagtcttttttttttttttttgtcagtaccacagacaaccacctgactcgaggaccttacctatttctcattcagccaatgctgcagcacgttattaacgtccttgaaagcaagtcttatacagagaaaacttattttgatatattaatgaatctgatcagaatggaccagattggggggatagataaatggttgcaattgtgctccctggaatagctttggagtttacctagatcttctgtctctttaggacagagctgcttgtgtttatatagcatcttacacaggattgagacaacttcaatttcctatatcaaaaaatcgggggagggcggtgggttatgggggtgttcaaacctcccaagtgacatctgctgtgactgcatgtcttcctactctttccactgggatgcacctctggtagctgaactataacgagaaggtaaaagctgtgtccaatacctattaagctgccttcttctcaacagctggggaggtggcgggggtgggggggggcggagggaagtcttttcaacagttttacacatttggaaataggcctaaagtgaagaaggggattttcaaattggtgtgttggaaaaggggctgggcttttgagtttgaaatctggtgctgtcacttactggttttgtgccctgggaatatttatttcagttttcatgcctctgtttttctataggcaaagtagaaaattcgaaaaggtcctcaacgagtttgtacagctgctcccactccctcatcacctcttgtgggcctttggaaatgtatgttggaggagacattttggattgttgcaatgacttgggagtgccatagcacctagcaggcagaagccagaaacaccaaatgtcttaacaatgcttgaggcggtgctacaaatgaagtccttctccaaatgcattgagccccaagaaaaatcgctgattctgaggaaccttccaactttaacaatttcaggacgtccctaagctgagctaggaggcaccacgcacaggccggaggcaccacgcacaggccagagtctcccaaatcctgtcccgcactctctcccaccttattaatggccagctcatctttcaagtttcgacttgaaccacttctcagagatatcttcccaggtgcccatcccaacgttactattatatcataatttgattctccctccccccatccccccgccaactctgtaaaccccaagtataacacaggacgttgctatttgttgactgacacatagtgcttggtgaggtcacgctggcgctgaatactttttgtataaaccgacgaacagctgatgaccgcatgaatgctcacacaaggggaaagggcgccaagccaaggagccggcgtcatccgacgtaacttccgccctttaacgctcctgcggacgcccccttctcccagtccgtgtttgtttccggaatttcaataaagctcgattcggctcgaagaagaccccgttcttccgggaaaatggcgactcccgctcgtgccccggagtcaccgccgtccgcggatccggcgctagtagcggggcctgccgaggaagccgagtgcccgccgccgcgccagcctcagcccgcgcagaatgtgctcgctgccccgcggcttcgagccccaagctcccgaggacttggcgcagcggagtttggtggag

SEQ ID NO: 14002 - DNA, 2300 bp, Homo sapien
ttaggatcagtgggccttggtgatactgcaaaggttaaaaagtttgattcagtcacatggtgaataaaaggatagggacatgggtaagaccactttttccctaaacctgataatacccaagaagtggatccttaatgaaactaactttttaattttctccttttgttacctggactttatactgtgttcaaaggagcatgaaaatgtaatgagctatcagctgtgagcaaatttattaaatagagtgaatgaaaagagaaccagaccaataatttaagaattctaactagctcaggcttggacattaactagttctgtttctttgggctgactaatcctggaaattatgtgtattggaaagaacacattgttgagtcagccacaacaagaacctgcttctttggactcaagctccctgcctctcaattttctcatgtgtaatagagagaaaaccctgcttcacggggttattgtaagtactaaataaactactagagactgtcagactctggagggctggaactctcttaaccatctttatttttcctgtgactagaagttatctgagtatttattgggtaaattttgttacatgtgtttatgaactgtgtattataaactgtaaaatgtacaattacaaggtcattttgtttgtatcaatacagctgtgttaagtgctctacaaatttaaggtattttcctttatcttaaaaatcctttgggaaaagaaagttatagtttaatcagtgcctccttctacatgggctcatagtttttatcaaatcaaggaaaacatgtaaaaggaaagctttgggacattttctagaatttgatatttaccaagtgtagatttatatttattaagcctcatctctgattattttttaaatggcaggcactaaataattatcattgtttttgtcctaaattagatgactgactggttcataagttcagaaatttcactgtggtgctgtaaattttatagagtaaaacatcttcgtatgtcctctaagattacatggtctaaaaatattagtttaggtttctcactcaataagaatttaaaatttttctggccttttcttttcccttgtcctttaactcatttattacaaatcttgtgagaaattgacttgaataatttcccaaatcttcagtctctttgccattttaatctcaatttcatacatagggagaccaagccttttaagaaatcctggggtgatcatttgaaaattacaccccacttgctaactccccatccccatcttttttggctctgcaagatagcctattcagcaaagggaaataaatctaacttggatttacacatataacttgttgaactaactagttagtttggttagagtcattgttcaggacctgagtataaattaggtgaatgcttattgcagcaccattcaagtttccttgagaagtcacttaggcctgtggcagagaaagtaggatctaaggcttgatgactgtaagtttgatctgctatttaaccctcatggatactagccagagcttgggctatcgataactcttgccttagcatcagtgtatgattgtatgtatgtgagacactctatccttatttgtatctttagttagttgacaggttcatgaaaggtaagaactgtagttagcctttggatgatgttaaagcaaaaatatagaggaaattcctaaattggcgttgagtctagaagggtctcttaaaacacttcaaattgtatacttttattatacaacaagtgttattaccatagtagttccgtaacacttggccgttgactggctgcttatcacctgtgtcacagatcccattctgttatctactcccttagatctttataaacaacgagtggcagaactcagagagtgggagagtgttccctgtctataatccagccacaggagaacaggtgtgtgaagttcaagaagcagacaaggtatgtcttttgtagataaaagatttcctatgaaataactgccttcaaacagcagagcagcaaacatatgctctcagtacaccactacatgctcatgcttcacttttttcatgacagtggatggttcttcctttatttggagtgtttttcttcagttgtgcctcttcctctctaacaggcagatatagacaaagcagtgcaggcagcccgcctggctttctctcttggttcagtgtggagaaggatggatgcttcagaaaggggacgtctgttggataagcttgcagacttggtggaacgggacagggcagttcttgcagtaagtaacctaagaaaaca

SEQ ID NO: 14003 - DNA, 2300 bp, Homo sapien
gtctggtcatttattttaagtagtgactctatgtgggtcccaatatcacactgaaaaatcatacagaaagtcatatccttcactaaagatgtatgtttagcaagacaaaaaacaataacatattgtcttacagtatcattttctgatgcaaatattgtgtttctttcaaatgtgatatttaacacgccctaacgcgtaatacttttgtagccattacccttttaaaatcccctatcgaatatggtatcactatgctaaaggactgtccattctatcttgttcactcttctgtttgaaattgctaatataatttccctcacttctggtcatgtttgtttttaaaaaactcactattaatcttatttttcctttaagtaaaaaaatcattaccctgggataccaaaagagcagcttctgctcttcacgtttaaaaaaaaaatactgcttgtccactatgcttgtcttagaaaatttagaagtctcactaaagagctgaggaggaaaactgctgggaatgctcacagatacctgattttacaagtttttgtggaaagagctcgcctttagattagtgttactcagtgtttatgagggttgtttgtcaaggcaaaaataaggtacctcctccccacaaattaaagaatcaagttacaatccattatttcatttctgattgtttttctttgtattaagtgggaaagtggatactggataaaagttccccgagctaaaagactccacattaaaggctccaattagctataaatcagttgtctttcctactgggggagaacaagagagaaaagagagagggggtagttagggagtaagagaactggaagagcttccaaattaaattctgaaaaacgtacctattgcatacctaaaatttctttcagaggctgttagaaaaatcccatcaaaaataagactaaaatcaaaccttcccaaatctgagggttaggtcttttctcctgtgtagatcttccattttaagacctttaaaaagagcctgaagaggttagagaccctcataaaataaaacttctaagctgcatgctttccctgctcgttcctaaacccagacaagtgccacacattggcactattgttatgcaaacaatgcctaaaaggttataaccattaacgacctctcattaaaacggctttgaaaaatttgtcacaccatctaaaaaagctagcaggtacattaaatccatctaaatcgacattcaaaacacaaatcgccctgatttgtaacctaaaactcaatgcaagtaaaatctcaatattctgatgttgtttcttgtatatctcattcaaccactaagccagatgcaaacaatttacttctctacaaaatttatcttgtaaaaaagcacgatggaatacatctttaatcaacctttaaccatatgcatgtgcgtctatgcgtttgcgttaattgggagaagttgagtgtagaaatgtaccgaaaggactagaaaatcaaaccagagaactacaaaatgaactccaagaaacgtggttttcaatcccatctctctctcaccacctccctcaaaatgttgtaacattacaatacccctacgtttgtaatcgatcattttttttctatgtcgaatttgtggaaagtaaattcattttatattaggtagcagacgcatattcttttttaggcgatgcaacaacaaaaatcctgcttagcaaacccaagatgtcaacgttcgttataaaaaaaaaaaagtaagttcttcagttcaaaaccgaacatgctaacaaatattaaaactttttaagtttcccagggaaactgccgctgcctacaaaattcacatgaaacgctgacgttggagttactgtacttatcagtcaggtttccgtgaaatttgtcaaaccggccagagcgctggtgtcttgacaattccttacgggaaagcccctcagcaccctccgggctgtggaggacctgattgggaccaacagccgaggggcccggaaggcggaggaccgagaggcgacggccaggctgcgtggccaagctgacggggaaccccggcctccatctgaggatactaagcggttccgacgccttcccccgcggcagtcgggaccgggagaatcggacagaaaccagcctcagagtccggggcaggagccgttgacggctgcccctcaacgctgcgcttcgggttgggttaagtccccaaggcgtcctcagaccacggcggggcttcaaacgccccagtcccgaagacaggcagggggtccctctgctgcgccgggatgacaggctggcc

SEQ ID NO: 14004 - DNA, 2300 bp, Homo sapien
ttttctatagtgttctttttgctcttgttgaagcctcccttctcccttaagacccagccaaaggtcagctttcccagggagtaggcgtcctccttggagcactcagctcatgttgttatggctctttttcatgttttccccacagcctctcataactagtgataagtttttccacaggtatcactgttcccccttgctggaaccctctctttctccccaatgaactctaagattttacttttttatttctcaattgtatctctaaccttctaaggctttgataaaagtatatcttatgagcatacactgttattaagtcataatttttggccatagaaattccctgagtacagatccctcgactgcccaagctaaggtctgtagtttctccatgaaaacgattcacccaggtcactttgggttctgagaggctggaacttatttctataaacctaatactaaaatgaaatatttttgtctgttttcactattgcttagcatctgagcgctgagcattaggcagttttagttactcaaagtatctaaggaaagatgttttctggctgatgcttaatgttttcttaacgcccaagaaatgggactccagcggctctaaaaatggcatttaagatgagaatcaggccgggtgcagtggctcatgcctataatcctagcactttgggaggctgaggtggtagggtcacttgagcccagttcaagatcacagtgagctgtcacggtgccactgcattccagcctgagtgaaggagtgagaccctgtctcttcaaacaaaacaaaaagacgagaatcacagtgttgcttggtagtgtagaaaaagcgtttatcaacactgtaggcccctgtcaagcttacatttggagtgaggagtaaggaagggaagggacttatgcaggtctttccatgcggccttgatttagtccacggagtccaaagcccattctgaggcagggtctctaggttcttggtttacacctgcaggccgatccacagactagagggcagcttgttagactttggaaacacttagattaggggggagatggaaactcaatcccaaagggacagtaaaatgagcctaaggtctggcgggacgatagctcttagcgtgtaaggaacaacagaaaaacaaaatagtgtttctgtgggtgtgctgggtgaggaggggaaacagccggaagaggggatccgagaagaactaaaggagcccacgaagcatgcagctcctcggaggagccggggatgatcactgcccatatcctcccgccacagcgcaagccgcccgggcggtcccggccggcagagggcagcaactgggcgggcgacgcctggcaagggccgccccgcgctgacccgctcgcagggatcctcattctgagcccgaggcgagggggactcgcacccactgccacctctccctgaccctctggccaccatgcacctcggcccggctgaggggagtcggggggtcgggggagagggcgtagctgccgagagcctggcgcccctgcccggaggaggagaacggaggacgccctcccgggtctccggaaaggaagggggacggggttcggtgggtcctgggacggggatgggagggaacgtgggcgagctgggagccgccctccgcagcctggactttcctggcctttctctactccgaagcagcaccgggccgctccggtccccgccagcccctgccagctccgcttccgggggccacgaccctcgctcgacttcggccgctgtgcgcctcccgccgactctgacccagggacccggagaccaagtccggctggccgaggcccgcgggccgcggcgcaagttccgctcccaccgtcgaggactgtggaggcggcgtgggctggtctccgcggccggggggcgggagcgccgggcggacttgaccgtgggcgccaagcgtcccggccgcgcggcgcgggctttatgtaaatggaggctgcgccgggcgtcctaggtaggatggaccagccccccgcgcctcggccctcacgtccaataagaagagccccagcttgacacctgcctatatacaggcgagcgcgcccccgggccgcggaccgcgcgcacagcccgcactgccccacgccgcgggctagggacacccggcccgccaccatgacttccagcaagatagagatgcccggcgaggtgaaggccgaccccgccgccctcatggcgtcgctgcacctcctgccgtcgcccacgcccaatctcgaaattaagtacaccaaggtaagcggccgcccagcgcccgtcg

SEQ ID NO: 14005 - DNA, 2300 bp, Homo sapien
tgaggtcaggcattcgagatcagcctggctgacatagggaaatcctgtctctatccaaaacacaaaaaattagctgggtgtggtggcagatgcctgtaatcccagctactcgggaggctgaggcaggagaatcgctggaacctgggaggcggaggttgcagtgagccgagatcacaccattgcactccagcctggatgacagtgcgagactctgtctcaaaaaaaaaacacaaaaaaacaaaaaaacaccgatggggaaaagcaaaacgaagtttaagatcaagaggagaaaatgttctttaatcaggcagtgaaggaagttactttcacttacggtggaagttgtcaaaagtgctctgtcttttgctcaaatcaaccaacaaaaattcttattaaatagttattatgtgttctacgctgttttaggaactgaggaaggcacaagggagacaggctggagtgcaagatctcctctcactacaacctccacctcctgggttcaagcgattctcctgccttagcctcccgagtagttagaattacacgcacctgccaccaggcccagctaatttttgtatttttagtagagatggggtttcaccatgttggttaggctggtcttgaactcctgacctcaagtgatccacccgcctcggcctcccaaactgctgggattacaggcatgagccaccgtgcccagcctctataccttttctatagtgttctttttgctcttgttgaagcctcccttctcccttaagacccagccaaaggtcagctttcccagggagtaggcgtcctccttggagcactcagctcatgttgttatggctctttttcatgttttccccacagcctctcataactagtgataagtttttccacaggtatcactgttcccccttgctggaaccctctctttctccccaatgaactctaagattttacttttttatttctcaattgtatctctaaccttctaaggctttgataaaagtatatcttatgagcatacactgttattaagtcataatttttggccatagaaattccctgagtacagatccctcgactgcccaagctaaggtctgtagtttctccatgaaaacgattcacccaggtcactttgggttctgagaggctggaacttatttctataaacctaatactaaaatgaaatatttttgtctgttttcactattgcttagcatctgagcgctgagcattaggcagttttagttactcaaagtatctaaggaaagatgttttctggctgatgcttaatgttttcttaacgcccaagaaatgggactccagcggctctaaaaatggcatttaagatgagaatcaggccgggtgcagtggctcatgcctataatcctagcactttgggaggctgaggtggtagggtcacttgagcccagttcaagatcacagtgagctgtcacggtgccactgcattccagcctgagtgaaggagtgagaccctgtctcttcaaacaaaacaaaaagacgagaatcacagtgttgcttggtagtgtagaaaaagcgtttatcaacactgtaggcccctgtcaagcttacatttggagtgaggagtaaggaagggaagggacttatgcaggtctttccatgcggccttgatttagtccacggagtccaaagcccattctgaggcagggtctctaggttcttggtttacacctgcaggccgatccacagactagagggcagcttgttagactttggaaacacttagattaggggggagatggaaactcaatcccaaagggacagtaaaatgagcctaaggtctggcgggacgatagctcttagcgtgtaaggaacaacagaaaaacaaaatagtgtttctgtgggtgtgctgggtgaggaggggaaacagccggaagaggggatccgagaagaactaaaggagcccacgaagcatgcagctcctcggaggagccggggatgatcactgcccatatcctcccgccacagcgcaagccgcccgggcggtcccggccggcagagggcagcaactgggcgggcgacgcctggcaagggccgccccgcgctgacccgctcgcagggatcctcattctgagcccgaggcgagggggactcgcacccactgccacctctccctgaccctctggccaccatgcacctcggcccggctgaggggagtcggggggtcgggggagagggcgtagctgccgagagcctggcgcccctgcccggaggaggagaacggaggacgccctcccgggtctccggaaaggaagggggacggggtt

SEQ ID NO: 14006 - DNA, 2300 bp, Homo sapien
attttaagatataaagaactcttggatccctccatttctccactgtcaaactaccacccaattctggaattctgtaatacccccaaatgtatctgcctatgaccattccaagccccctccaatcccctctccacctcacagctcggaggatcttttcaaaactctaatctgatcatgtcgtatttctgcttaaaccaccttaatgacttacacttttagccctaactaccacttacaaggcctagtaaggtctgacccttgcccacacctcagggctcattttgcatgctgtactccttcactctctctggggccaaccacagtaaatttctctcattctttgagaggcatcatgctgtcccctaccccttacccccaaagccaccaaggactttgtacatgcactttcttccccacttcatgtagttaatcccatgcttctttctgatctcagtccacacatgacttccttggagaagccatcagagatctctccaacaaagtcaaatccttttgctatatttgcttatggaaatatggcccccatctttgcagcatacatctcagttgtgattttgtatttatgtgtgtgggattatttcacttacatctgtctgcttcactagactctaggctctgtgaaggacaagaaccctatgtgctcttgttaagtgcagtgcttggcacataatgagtgtgcagtaaatagttgttagatgagtgaatgggaagaccagagaacgctcttgcatgttattagctgtagtcacagtaagaaagtcctgtttctctggtccatccactgggacttggtaatggtgtggtcataggtaactcttctagacaatggtatttatgataacttcatcaggaattaaagccaaagtgctgaggttttgtcctggttctgcagtagtgtggcctcaggcaggttataactttttaaagtctaaattctaaatgtcacctacagatgagaagtctccttctgcctttggcctctcaccagctgctttctccatgtcctctcctccctccctttttgcaaagctaggggagggcctgatgcagagctggcttccctgtgggaggactggaaggaaccacacagcatggatactaattccatgagtccacattggtaatcagaaactaggcctgccttgctatttagaaactaatgctatattctatttcttcagataagccagttttgaaaaacaaggcttgaatatttggcaggacaaggagctactcccaaacacagtttcttgccagcaaggatgtcaatttatcaaattgaaagggtataacctaggagcctcggttaggtgtactggctccctttctcgtttgattagaatgacatacacgctaattgatctctttccggctcagtcatctccatgcagtaaagaatttcaagctgctattgtttatttcctatgtattatgtctaaatatttcatggtgaatgaagaagagtgactattttcaaactggaatgcttcttcagaagaaacccaaactggaatgtttcttcagaagaaacttcagaagtcaccaaaaaggtgactcctccatctttctgattcttggatcctaaagtatcttcagcaagtgaagcccagtttcataaccgaagaggtgactccatctgtcctacagacttgcagtgtgaagcttgcaatggtttctctgtatgttaatttctccatctctaggatggcctatgtggttcttactaacctcagagtggtatcatgaagccactgaaatgataccagaagaaaacaagagtgattaatcttctaggatgataaatctatattttcttcaaattcttcattttgcataaaaacctttttcagaaaagaatgttaacattggatatatctacacctgatttgacagttccaaactacaccccaaccacccacttctgaatgagaagaaaaaaaaatcagaagcctgcaattgtgtaacatgaaaatcttttctggaccagggcccgtcactgtgatttggcaacacaactggcacatctcttttctcatctcttgaaaaaaaccaacagagaaaaaagtaccttgagaataaaggtaatgattaatctgtcaggcacaaaagggattgttttggggatttcgggttctaagtcgcagattcaaacaaatagcagcgaacagggaatgacagttccaccagaagacgattaagccacagcctctaattggaacggcatttgtacagtcagagactcttaccagacatctccaggaatctgtgagccattgtca

SEQ ID NO: 14007 - DNA, 2300 bp, Homo sapien
aaaaaaaaaaagaaaaagaaaaagaaattgtatatctgacgggatggtccgcaagcttcggggcttgggaggaaggtacagtcataggacagaacacagctttagactgggtcaagatcgtccaagtctggtggtggcttcagaaggccctttgaatgaggctcgtccaggcaataattaccatgttatctaattttgcccgcttaacgtttccacttggatgtctaagagccatctcaaagccccacgtggccaaggctgaatctctaatcttcccccaacagacctgcttcactcacagcttccccttctcagctgacagcaaccccattaatctgcttgttcaagccaaaaaacctggaagtcatccttaactcctctctttctcccacatctcacaactcagcagtcagaaaatcctgtgggctctaccttcaaaatatatccaccacccatccaccactccgcagttgccctttaccatgctgggccacgccaccatcacctctcactgggccactgtaatagccttctaacagatctccccactgcaccctggctcacttgcaaaccagagtgatattttaaaactataatacaaatcatatcacccttctgctcagagtcgccccccatgtgtcaatgcataaaagtcaaagtccttacaatgtctccccattcattggcctccttgctattcctggagcacaccaggcatactcctacctcagggcctttgcacagactgcccgaagctctcctccccaagacgtccacaggggcaactccttcacttccttcaaacctttgctgaaagtttaacttcccaatgcaattcactctaaccactctgcttaaaatccctaccttctccccaaccccctgcttttcttgtagtggttcccattacattctaccagtctacctaatttttttttttttttttttgagacggagtctctctgtgtcgcccaggctggagtacaatggcgcgatctcagttcactgcaacctccgcctcccaggttcaagcgattctcctgcctcagcttcctgagtagctgggattacaggcactcacctccacgcccagctaacttttgtatttttagtacagatggggtttcaccatgttggtcaggctggtctcgaactcctgacctcgtgatccgccctcctcgcctcccaaagtgctgtgattacaggagtgagccaccgctcctggccagaaatctcttctttattatgtctactgtccgttatccaactccagaaggtaagaacctccactgatacataaggacttgtataccccacgtgcctgcaacagtgcttggcacctagtaggcataccaaaatatataaatgttgaacaaatgaagaaagttaaagtaaaactagaggtccaaaaatatcacaaaagccatctatggtcgccttttccctacctgattttgctgagtggccttacttttcagtcctctacacagctggaacattaatgaacacagagggggaagaagtgtgtttactctaggatcacctctcaatgggtcacttggcaagggcatctttgcttcttcgtcagctccttttgacacgggggtgaagggttttctgcaccacactttgaccacaagcatcaccaatttcactgaacccaacagaaatttggaccctctgggggctctctgcgtggcagggcccttttctttttctttgggcttaggctgcaatttgaaacaccactttcctgagccagcatcccccttgcagcgctgtcacagggaggcttaggcagccacgtggaagccacctaccccgacctttggcagaatttccaaacacaacacagtagctttaagttgattaatttggaactctgaccttggccccaaaaggtaagaatacataacaaggtattttattctcaaaatgtgtcaggataagaagcacttctgtaaatcgacctttttaaaatagatataattagatttgcagttgggggcagtaaagaaagggtctgaacagtggataacatgttgagaggttaattattaatgggcagtcttccctaacaaagtatctaataggcattgtggtctctttggcttcagaaattaccaagaaagcctggaccccgggtgaaacggagaaatggacacaagtcccctgtgtttctccattctgttggttttatgcatctttatccaatcaagtgcccttggacaaagcctgaaaccaggtaagagcctgacttttctccagagatgggcatgaacttttctttttaaaacgtg

SEQ ID NO: 14008 - DNA, 2300 bp, Homo sapien
ttcaccacatttcagatgtcaagaagctagaagagatatcaaatctaaaagtgtcaaaaaggatgagaaggggggtggtggggggagaggggggtggtggggggagaagagagagggagagactaaatctgaaaagacaaaatttaacagggctacacgtggatcccaaatctatctgctcaaggtcagggagtggtagcttagtagcagcacatatgaaaacagtcagggacttattgattataattttcaacaggagtaaatattgtacagcatcttctcccagccctcaagtgactgtagactgcgctgtctgaagcatgtgtttcagaaaaggaaggtgacagcctcattcagttttgtgctggttaaatggcaatggattattgcttttgcttgtggacacaagagcaacatggagacatggaagcacgttcagacgagagcaagcgtgacagtgaagaggctagagtcacctgattccaacatcgtcatcaccaccatctgttgggcgcttacatctcacaaaatcatctcacagcctatgcagcagtcatttccattcccaccttacctacgaggaaactgagcctcaggggatgacatcactgtaacactactgcttctggctccacggttttcatgagggaagacatacccaaacccatgctctttccacccctccttactgtgtcctaaacctcaccatctgagggactgttgagggatgtggggatccttacgtttcagttggaatcagactctgccccgtgccctgtctctgaggtccaatttactttgtcctgtctctgctataccttactctccttactccagctggacacaagttctggatctcttgtaccaaatcagacctccccaactcatgtcttctaccgaaacagacctccctgattcgtgatcctgacatccactggcattgtgaggggctactgcctaggacaccgtgaccacatcctatttatcactttacctcctccccaggacacagttttcctagaccacttctgttatccaacctcacttagaccagggctatacagttatgacaatccaacttgtttagcaagaagacagatttagcatttcgggtggctcctgggctggacaggcagagctggggcctggataagaaatggatccccccaggagagacacagggaccagttcctaggtgctcagagaaaccggagcggaagagttgatccactgggatcaacttatagggttcggtggctgactggacatagtttctaaggaagaaatgggaatctggtttagagatagaggagactattggttcttttcaggttgatggtagaagaattatgaaagctgcttcagggaaacacagatcttccctttcctgttacatactcattcctaaagaatcctagtttagggcctgggagattggacacatagttaacagagacacaagacttgtaacccaggagtctggtggttcccactatgtgtgagtctgtttttgagccagcataacattaaagtagactcagcctcttttggctctacccccaaagaatctgctgtccccaaaggcattgtttagaggcaggcgacaaagtacaaaattcttaggggtggtgaaggaatttatagagctgcctctgagaacacttgctcaaatcaggatcgatgtgcatgttccctggtgttctcgccctgccccagcctgtcactggcaggcactgtctctccattcttcccaccccagcctggcctctcttgtgccgagtaatcctgctctgcctgacacgtgcttttccatgctcagcgaagcaaggccgttgacaggcccagcctccttgggagatggtttaatgtgttgcttttgctactcaacaatgccctgtggagtattgctcactcctatttgtataaacaaccccctcatgtatctcttccaagcacgcacagcattctttccctggcagttttggttgtaactttgtctctttcagtacagaagctgaagtgggtgtggctgggaaggcctgaagttactgcagagctaggatttgaacctgggttttgtgactcccagtctaatgcttcttccacagtatcagatggtgtgggctgcaggtctctgcaggtgagggcttctggctcagctgctggggagtaagcaccaagtaggcacttgggccaggtcagtgtttctcaatgttttatcatgattgcccccctaaagagtctttctagacatttttaccccctaattgtctacccgtgaagttttagcaccagggata

SEQ ID NO: 14009 - DNA, 2300 bp, Homo sapien
atcctggctaatatggtgaaaccctttctctactaaaaatacaaaaaaaaattagccgagcgtggtggcaggtgcctgtagtcccagctactcgggaggccaaagcaggagaatggcgtgaacccgggaggcggagcttgcagtgagccgagattgtgccactgcactccagcctgggtgacacagagagactctgtctcaaaaaaaaaaaaaagaaaaaaaagaactacacttctagccagtcaggcaaagccaaggattaagagagttactctgaatttctctgctgccccctctgcctcacctcccatgcattgaacacagagtgtatatgtaagtcctcccaccccaaccatcaagacaggcacatctgccatttttctctgtcttcttcagttccttccaggttctctctgccttgcttaggagctgcccctgtttgcagagctcttcatcaatagactgaatatttacagaatagcgcagttttgattaaacagttcatttcactggagactggggtggtgtattgtgtctcctccggagttattcttggcatcagcagcccttgctcttagcatccgtttctttacattttaaggtggagcataagaagaactgcagtgaaacagatcagatggggggcaggtgggatttctctttacctttcccccgctatttcttggtggatttatcccgttatcttcgctgctatttgctccttgctatcttttattcttctcttttgaaactggccgagtcagaaggaaataaacaaatgcaagggtgcgtagaaagagcattagatggtaggtccagaaacttggactctacatccagcatctagtgatgtgattgattgatatctgttttagcttttcggcacctcaggttttgggctgttttttttttgttttttttttaatctgttaattgaagtgattggtctagatttgtggtctttgaatgtgtgtcagccatggaaaccttcctacaaacagaatctcaagcagcaaatgttaaaacctaaaagcaattttgtttgggttgaaacaaggtgggcgggcagtcaggaacccacccttttaacttctgtgtcctctgccatctcctgtagcagcccccaaagtagttccacaagatccttggccttgggatgctagagcacaacgtctaaaccattcgatgtgcctatttagaaactcatttcctgctcttaaagcgctcagccctctcccctacacataaagccttgcctccatgaaagcagggaggactagccttcgaaaccccagcacacagaggtgagtgtgagcacagctcaacagtatacaagcccgctggaaagctgccccagacagaatttcctcagttgcatcctatggactatcagtcccagaaacgcttggccaaaaaaggaaatacggagggcgggggcagcttgcttcaaagtaattgaggttgagagccgctgtataccatctgccccttctagagattaaattcacagtagcttcttctctcgggccagcaggaagcctgattaatgccgcttaatacgacacttcccatatttatttggccacaaaactcctttttccccataactcctattaatatcacaggaaacagtttgagatcagaaaagccttcacaaaggcaatttttaaagactgagttataaggctcaaaataaatgaggaattctagaaaaggaagggaggagggagaaggacactggtttggggtctggagggctttaagatgagggcgaaacaaggaccacccatgattccaaagaatatccggaacttgcttgttgtctgttggtgcctttctttcagctcattcctagagggcggacagaggcaggagttgctgtgttgctggccagtggctcctgaccataggaaggggactgtgggtgtgagaagtaaagcagagcaggcccctgcctctgttctccccttccccctggtattggctcaccgtgacaaatctttccctaggaagggcagaaaatgaattatcctgttaaatcaattcagcagataacccacctctgtgcaggccttgtgctgggaccacacagatgcataagacacgtacagcttagagcctagtcatgaaatgggaaataaacagccccatcctcaaggtctgaacaggggattggggagcacagagaagggccccaccccgaccagctgtcaagagaactatccatacattctaattcctccaaggttgagggctaaggtgtaggaagaggagagaggttccaagcagaaggaattgca

SEQ ID NO: 14010 - DNA, 2300 bp, Homo sapien
tatcacattttatttatccagtctatcattgatgggcacttgggttgattccatgtgtttgctattataaatagtgcatgcttctggtttttgagaacgaaagagatggtttaaagtgaaacagggatgaagcttcgatgacctccaagattttaaaaaatagtcgatgtggttaagaatgaactttctgctttcatctaggccagtctggctctggagagcaggtgcctccacagcaacatccctgggggccctgaaatcagggttcagctaggctcctatgtgccctgagggtctgggttcccagtcctgttgccaagtggctttgtcccagatcctttcttctgggctgatgtgagtgcatatgtttgtgccaagcttctgttttatattgcacatataaataaaggaagataatttaccataaagaaataattatctgaatataaagccagtctttctagaacatttttgatttagataggcctcatgtgggtttcctgtgttgagatgtatgggttcctgtgttgagatgtatgtgttcccttctacttattcaattcgcaacttaaagcctgtacaatgactgttttccatgtcgatttggtgtaggagaaagaaaagagcaccagatcgtagacctagaaaaccctagatatagtctgtgttttgcctatactgggatatatggtccctagcaagttacagactccttggaagttagttttatttcctagaacatttaaggcatttgatttttatcattctctgcagttgctaaagctctttgattttatgatcttacaaagaggagcatttctattccaattttaaattccattgacaaaaatcaaagaactttagaagactgctgaagaaattttctaaaattattcactatgcttagatgagactgtctaatcttaatcaaccaagatctggctcaataccattaaggtctgtgagaatacagaagatataaataatacatgtttgttcccttaaggagcttggtttagttcagcagcaaaactaatgtacataaaaaaaattacctactgattgtattacaatcagctaaatagaatgtgggacatttcatagacaaaatcacccaacttctttaacagatcaatggtgtaaaaataaataaaaatggagaaatctattacacgttaaaagaacataagagacctgtcaaaaagcaaccatgaggggaggagttggggttaggggaaccttgggtttgaaacttgattcacagcaacaaattgtaaagagacatttgaggaaaattgaacatggcttggctgttagatgttattaagcatgctattaattttgttagatatgatcatggttattatggttaggtttaaataagaaaaaaactttatgtcatagtgatacattctgaagtatttacagggacaataatatgttaggtggggttgttttaaaatactccagaaaaaaactgtgggagtaagtgagacaagaacagcatattgttgttgatagttgttaaagatgagtgattggtacatgggaattcattgtacatattcttttattacttttaggtgtgtttgaaattttctgttgcaaaaaaaggcttaatttttttttttcctggttagtgaagcactaacttggtttgtatttgtgtgatatgaatagaacagtcaataaagctcaatgtagcatggcctaagttgcaagttacagcttctagaagggaccctctgtcaaatcctctcactgtacagattgagaaactgaagaccccaagattgcattgctagttagtagcagaccccctgttagaattaggtctcgtaatttccagattcctagtttgttctacttattcatcaaagttttcctttatccctttgttatgatgatctaaagaatttgtgaattttaaataaaattaatgtgtgcacacaatgcttactttgtcttgtttattttcctcagaatctggccaacctatttgtggaaatggaatggtagaacaaggtgaagaatgtgattgtggctatagtgaccagtgtaaagatgaatgctgcttcgatgcaaatcaaccagagggaagaaaatgcaaactgaaacctgggaaacagtgcaggtaccttgctaatttcagtgatgttaacattcttgtaaagttacctcaatgcagttatgacaaatttaaaactgagattaagagatgcatatggttttgaaactttgcttttatctgttgtttgttttctttttctgaagtagtgttggttactgctctgttattg

SEQ ID NO: 14011 - DNA, 2300 bp, Homo sapien
tttaagtagaaagcctggagttcttgtacctgggaagccctgggagttatttggcaagaggaatgtgagtacagcctcaaactaaaagggtgccaagactgacgtgaaatgaaggaaaagagaaaatagacaatgtttaaaaatgtacacagttttcaagctagtaaatgtatgctactgacccctacttacataaaatatattcatgttaggtatatagttagaggtgcattttggcaaatgtatatacttaggcaactgccattgaaatcaagataaagaatgtttctgtcgtatcacaaaattccctcattactttttactcttagtctccaccctaggcaactactgatttgcttcctgtcactactagatagattttgactgttccagaattacatatcaatggaattagactctgcattcttttgtgtcttaacaaaagtgcgtgttttcaatagttggcttttttttttttttaatttctgagtagtttgccattatatgaatacatctttctctttacttgttgatagacatttaggttatgttcagtttttggctattataaataaagctgctgctaacatttgtgttcagttatttgtgtggatatatgctttatgttttcttttttcttgagtagaattgctgggtcataagctttttttgtttgtttgtttgttttagatggggtttccctcagcctcccaaagtactgggattacaggcactagccaactcgcctggccttgtttgtttttgtttttgttttgaaagggagtgttgttctgtttcccaggctggagtgcagtgtcgtgatctcggctcactgcaacctcctcctcctgggttcaagcaattctcttgcctcagcctcccaaatcactgagattacaggcacctgccaccacacctggctaattgttgtatgtttagtacagacggggtttcaaacatgctggccaggctggtcttgaactcctcaccttcagtgatctgcctgtctcggcctcccagagtgctgggattataggcatgagccactgtgcctggcctggtttttatatgtttgactttgtaagaaagtgctaaacagttttccaaagtgatgttgtcattttccattcccatcagcagtgtgtgagttccaggtactcaacaccctactaatatttggagatgttattctagcaaagggtatgtgataatatattattctagttctgatttacatttctttgttgactaatgatgttatgtaggtttccatatgcttgtttgccacctgtgtatcttctttgtgaagtattttttcacattgttgtttgtctttcaatggttgtcttattattgatttgtaagaggtttttaaaaagatattccgaatataagttctttgtcagaccatatgtattgcaaatgttttctcccagactgtggcttgcctttttttttttttttaaagctatttctcagcggaagttttgaatttttaagaagcccttttaatgaaaaaatttttttcttttatgatttttgcttttgtttcttaaggtagcattgactaccaaggccatgacagttttcttctagatgtttccagttacagttttacatgtaagtctgtattgcaattcaatttaatttttctttatgatagaggtaagggtcaagggtaatatttttcacatggatataaattttttagcatcactttttgaaaaacctatcaattctttgaattgccatgatctatatatgttgagacctatttatatattcttaggtctttcatttcattgatctgtctatatttttatgccactgtttggttactgtagctttatggtacatgtgctaagcaaggtccatttacgaggcagaatccatacagtaaattgaagaatgaaattttagtataaagaattagctcttgagtcacccctgtgcagccttggtgccgtgtgcattttggacactcagcccaccttgctctctagtacttgtaagccttttcctttcaagatgcctgcagaggtgtaccatggagaaggggaggtggcgacttttgccttttaggcagaaattgcccaactcatgtctctcataatcaataccttctattccaacaaggagattttccttcaggagttgatctctaatgcttctgatgccttagacaagattcgctatgagagcctgacagacccttccaagttggacggtggtaaagaactgaaaattgacatcatccccaaccctcgggaatgcatcctgactttggtcaacacaggcat

SEQ ID NO: 14012 - DNA, 2300 bp, Homo sapien
cttgctttatcatgtttcttgggtccttattgcgcatatggtataacagtcacttcttcccagttttttgaattcgctttctgaggcgagggctttttcctgaagatgtgtttatgatgttgattgggtagggcattttggcatgaatctgggtgcatgcagtggtgtagtctccgtataaattattcggctgtttacagcgttaatagtgtctgattttctcagtgatgtagggtttggtttgttagtggagtctgtggtgaggcttagctggggacaggttcaccaagtgggcctgtccttgggccttagggcaacatatgctggcactggtgttagcaggtccaggtgggctgattcttgggcctccaggtggcttacttgggtgttggtaggggcagtggttggccagttgggtgggcagattctcaggctcctgggcagcgtatgtggcatggttgatagtgggaaaaccctctgtttcccaggtggtctgtgctgataatggcagtggctgcaatgggctgggcaggccagtctccaggcctgcaggtggtgcatgtggttggggaccagctgtggtatgtaatggcagattgagtgggctaaatctcaggcccctaggagaagtgttcacatgttaacggtggtggagggggctgggtagacctgtcctcaggcccactagtaatgtgtgtgggtgttggctgtggtaggcaggggtggggtgatccccatggccccagtggagtgctcgagtggggccctgccactggggagggaagggttgctttcagtggcaccagacataaacattcagctgatgagtgggtctttgggccccaggtggcagctgtgggcagggtagtctgtcctcaggacacttgtaaaggtgtagtagctccactgcttggggcagcagggtcactgccaatagtttgtggtttagcaccagtggcagcagccagcaggagtggtggctttgggtggtgggagtcttacagtctaacttaggcctccttggggcacatgaaaatgcatagcagctctgctgctgggggcagtggggttgctgccagtggtttacactttggcttgggggcagcatgggatcacaacagtggctgtaggtggggatgtaagtggactccagggatatggagatgccggggctgtttggccccagggcagggtacagccttgttggggctgggctctcaaaacgtgctgtgctctagctgcttaggactaaggagtggaggggaccgttcatgagcagtatcatcgtgtggtccccaggcagctccctttgtcagtatgagatgattttcttattatgaaatcgatattggccaggtgcggtggctcacacatgtaatcccagcactttcccaggctgaagtgggtggatcacctgaggtcaggagttcgagactagcctggctaacatggtgaaaccgcatctgtacaaaagtacaaaaattagctggtcatgatggcagatgcctgtaatcccagctgctcaggaggctgaggcggaagaatcacttgaacctgggaggcggaggttgcggtgagccgagatcgctgcattgcactctagtctgggcgagagagagtgagactcatcttgggaaaaaaaaaaaaagaaagaaagaaaaaaagaaatcagtatcaaggctgtaaggggcctacttcaagtgttcttaacttctgttttccttctaagttgtttatctagcttgtacttagacaccttaatagatacataaatatttctttgggtagggtgtatagcatacaatgtttttttttgttgttgtttttgagacagggtctcactctgtcacccagacttggagtgcagtggcgtgatcttggcccactgcaacctctgcctcccgggctcaggattctcccattttagcctctcgaagtgctgggagtagcgtgtgccactaccgcccggctaatttttgtatttttattttaatttttgaggtggagtctcactcttgttgcccaggctggagtgcagtggtgcaatcttggctcaccttaacctctgcctcctgggttcaagcgattctcctgccgcagcttcccaagtagctgggattacaggcatgtatcatcacaaccggctcattttgtaatttcagtagagatggggtttcaccatgttggtcaggctggtcttgaactcctgacctccggtgatccacccgcctcggcctcccaaagtgctgggataacaattgtgagccaccgcaccctgcttaatttttatatttgtaata

SEQ ID NO: 14013 - DNA, 2300 bp, Homo sapien
aagctctgcgtcccgggttcacgccattctcctgcctcagcctcccgagtagctgggactacaggcgcccgccatcacgcctggctaatttttgtatttttagcagagacggagtttcaccatgtcggccaggctggtctcaaactcctgacctcaagtgatctgcggaccttggcctcccaaagtgctgggattacagctgtgagccccgtggctggccaaaataaatacattttaaaaattaaaaaaaaaaatacagtctttataaatgtaattttcagtaatcatcttagtaatgcaaaatatggctttggagttttttccagttgaattttaagggaaagtgccatttgcctctaatcactggaattcattataaaaatactgtgcaacagaaaacatgctataaggtggtttaagagctggaaaataaaaatatcatttgttgacagcactaccacaagagattagtaaaaagcacaggtgatatgagatgtaatgtctgcaggtaactatttcctaagactgaatattttaatgaaggaaaaaaaaaccattcgtgagattctgccatcctttgatgattccatgtatctcattataaatggatacaattatgatggttttgaaacgtccgtttttgagcctattaatgttgcagcaaaactagaatcattcatttctcaaactgagaattaaagaagactcttatggccaggctcggtggctcccacctgtaatcccagcactttgggaggctggcgggcggatcacctgaggttgggagttcgagaccagcctaaccaacatggtgagaccccgtctctattaaaaatacaaaaaatttgctgggcgtggtggtgcatgcctgtaatctcagcaacttgggaggctgaggcaggagaatcgcttgaacctgggaggcagaggttgcggtgagtcgagatcacaccattgcaccccagcctgggcaacgagagcgaaactccgtctcaaaaaaaaaaaaattctcttcacttatgttaatggtaataaatggtataaaatatacaggtaacagtataggaattccagtttattacagtatcaataacattaaggccgagcgcagtggctcacgcctgtaatcccagcacttgtgggaggccgaggcgggaggatcgcttgagttggaggttacagtgagctatgatcacaccactgcacttcagcctggcgagacagcggataccttgtctttagaaagcaaaacaaaacaatttacacacacacacacacacacacactctccctaattcggcttgagttggaggttacagtgagctatgatcacaccactgcacttcagcctggcgagacagcggagaccttgtctttagaaagcaaaacaaaacaatttacacatacacacacacacacacgcacacacacactctccctaattcggcctactcaagcacgataccaaatagatgaagaatatctaattaaatggccataaaaagttctagttcatgacatccaagtttaaagaatcaaaatgagttacgagaaaacaaacacaagctttaagaagttggggagaagatgtgcgtggattcgcttcaaagatgtgacagagagaaaagaggacattttctggactggagattcaagacagtctggttcaggttgcatgcttttgcaaaggctaaagccttagtctgtgacataaatttgtaaagagctcggaaaattacatctcggacatggtgtctttttttcctgctgcttgaaggtctttgcatttatgttcgcatcactggggcagctgccgctataattactgcttgttgggactttttgtttacttggtagctgtggtgcaccaagagaggcagaaaaagaagaaaaaaaacctctgttacttgtgacgttaagaagtcgaaagcagccctgcttacatcttccacggaccattttagcccaagggaaggtcctcagcagctctaacacgtagcggagcactatctccgcgtaggagcgctcccgccccggggcgggaccaggacaaaccccgcctcccaagcccaatcccagctctccgccggcggacaggaagcggcggcaggcctagcagcacgggaaccgtcccccgcgcgcatgcgcgcgcccctgaagcgcctgggggacgggtaggggcgggaggtaggggcgcggctccgcgtgccagttgggtgcccgcgcgtcacgtggtgaggaaggaggcggaggtctgagtttcgaaggagggggggagagaagagggaacgagcaaggga

SEQ ID NO: 14014 - DNA, 2300 bp, Homo sapien
ctttatttattacaatctctcgtctctgaacacggggagaacacccgctaagccccgtaaggctggaccctacagttggacatataccatagtatcatgtcaatgcggatcacaaggtcagaagttagagaccagcctggccaaggtagtgaaacctcgtctttactaaaaatacaaaaaaaattagctggacctggtggcgtgcgcctgtagtcccagctacttgggaggctgaggcaggagaatcacttgaacccgggaggtggaggttgcaatgagctgagatggcgccactgtactatagcctgggtgacaaagcgagactgcgtctcaagtgggaaaaaaaaaaaaaaaaaaaaaaaaaggggcacagtcttctgcattctcaggtaaacaagaatataagtatccaacattcatgtattatatgtaatacatattatgtgtggccgggcatggtggctcacgcctgtaatcctagcactttgggggccgaggtgggcagatcacgaggtcaggagatcaagaccatcctggctaacacggtgaaaccccgtctctactaaaaatacaaaaagttagctgggcgtggtggcgggcgcctgtagtcccagctactcaggaggctgaggcaggagaatggcgtgaacccgggaggcggagcttgcagtgagccgagatcgcgccactgcacgccagcctgggcgacagagcaagactccgtctcaaaaacaacaacaacaacaaattagccaggcatggtggcgggcgcctatagtcccagctactcgggaggctgaggcaggagaatcgcttgaacccgggaggcggaggttgcagtgagccaagatcgtgccactgcactccagcctgggcgacagagagagactccgtttcaaaaaaaaaaaaaaacaaaagcaaaaacaaaaacaaaaaaacatataagtatgtattaaaaaatagcaataagaaaaaaaaagacagtaagctccatgaagatataagctccgtgatccactatggcatctccagtgacagacagcatccagcaacttacttggtactaaaatgtattaaaggaatgaatgaaatactactttgcaatcttgtctgccttctctaaccaacagaggtgcaaaaatatcacattctaattatgtatcaggtatttatatgtctgcgaaggaagacctgtctcgttaattttttatccccaacagcctagaaaatgttgaaagaaaaaagatgggggaaaaagcccttttctgtaacaagttagaataggacccacatacattttgttactaacaaaacgtccagcttgtctttcttctttgaaaactgcatggccttaagaggagtccattctaattaggaaaaaagtcaccttttcagaagcaggcgcttcccactccatgcaaagtgaagccaagttagcaaaaccgcaaagacttggctaattcaaatacaagctaatttattattattggcgcaaattagccactttcttttgctacgcatgtcaatgtccacaatcataccgaccctttcctgtagggcgaatgtctcaccagtagctggtgagaagcacagctcttctcagccaaaaccgacagagactggaatttgtgcagtgcagtaatccaaagccgtcgagtagatatgcctgctttaaaatctgcatctcgtaagaaatgccttaattttccatattaggagctgagaaaccaagtcccctgagcccttcagggacaagttcttttccaaatactacaaccacctccaaccacccaacaatgcctcaggccgagggtgggccacacgcgacccagcgctaaagggtcacagccaagctgtccgcctcctgccttccctttaaagaagccgcacacaagggagctgcccgggagttcaacttccggccacatagtgagaggatgttttcctactggagctgagccgcgggggcgcgccccccggccgcgccctcctagccacgccctccacgcccggccttccgagagcgagctcggtcggacgcacggaaagggctgggccacgtgggcggctgctgagtggttcgccttcgcctctcagcgcgcagtcaggcggaggcaagctcagagcgcacggacagagcggtagcgcgcgcccgcgcgcgttcttagtactctccccggtgacgtgcctgaccgaggccgcgccagggcgctgttgctgccaatacagctgtcatggcgtccaaggcgctggctgcggagaagtggccgcggtctccatagagctgggggcgggcggcc

SEQ ID NO: 14015 - DNA, 2300 bp, Homo sapien
gatgcatcttctcagcaccctaacactgcaagcttaaatgagacacttcatttgacaggtaactcgctctgagtcctcaacatacctatttttaagggtctttcccttttttgctccttcaccttagacataccttttcttattttagttctttagagttttagctcccttaacacattcggatgcatggttactggtaataatgccaaaccatttaaggagagccaaagaaatgaggcaagtaaaaatcatgcataaaatgaaaacaatctttgaaaaccaagaagttacggtaattgggtctcagaccaatgcttttccttaaatggaatttgtctaaagagccacatcttccccatcaccattctcttaagtatctacacacaaatggggcattagttggaaatcaaactaaatataaccatgaaaacttagtccatgatatcacggattgatggtaacttctgaagattactttctccaattcttcacttttttgcatatgtgataaggtcagtaagaaaatgtaggaaattatagtttaaaataatcataagatttaagatgctctaagtccttcttgtttctaagtgtatcaaccacaattgaatgttgaactcttaaacactacaagagaagactgaggttaggggcaattcttttcgatatatgtataaaggaatattccttcaacatggaagtcttggaatgaatttcatgtaagaaggggactgatgaatgaggaaagaaaggaagccatcacctgacatgcagcagctccctcaccccgttttcctccaccccaaaagctgtaggaagtagaaagctgcagaatgtaccttccaggccaggagcaaaacattgaggatggccagcaaggggcagggtccgttctcattctgggtgatgatgggtgtgttctcttccttccactggatccacttgatgtgatacacagattgtcccgggaagcgttccttggaggccgccagcacctgagcggtctcctccccctcctcctccttgcacagaggaacagccccgggcaacaccgccgcgccctcctcctcctcagggaccctgttctccgctccctcctcactattgaactcgcagctactgggaaaagaatgcaggttagagaacgactccagagagtccaggctcggagattccccaggagggctcgggtcgctgcaactgctgctgaggccgccggcgctgctgggctcttcggagccggcggcggtcagttctgcttggcaggtgccggcgagatccgggcgggctcccgcgtctccggcggtacccaactcatgacccactccggccacggctgtctccggggaggcggtcaccttgtactgccctctcagaggcgcctcggcggcagcaggactctccaaaccactgtccttcaagtccaaacccgcggaggagctgcagggtccgggaacctcaggagagcccgcgggagaagccgagtccgggaggctcctcctggcggccgccgcccccagcccattcccgccgctggtctccgccgcccataccccaggaccatcaccagcggcgagcctggtctcctgtagcccttcctgcgaagaacctgtccctgacgctggcccggccgccaccccgtgttctagcggctgcaggctctcggggctgctctccataccgggccgcccgcccccagctctatggagaccgcggccacttctccgcagccagcgccttggacgccatgacagctgtattggcagcaacagcgccctggcgcggcctcggtcaggcacgtcaccggggagagtactaagaacgcgcgcgggcgcgcgctaccgctctgtccgtgcgctctgagcttgcctccgcctgactgcgcgctgagaggcgaaggcgaaccactcagcagccgcccacgtggcccagccctttccgtgcgtccgaccgagctcgctctcggaaggccgggcgtggagggcgtggctaggagggcgcggccggggggcgcgcccccgcggctcagctccagtaggaaaacatcctctcactatgtggccggaagttgaactcccgggcagctcccttgtgtgcggcttctttaaagggaaggcaggaggcggacagcttggctgtgaccctttagcgctgggtcgcgtgtggcccaccctcggcctgaggcattgttgggtggttggaggtggttgtagtatttggaaaagaacttgtccctgaagggctcaggggacttggtttctcagctcctaatatggaaaattaaggcatttcttacgaga

SEQ ID NO: 14016 - DNA, 2300 bp, Homo sapien
catgcacaagttaccttaaaacatgataaaaaccttatgggcattacctatcacacagtacttatgcataaacttataatagtaaaattactaatgtttgataaaataagatggaggcattacaaatagtctacagtttgtattttaaggaattggacatgaagaattctagatcattttgtgtctataaacccgactttctatcttgccttgggcaaactttctgtgcctcaatgtactctttaaatatgtgaaggatgctctttttgattaagtgttttgcactcctgaataaagggcatagtataagcacaaagtatgacttaatttatcacaaatattacacatcctatgttcttgaatgtgcacacttttttctcaataacaaaatatatcttaagtcagtttttttaatgctgtcaaaatttgtagaattttctttgagtatggcgtgatctcttcccaaatgcattttacagttttttgtgtgttctatagactatagagtcaaaatcaagagtattttgagaggatcagaagcatttaaaaatctatttttttctagtatctttcacagatctaaatatttagattctctttgcctttttctccatggaatacggtggtatcaaattactaatacagtatataaacttcgtttgcattggtggaattcatttagatctctcaagtaatattattttagggctatataaattgtgtttttagtgtaaaatgttatttgataatgtgaagttaaatcccttttagaaagtgactgaaaatggtaaaggaactcatcagaatcttagcgttcttaagttctctgataatttagtatattttattaatgatgtccaacacctctaagattgttgagaaaacatgaagaattgaggttactcttctcaggtgacactttaaatattaaaatcagaggcttcctgaacaaaacaaattgcaaaatagcgataatggcatgggagaggccagatgcaggactctggtaaatttaacttactttgaatatctatctaaattttagttcatgcatgttcttacttaatcctggtgtttttgctcttagatgttagagtttaataaattgtgatacgcatatatttttttacatgaaggattctactttctaattttacttttctgatctcaagaaaattaaacttgaaaaacggggtaaaattcttcaactattgcctcaagttcagttttgtcctattgtcctgagaaaggagatttagacttgtctgcctaacacaggtattttttagggcatcgtactatcccagagaaagtgttgagataccatggcagaaatataaaacctaagctttgaaccccagtagacttcttcttctgccattaagtctctctttatctgatattctaaggatttcttcaaactacttaataatttgtcaccattaactttaatatccagttttaatctgcactgtaatatcctgctttgagaagaaagaatgcctcataaattagagaaggacaaaacaaaatgttttggaaggtgatcctggctcctttggctctcataattgttttatagctgaaaataaaaagtcaggaaactggcccggtgcggtggctcatgcctgtaatcccagcactttgggaggctgaggtgggtggatcacctgaagtcaggagttcgagaccagcctggccaacatggtgaaaccctgtctctactaaaaatacaaaaaaaattagctgggtgtggtggcacatgcctgtaatcccagccactggggaggttgaggcgcaagaatcgcttgaacccggaaggcagaggttgcagtgagccaagattgccccactgcactccagcctgggcgactgagcgagactcttatatctcaaaaaaaaaaaaaaaaaaaagtcaagaaactgaaattcccatttaagttctcaaatcagtgatctgtcaaaataggccttgtaactgaaataccttacaaagcagttctaactaatgcaatgtgttttttaaaaatttttaatgaaccttacattgtgaacataattgcaacatgttttaagacaaacagtatttaatccttgaagacctgtcttgtatgtctctcaattttgtcagaatttttattattgtttttcacatatgtgaaataagcagttttttcagggtacatagggtatctttgttttacagatttttaaagatgaggttttgaaaagccctcagaggtttttgttaaaagactatcttgcttaataaatgacagcttgttacagattcacacatt

SEQ ID NO: 14017 - DNA, 2300 bp, Homo sapien
gtacttcatgtgcacatgataggctttcagatattgaaattactgaattagtgaccattattggtaaatagccattaatattaccaaaacctgtcctcttgatttttggagggtttttttcctgcttcaattagtgagttgcctgagtgtaaaggaggttcttgtaggtgtcagaaatagaacactgagaattgtagtcccatgataggctgtgttatattttttcttctgttttcaataatgtattgttagagatgtgaaaacaatattttaatgttggtatttattagtagtaaaactatatgaggataccatttatttggtaagaagacccgtggagttaaaaaataaatggctatggagcaaatcagcctttcctagggttgaggtaaaagttgatttgttccagccacccataccataaaactcctgattttcctgtttacttcttcccagctttatgtctttactcttctttgttcagcaccgaatcgttctctctcttttcttctcactcatccatccctgctttgtctctcttaactaaccatcttacacaattgcaattatttgtcatgttcatatacgttttaaaagcacatagattgaaagtgttgtctttcaagctttagggtgtttttcgggggatgcatttttaagtccgcttttttatatgtgattggttctttactcattatagaaaagtgttaacactcatcaataaaatactagaaactttctctaaagacattcagggtgggcctatgatagggatattttggttcaaatccaatttatttgcttttattaattgtgccattacttcattgatgagattgtgttttggctacatatttgaggggaggaaataaatataaaaaggttaaattgctttttggcactttaaattgttcccctgaatatttactaagatgggtaacgtagatggtgatcacaagaatatgaaataggctggctgcagtggctcatgcttgtaatcccagcactgtgggaggccgaggtaggccgatcacctgaggtcaggcctttgagaccagcctggccaacatggcaaaaccctatctgtactaaaaatacaaaacttagcagggcatggtggtgcatgcctgtaatcccagctacttgagaggctgaaggaggggaattgcttgaacccagaaggcagaggttgcagtgagctgagatcacaccactgcactccagcctgcgtgacagagtgtgactccatctcaaaaaaaaaaaaaaaaacatgagacagaataagatacaccctgaattaatatatagtttcagttgtgaagtttcatgtatttagaagtctgtgtacttggaacgttgtaaaactctctaaagtacagtctgattttataggttctgagtgcaaaagtagttacaaatgctcgaagtcctggggcaaaatgctatggcattgtaactatgtcttcaagcacagaggtgtccaggtgtattgcacatcttcatcgcactgagctgcatggacagctgatttctgttgaaaaagtaagcttccctaactgtttatcaaagcaagtctaatttgatggctagttctcaactcatagctgttaacagtagcagggagtagaatttgcagtgatttttaatttttatgtatttgtagtttttactctccttatatttttcctatcgtttccaaattttctgccattagcacacttcttataatcacaaaaatgtaaccatatgtacaaattgtttttctggttcgaacctttcaggtaaaaggtgatccctctaagaaagaaatgaagaaagaaaatgatgaaaagagtagttcaagaagttctggagataaaaaaaatacgagtgatagaagtagcaagtaaggatttatttttatttatttattttgataagcagatagacttttttggtacattatgaagtactcattctgtttttttgtctggggcggtatggtcaggacacaagcctctgtcaaaaaagaagagaaaagatcgtctgagaaatctgaaaaaaaagaaagcaaggatactaagaaaatagaaggtaaagatgagaagaatgataatggagcaagtggccaaacatcagaatcgattaaaaaaagtgaagaaaagaagcgaataagtatgctatacatcttttcaatccctttctaatgcattctactacttaatttttacagtggaagggaaaacctgaaattctaatccagatataagctttgttgttaggtgtcattgtggtaggaaaggaggtctagtaggagtaat

SEQ ID NO: 14018 - DNA, 2300 bp, Homo sapien
agtaatggagaaaaatataaaactggctatatatataggcatgagaatggtttaaacttatataaagttatatataaacatatatctacattaagtttatatataaacttttttttttctttttgagacacagtctcactgtgtcacccaggctggggtgtagcagcgtgatgtgggctcactgcgacctctgcctcccaagtttaaacgattctcatgcctcaagcctacctagtaactgggattacaggcatgagcaactgcactgggctaatttttgtatttttagtagagatgagtttttcactatgttggccaggctgatctcaaactcctggcttcaggtgatccaccagtctcagcctcccaaagtgctggggttacaggtgtgagccatcgcaccacgcctaaatatataaacctaatcagaagttgttataagtcttgtgaaggaaaagtacacaggtgttaaaaaggggaggctttcctgtggttagttcatcaggaaaagtttctctggcagttaaggggagacctaaaggaagagaaggagtagtcaaagaatactcaattaataacaaatgctttgaattgtgagccgcatccctgacggctctcaatactgtctacttacattatagtttttcatatacatcaaatagttaatgtactccagtgtaagctttttgaggtcagggaccttatttagtgtacttcatgtgcacatgataggctttcagatattgaaattactgaattagtgaccattattggtaaatagccattaatattaccaaaacctgtcctcttgatttttggagggtttttttcctgcttcaattagtgagttgcctgagtgtaaaggaggttcttgtaggtgtcagaaatagaacactgagaattgtagtcccatgataggctgtgttatattttttcttctgttttcaataatgtattgttagagatgtgaaaacaatattttaatgttggtatttattagtagtaaaactatatgaggataccatttatttggtaagaagacccgtggagttaaaaaataaatggctatggagcaaatcagcctttcctagggttgaggtaaaagttgatttgttccagccacccataccataaaactcctgattttcctgtttacttcttcccagctttatgtctttactcttctttgttcagcaccgaatcgttctctctcttttcttctcactcatccatccctgctttgtctctcttaactaaccatcttacacaattgcaattatttgtcatgttcatatacgttttaaaagcacatagattgaaagtgttgtctttcaagctttagggtgtttttcgggggatgcatttttaagtccgcttttttatatgtgattggttctttactcattatagaaaagtgttaacactcatcaataaaatactagaaactttctctaaagacattcagggtgggcctatgatagggatattttggttcaaatccaatttatttgcttttattaattgtgccattacttcattgatgagattgtgttttggctacatatttgaggggaggaaataaatataaaaaggttaaattgctttttggcactttaaattgttcccctgaatatttactaagatgggtaacgtagatggtgatcacaagaatatgaaataggctggctgcagtggctcatgcttgtaatcccagcactgtgggaggccgaggtaggccgatcacctgaggtcaggcctttgagaccagcctggccaacatggcaaaaccctatctgtactaaaaatacaaaacttagcagggcatggtggtgcatgcctgtaatcccagctacttgagaggctgaaggaggggaattgcttgaacccagaaggcagaggttgcagtgagctgagatcacaccactgcactccagcctgcgtgacagagtgtgactccatctcaaaaaaaaaaaaaaaaacatgagacagaataagatacaccctgaattaatatatagtttcagttgtgaagtttcatgtatttagaagtctgtgtacttggaacgttgtaaaactctctaaagtacagtctgattttataggttctgagtgcaaaagtagttacaaatgctcgaagtcctggggcaaaatgctatggcattgtaactatgtcttcaagcacagaggtgtccaggtgtattgcacatcttcatcgcactgagctgcatggacagctgatttctgttgaaaaagtaagcttccctaactgtttatcaaagcaagtctaatttgatggctag

SEQ ID NO: 14019 - DNA, 2300 bp, Homo sapien
gtgcttattggagtcctagtgcataactcacagtgaattttacaactagtcctaaaaatgatgaatgaccaggagactgactttgtgtttgctgcttagagaaacttccatacagtcgtctgacaattttagtttagacgagctgtctcattcaatacaattacaggggcaacagtagcaatacatgtggtcagtaggaggttatggaagagtccttggacagaagtcaaaggatcctactttggactagaaaggacatggagcagggttaagcaaggcaaataaaaagcctagaagcagtgatgaaatgaagctactgactgaaaatctcacatgcccgaagcctttctgttttgggggaatgcaagacatctttgaaaacggtaattgcagactgactggacaggatgaagactggaaataaccaatttcctgaacgtcacggagcaggagcatctttggagccttctgtaccagttttccctacgaatccggactactcaagcattgaagagtggaaaagatggggctctgaaatactctgaagactgattgatatcctcagactgttacctgtcaagaagtcaccatgggagttctgaaggtcactagggttcaatcccaggataattccagcattgaacaacaatctgcacttttgtcactgtcacatggaggaacaaaatcttccatatgccattaacttataaccagaaatgaagagctggtatcttcaggatggaaccattttctcactattgttgtttggtgtttgtatgtagagatcattttttccatgaagaataagtgatcctgggtaaaggatggtttatgttagttaatacccttgtgttttttttttttttccctaacttccatcagtgctaataactggctttatattttctaggtcctattctagcttatgaatatgaaattgtttaaacttcttgttttgccatatttattcctgttaaatcctcttagatatagcaggttctggtgatggtacacaagaagtatctaaacctcttccttcagaagggagcctagctgaggctgatcacacagctcatgaagagatggaagctcatacgactgtgaaagaagctgaggatgacaacatctcggtcacaatccaggctgaagatgccatcactctggattttgatggtgatgacctcctagaaacaggtaaaaatgtgaaaattacagattctgaagcaagtaagccaaaagatgggcaggacgccattgcacagagcccggagaaggaaagcaaggattatgagatgaatgcgaaccataaagatggtaagaaggaagactgcgtgaagggtgaccctgtcgagaaggaagccagagaaagttctaagaaagcagaatctggagacaaagaaaaggatactttgaagaaagggccctcgtctactggggcctctggtcaagcaaagaggtttgtttttctatgtcagttctttacgatactgaattccagcattcaataagatcactctacattaagggggtggcttcaagaacatgtacagtaattagtgtcttatgatcctgcctataatatttttgaccgtcataagttacttttaaaaattttcaagatcttcataataatgcagtgtgttctactgattgcattgtcgaatgtcagcatatatttggtttttttgttgttttttgttttttgtttttttttttcaaattgacaatttttttgtgttttattttttaaaatccttgtgatgatggttaatgaacaactatcagttctaagaacacaaaatgaagtcaagtcccagtcctgaaatctggagaagatggccatatttccactgaatagaattgtcagaaaatctagatcttcaggcatcttggggaaaatcagtgcaagaatcctcagggagtcatttgttcaaataacctaatctaggcctttggaattgttaatttgtatgaatagcactagtttgaaatatagtaaatatcaagctgttctgttttgggtttgtttttgtttttgttttcaattttcttctggtgatttgcctctttagctcttcaaaggaatctaaagacagcaagacatcatctaaagatgacaaaggtaaagaatttttttccctatttatttcagtgttgacattgtgtattttcattaaaaagtagtagttgcgcggtgttttctttgacatttagtccttaaaaattttattgacagactagaaacttgagatggtctttatataaactgtggaattatatatattacagaaaactgattg

SEQ ID NO: 14020 - DNA, 2300 bp, Homo sapien
cgtacttctgcttagttttctaagcagaagttattaaaggccaggcacgctggcccatgcctgtaatcccagcactttgggaggccgaggtgggtggatcacctgaggtcaggagttcaagaccagcctggccaacatggtgaaaccccgtctctactaaaaatagaaaaattaggctgtgtacggtggctcagcttgtaatccaagcactttgggaggctgaggcgggtggatcacgaggtcaggagatcgagactgtcttggctaacatggtgaaaccccatctctactaaaaatacaaaaattaactgggtgtagtggcacacgcctgtagtcccagctacttgggaggctgaagcaggagaatcgcttgaacccgggaggcggaagttgcagtgagccaagatcgcaccactgcactccagcctgggtgatagagggagactctgtctcaaaaaataaaaaataataataataaaaaattagctgggtgtggtggcaggtgcctgtaatcctagctccttgggaggctgaggcaggagaattgcttgaacacaggaggcggaggttgcagtgagctgagatcatgccactgcactccagcctggtggacagagcaaaactctgtctcaaaaaaaaaaaacaagacaaaacatacaaaacaagttattaaaacatttggtagggcacagtggctcacacctgtaaatcctagaactttgggaggctgaggcaggaggaacgcttgagtctgggagttccagaccagcccgggcaacatagcaagacctcgtctccacttagaattaaaaaaaaaaaattcgctggacatggtggcacacatctgtagtcccagctactcaggaggctgtggcaggaggatcacttgagcccaggggttgaggctgcagtgagctatgattatgctgctgcactctagcctggacgacagagtaaggaacctgtttaaaaaaaaaaaaaaacaatcaaaacatttcttaagccaagcgtagtggtttgcatctgtaatcccagctacttgggaggataaggtgggagaatcagcttgaggccaggagttcgagaccgcctgagcatcaatagcaagacttgtctctaaaaaataaaatgattctttaattttttcagttattgagattataatgcatattactttattctttatagtcttatatttgggaaaatgttggttctatgttggtttgattacttcagtgatgtttgcattatttgcttggtagaacaaattaagcttctcccttccctttatgactcttctgtttttaagctagcacattcttaattttaattttagccaaactgtcaaatatgttaaaattaaagtcatattttaaaaatgtgagggttaacttgttttaattacttgtcacacaaataccattttaaaattggctttgccatcggtatatgtgtgacaactatgaacttttttttttttttgagacagggatttactctgtcacccagctggagtgcagtggttgatatgaactcacttttaacacattaaaagaatgaataatttgaaactgacctagtaactgttcttctaatgtctgatatacttaaaggggagtattgtttgtttgtttggtttattactgtgtattcaagcacttgaaagttacgtctacagattatactttctggtactgttttgaatagtatatcttagctaagagtacctgtgaactgagtgacgtaaaatacgtcatcaggtcagccttcttattgacagctctttgatatgaggaagaattggattatataaactagttttgaatagtgaaactaatccagtttgttatttatgtactcattgatagatatacctgttttctaaaatgtaccaaacttgtgccacatatctctctacatggactctggttctgattggaatagcctatttatttgttagtgttaggtatccctaaataatatcattaaattatccaccaattttaacttggctgattttgtactattactaaaatctagttttatgtgaattcattttacatttgattattctttgaatttcaggatggtgaggaagaagaaaatgagaaaggtatgtttgatgctagagcttaaaaattgctaaaatttagaaaaacagtaaattatgtaaaaagcactccttatttgaaatcttatttttgaaattagtttattttcaaatttatccatttagtgaattaagttagcatcttgattttattttccaattggttttaattttcttttgaacactaaag

SEQ ID NO: 14021 - DNA, 2300 bp, Homo sapien
taatgaacagatttgaaaaccaaggatatattaaatattgttttaatgtgatgtccgtttttcttttcttttcttttttttgagatggagtttcgctcttgtcacccaggctagagtgcaatggtgtgatctcggctcactgcaacctccgcctcccggtttcaagcgattctcctgcctcagcctcccgagtagctgagattacaggcatgcgccaccactccaaactaattttgtatttttagtagagacgggtttctccagttggtcaggcttgtcttgaactcccaacctcaggtaatcctcccgcctcggcctcccaaagtgagccaccgcacctggctgataatcagtttttcaatcaagttgctgaattactacattcaattctttttgccagatcttgttttacttactggtatctacattgaaaataatttcatcttggttatgccacttttccttcagtgcgcctgttttctcttttgtaaaactggaaattttactaggtcccctgtaaggctcttttagttctgaaatttaataattatatagacaaaaatgagaagaaaatgctttctgtttaactaaaatgatgtttaaggaagcaacaggtaagctcataggaaatcagtatcgtttttcttcagcacaaattattagaaaacgaaaagtgccaagaaggggattacgtagaggtaattatgtagacatcagcgagacataatatataatagctggtcaggaaaagaaatgattcttatgacaatattaaggtagtgaataaaagttaaatgacgagaagcttcataggtatggaaaaaatactttggtgaaacattgagcttattcttttataaaataactatagggtaactttcttttaaaaatgtatgttaaaatgattctatttagagaggttagagggaaaggaacctacatttttaagtttctcctagaatattttttaaatgcagctattacaagcacaaacaatgttgataatgttatagtgggctctgacatttatatcaacatatttataaaattcctttacatgtagttaatagagtagatgtttgtatcttagaatggctttcctgagtcttcacactctctttgttatgaacttttaaataagtaacttaggagaaagcttcacccattgaagtttacggttatattaattgggtgtgtgtttaaaaagtagttaaacaggtagagctaacttctcattaggttgttttagagattatagatttaaagacttttggtttacctgatgctggcatatccttttcttttaaaatttcaacctttaaagtcaccaattaacttcagcaaaagtgatgtggttaatcagtacagtatttagaactatatgtaatgcaatacttaccgacattaaaactaatttgcaatacctggcagctttaaaaagactaaaaatgatgtgtacaatctgatttttcttctatagaaacaaatatattttgaggttataggtttggccaaacatctaatgtataattttttgtggaaaataccacagactacatatttataattaagtacatgtttactctgtaaagctttctaaaactggtatcaattaaatgtagtaatcagccatataaagcacatttcatataacacagtatcatagtgtactgtaattagcttttttcctccagctgtagtatgttcagatgttaagtaacactttaatcagaactgtggcattgaggaggactttgggcgtataattgttatagatatttcttaggtacctgaaaggctgaaagctctgaaggccaggacatagtttttcatttacctctgtctctgtaatgcctggtgtagagcatggcacgtaataagtgctcaaaaaatatttgttgaatgaatactgagggcctttttggggctttcttaactgcttttagaaatacctcttttgggccaggcgcatggctcacgcctgtaatcccagtactttgggaagctgaggtgggcggatcacctgatgtcaggagtttgagaccagactggctaacatggtgaaaccccgtttttactaaaaatacaaaaaattagctgggcatggtgtttcgcatctgtaatcctcgctacttgggaggccgaggcaggagaatctcttgaacctgggaggcagaggttgcagtgagctgagattgcgccattgcactccagcttgggcaacaagatcatcatctttagataatctgttcatctttagaaacttggtctcaaaaaacagaaaacaaacaaaaaaaaga

SEQ ID NO: 14022 - DNA, 2300 bp, Homo sapien
acaaaaattagccaggcatagtggcaggcgcctgtagtctagctattcaggaggctgaggtgggaggatcacttgagcctgggaggttgaggctgcagtgagccatgatcacgccactgcactccagtctgggtgacacagtgagaccctgtcaaaagaataaaaataaaaacaaaaacaaaaaaaagagagagtgtaactgtaagttcccagataaatctcttaaaatcttgagggctgggccagaagatttttttttctttttttctttttgagacggagtctagctctgttgcccaggctggagtgcaatggcgtgatctcagctcactacaacctccgcctcctgggttcaagcgattcttctgccccagcctcccaagtagctgggattacaggtatgcaccaccatgcccggctaattttttgtatttttagtagagatggggattcaccatgttggccaggctggtcttgaacttctgacctctagtgatccacccacctcagcctcccaaagtgcagggattacaggcatgagccacagcacccagactttttttttttttttgagacaggatcttgctctgttgcccagggtggagtgcagcggccggatctcactgcaacccctgccttccgggttcaggtgattctcctgcctcagtctcccgagtagcggggattacaggtgctcaccaccacacccggctaatttttgtattttttgtagagacggggtttctactaaaccctgtatcttggccagtttggtcttgaactcctgacctcaagtgatgggccagaagatttctaaggagtcttgcattctaaacttctattattgtgaatccaatgttgtagcagagacagagctggatttggaatcaggagcctgggatttgagcacagctcggccacataccagctgtgtgaacatgggcaagtcatttaatctctctaagcctcacggagatttacttgacagacttgggaaggattaagggggttactgtacgtcaaagtgccttataaactgtaaagaactaccctaatgtcaggtattcttttataatgtccagtcttccttttttttgagccaatcagaaaaagtaacctaaagtgagtcagatctcaggaatttaagttgtaaaaccaggaaatacagtatagttaattgtgcatcataatcaccttatggaatttatagaatcgttttattttatcaatgcttgcactttgataatgaataatacaaggtaaaattacaaataggtactcacttgtacaggccgatcctccataagaagatgctcactgttcttggaatcccaaattttggggggcaaaatagtgaacacagtatatgataacggcaacaagtacttataagctagttttctctttcattgaacaatttcgtgttgagccatcaggtctaccggggaggatagcaaacctgaggccaacaagaaagaagttttcctgtttttcaagtgaggaagggcagccctagaataacctaagctgccatgggcagggcgatgatgttttctcctgagacagccaatgagccatgtgtcaaaggccagcccttcctattctttggactaacagccctagaactgctttgaggtcttttgaatggaactcggggaacctagttcgttggtgcacaccggcgacaatttttcgattattcagcagaactgataaagtatttccttgagaggttcagcgcgcgcacgcgccccctcggtttgtgttgagtaacgcgcgcactatgtcattcagtgcccgcacatcgttgttgctcaagactcaagacgttgcaagaaaatggctaacgaagcgacgagagaacggcggcgcggcggacgttgctgcggtaggacgtgcccgacctcccagtccacacaagggagcgcaccgcccaagtggccgcggcccgctcgaccgagcgcgccgctgccggtccctgcgccaacgcgcacgcgcggccgtcatccgggtgctggcggctgctgctgcaggttgcgctagggtggcggaccgggggaggggccagcggctcattgtgcgcagcgctgcgcggcgccggcggccgccgaggcctgggtggaagttggcgctgctgccgccgccctgcagcccactcgctgcctcggcagcgcgctgctcttctaagatggctgccgctaccggtgcggtggcagcctcggccgcctcgggtcaggcggaaggtaaaaagatcaccgatctgcgggtcatcgatctgaagtccgagctgaagcggcgga

SEQ ID NO: 14023 - DNA, 2300 bp, Homo sapien
ttgtggagaggccagcatccctagcctctatcctagtggatagatgccagtagccacgcccctcctccctgagttgtaacaaacagcaatgtctccggatgttgctaaatcatcccagcttcagaaccactgatttaacccaatatatccaaaatattatttcaacatataataaatattaaaaagtactgagatttttcagtctttttttgtattgtacctttgaaattcgatgtgtatttttcacttaaagcacttctcaattatttttatttatttatttttttagggagacggaaaaggaaaaggggaggggagagggagaagaggagggagtctagccacattttaagtgctcagcagccacatatggctggtgtctacctaattgaagaacacaggtcaaaagcttcagaaaaaaggttagagctggaaatacaggtttgagaagtcatgagatagtaacagttaaaatcaagggagaagataagatagtccgggcaaaattctatgtttaagagtgagaaaataggaggattgaggaaaatcctagtcgaatgctcttttagttttcccacacaatctgctatccttgatcattattgtaattttaaaatcatttgtgtgtgtgtgtgtgtgtgtgttttgtttgtttgtttgtttgtttgttttgagacggaatctcactctgtcgcccaggctggagtgcagtggcacaatctcgcactcactacaacctctgcctcccgggtcctagcaattctcctgtgtcagcctcccgagtagctggggttacaggcgcccgccactacgcccggctaattttttgtatttttagtagagacagcgtttcaccgtgttagccaggatggtctccatctcctgacctcatgatccgcccgccttggcctccaaaagtgctgggattacaggcgtgagccaccgcgcccagccttttttttttttttcttggagacggagtctccctgtcacccgggctggggtgcaatggcttgatcatggctcactgcaacctcggccaccctggctcaagcgattctcctgcctcagcctgccgagtagctgggattacaggcgtccgccaccacgcccagctagtttttgtatttttagtggagaaggagtttcaccatgttggccaggctggtcttgaactcctgatctcaggtagtccacccgcctaggcctcccaaagtgctgggattacaggcgtgagccaccgtgcccggccaaaatcatttgcttactgaatgatacggaaaatatgagtgaacaaaaaaagtattgaaaaagatgagttgatggcaaagggagggaattaatgtttagtgaacacttaattggcaagtaatgttcagagcattatataaattgtctcatttaatctaacaagaaccttttgaggtaaatacgttatcccaatttatagaggaggaaactaagatttataaggatctcatcaatcagagaactcttaagtggcaccactggactttgaaaggaagtctgcctgatggactctgaagctcatcctctctctatcctcctaatgcatataatgacgcatttgttatctactgacttttataaaataaacaaggaggcttatgcgattgtacagcccgagttcgcaggagatatgtgaccacttttgatctgattccggaagcaaattcactttaacagtgaggtgccgtgatctttatgtcattagcgcatatgatatgggtatcatttgttgtgaaagacactaacccatgatgtttttgtttacgtatatctgtaaatgtatcaattctgtagttggttaatttttagttacgaaaaaatgaaccaagatgtagtcaagatttggcttaaatgttgaacgcataatcaccaaagaaaattaaataatgagctttgtgacacctttcagttcgccaacagactgataaaaccagtacaaagggggagggccgggaccgagggggcgggacggtgagaaacgggaatcgagcaagcgcagaaacaaacagatgttaatggaggcgtgaaggctactgcgctctcactttccgaactgtcgtaaagagccctagtgtcgtgctctcctcggtaggggaggaattggttaggcggcggcggcggcgaagcggcggcggcggctgtaggggagcagcggcagtggcggcgacggcgaggaggtgttcggtttgcgcagcgtagaaacgcccgcagcttcagagaaggagttcttgtgggaccaaattaggcattctgaacccacgccggcttag

SEQ ID NO: 14024 - DNA, 2300 bp, Homo sapien
aagataagatagtccgggcaaaattctatgtttaagagtgagaaaataggaggattgaggaaaatcctagtcgaatgctcttttagttttcccacacaatctgctatccttgatcattattgtaattttaaaatcatttgtgtgtgtgtgtgtgtgtgtgttttgtttgtttgtttgtttgtttgttttgagacggaatctcactctgtcgcccaggctggagtgcagtggcacaatctcgcactcactacaacctctgcctcccgggtcctagcaattctcctgtgtcagcctcccgagtagctggggttacaggcgcccgccactacgcccggctaattttttgtatttttagtagagacagcgtttcaccgtgttagccaggatggtctccatctcctgacctcatgatccgcccgccttggcctccaaaagtgctgggattacaggcgtgagccaccgcgcccagccttttttttttttttcttggagacggagtctccctgtcacccgggctggggtgcaatggcttgatcatggctcactgcaacctcggccaccctggctcaagcgattctcctgcctcagcctgccgagtagctgggattacaggcgtccgccaccacgcccagctagtttttgtatttttagtggagaaggagtttcaccatgttggccaggctggtcttgaactcctgatctcaggtagtccacccgcctaggcctcccaaagtgctgggattacaggcgtgagccaccgtgcccggccaaaatcatttgcttactgaatgatacggaaaatatgagtgaacaaaaaaagtattgaaaaagatgagttgatggcaaagggagggaattaatgtttagtgaacacttaattggcaagtaatgttcagagcattatataaattgtctcatttaatctaacaagaaccttttgaggtaaatacgttatcccaatttatagaggaggaaactaagatttataaggatctcatcaatcagagaactcttaagtggcaccactggactttgaaaggaagtctgcctgatggactctgaagctcatcctctctctatcctcctaatgcatataatgacgcatttgttatctactgacttttataaaataaacaaggaggcttatgcgattgtacagcccgagttcgcaggagatatgtgaccacttttgatctgattccggaagcaaattcactttaacagtgaggtgccgtgatctttatgtcattagcgcatatgatatgggtatcatttgttgtgaaagacactaacccatgatgtttttgtttacgtatatctgtaaatgtatcaattctgtagttggttaatttttagttacgaaaaaatgaaccaagatgtagtcaagatttggcttaaatgttgaacgcataatcaccaaagaaaattaaataatgagctttgtgacacctttcagttcgccaacagactgataaaaccagtacaaagggggagggccgggaccgagggggcgggacggtgagaaacgggaatcgagcaagcgcagaaacaaacagatgttaatggaggcgtgaaggctactgcgctctcactttccgaactgtcgtaaagagccctagtgtcgtgctctcctcggtaggggaggaattggttaggcggcggcggcggcgaagcggcggcggcggctgtaggggagcagcggcagtggcggcgacggcgaggaggtgttcggtttgcgcagcgtagaaacgcccgcagcttcagagaaggagttcttgtgggaccaaattaggcattctgaacccacgccggcttagctgggccgagtccaggcgctgccgcacgtacagttttggtggcggtgacagacactgttcttgactctaggggcctattaggccgacgtctgaggcgcagatcgctggctctcgacgcattactctttacgccttacatttctgtcttccttcctgggtcagtgattcccggaccctggaagagaagagggtggctaatgattaaggtgaggggaacggggggggaggggatccattggaggccgcgcgtgcgcgcaacgggggaggggccggcctggaggggagaaagaggaagggctgcggccgcggaaggctggggtcggtgaccggccggttatctctggctcggtggtgacttagggtctgggtctccgcagacgatttgtgtttgggcaaggcattcgtctaccgacacacccacagcctacagtgagggagtgtgggtgaggggatttctctcccacttccgactctccctagagt

SEQ ID NO: 14025 - DNA, 2300 bp, Homo sapien
atacagcactgcctgtgcttgtgaataagaataaaagaagatagtggttttgatagctttctgtaggaataggtcattctatgccttaattattgtcatttgttctgatagtaaagttatatactatagtaacatgggagacctgtaagattatatatttctgtaacccatttgtagagagggaaaatacttgcttactaaacagctgttgtactcgctttttaggaactggtttcaaaatgtattttatgggcaaaacaaatctgtggtgtcagaagttacaatagtggttaacagtttggtgggctgtagtaatgggaagaagatttctagggtgctggttatgttgtttatctgtgtgccagttacatagaggtgttcatttttttagtgttcattcatctataaacttagaatatgtgtgtatgctatacttaataaaaacttgttaaaaatatgttaacattgtttattcatgttttgcactagtaaagctcttcatttgtcacatttactgcctttctgattaatatatttcattttgagtcatgatatttactattacattattttcatatgtacattgcattgatgtaaatgctttaaattcagatctctttttggcagctcgtaatttaagatgttgaatgatttagatagattagctgtacaaagtttgattttatgttctgctgtattgtttatttaactgaatgatcttcagcagcccacagtcttggctctaatctttttgtatttaaaactgaaatgcagtagttgtgtctactatcaggagaattcagattctcattagagaattaatagagtagtatgaaggaaaaaaaatagaaaagagaagcttatattcattagctcattattaataatatcaatctaatgtagtaaccatctagatgtacagaaacatttaataataaccacttaaaaatgtcataccaggagtaaaacatgttgactaattagtcttttgaattcgaatccttttatttatatttcactgaaataggttttgaagtaattgtttgatttgaccaaatatgttttgttgctgaaggtagtgagatatgcaataagatcagtttttggttaatagaagtttttaagtaggcttatgctctatatctactgtatttctaaaaattggatgcatgagtagagtgaccagagaaaaacgttttataagaatagtaaaataattcataacagacattttgtgtactgatgaggaaaagacagttctgcctttataagggatcttcttggtggaatttgagaactcttcaattaaatagtataataaaacacattaaaaatcttttaaatatctaattttgtcttctaggctttccttaaagtttcccatgtctcaatggactcctgaatataacgagctctacaccttaaaagtggatatgaagagtgagattccttctgatgcaccaaagacacaggagagtctgaaagggatccttttgcatccagagcccattggggcagccaaaagttttcctgcaggagttgagatgattaatagtaaagtggggaatgaattctctcacctgtgtgatgattctcaaaagcaagagaaggaaatgaatggtaaccagcaagaacaagaaaaaagtctcgttgtgaggaaaaaacgcaaaagccagcaggctggcccttcgtatgtgcagaattgtgttaaagaaaaccagggaatattaggactgaggcaacacctagggacaccaagtgatgaagataatgattcctcttttagtgattgtctttcttctccttcatctagtctgcattttggagattctgatactgtgacttcagatgaggataaagaagtctctgtaagacattcccagaccattttgaatgctaaaagtagaagccatagtgcacggtctcataagtggcctcggactgagacagaatctgtatcgggattgttaatgaaaagaccctgtttacatggcagttcgttacggagacttccatgcagaaagagatttgtaaaaaataattcctcacagaggacacagaaacaaaaagagaggatattaatgcagaggaagaaacgagaagtgttagctcgaagaaaatatgccttgctacctagttctagtagttccagtgagaatgacctcagcagtgaatcctcttctagctcatcaactgaaggagaagaagatttgtttgtttctgccagtgaaaaccaccaaaacaatccagctgttccctcaggtaaaaatgtttaagctgagtaaaacatggaacctatt

SEQ ID NO: 14026 - DNA, 2300 bp, Homo sapien
aggttagagcacagaccttgaagagatgagaatccggaaaggcaggataagacatgtaagagagggcagagccaggagaattttagggaaatttgctgaatcttaccaagcagagcctgaagcacccccctacccaggttcatttatgtgaacccataattccctttattatttaagctgttttggttggatttttattttatttgtaaacaagcagaagattcctaattgatacattgacccagaagagattagctaggtactttgagccccataggagcagggtatccttactcttgggtactgtaaaatcaaggctaggacagtaatgttccagaattctaaggattctgaggagatgcctcagaatcagagtagggggttaaggatggcagcagggcggggctttggctttaggctcttcactcttgtaatttaatcagaagcttcaagttttaaaaatctcttttatatagtttccatataatatttagtttgaggaagcgtttctaggttttaaatgaatttgaaacactgggacagactttcagaggatacttttgcagttcttctgccatagaagaacataccttcaaaataactgggcatgtggcggagagcataatcaggactcatgtgttttatactgagaaatttatcttttctaacaaccatgcaaggcaattttattaccacattttatagatgaaaaggaggttaaataacttccctaaggtcacattgctgaaagaaaggtcccagattagaacccagattcatttgactccatgtttcttttcccactgtgtgacactaagtcattagattactttaaagcacattttattttccaagtattagagtctaatcatttcttacattctattggttctgactgtagagtccaaaggaaggaaaaaagataatggcccagacatggtggctcacgcctgtaatccaagtactttgggatgctgaggtgggcggatcacctgagctctggaaggagcttaagaccagcctgggcaatgtggcaaaatcttgtctctacaaaaaatacaaaaattagccaggcgtggtggtgtgtgcctatggtcccagctacttaggaggctgaggcaggagaatctgttgagcaaatatatacaatgtatatatttgtgttggtggatagtgagacttcaccagatacactctgacttggctggctgtgtcttaaggtgagattttaagaagtacatagctgcctgcattatgtaggaaggatttatgatattaggggttcatggagctcaggggaagagcatttgctttgtagcatgtagtggaaggactcgtatttttaaacttttaaaatacagttttactggtaataaatcatttactgtgccataggaaaacatgatctattgccatacttacacatcacagtaaatatgagcctcctgaagaatttagagtttcaggaaaatcccagtgaagaccactgcataaaatcatatgatgtatatgttaagaatatggcactatcagccggggtgtggtggctcacgcctgtaatcccagcactttgggaggctgaggcgggcagatcacctgaggttgggagttcaagaccagcctgaccaacatggagaaaccccatctgtactaaaaatacaaaataagctgggcgtggtggtgcatgcctgtaatcccagctactcaggaggctgagggaggaaaatcgcttgaacccaggaggcggaggtttggtgagccaagatggcgccactgcactccagcctgtgcaacaacagcaagactccatctcaaaaaaaaaagaacgtggcactatcacattatttacagagatttgaaattaccgaacatttctttaaacatttattatttataccccatacctatttttttacacagtgatatttcatgatttgattattctgtgcatttttttctgtttcaagatgactcaaggagaactacatctagtgctgtaacggaaactggccctcctgcaatgccaaggttaccttcctgctgtccccagcactcaccatgtggagggtcgtcacagaaccaccatgcattaggacatcctcatacaagttgctttcagcagcatggtcaccattttcaacatcatcaccaccaccaccatactccccacccagctgtcccagtttctccttcctttagtgatcctgcttgccctgtggaaagacctccacaagtacaagcaccttgtggagcaaatagtagttctggtaccagctatcatgaacaggtatgtggaattt

SEQ ID NO: 14027 - DNA, 2300 bp, Homo sapien
tccccaaaaaagtaactatactaaatcctcatttcactaagaaattgattctttgctaacgagaaccttcccctgcctttccctaaattgtatgtgttgaaaaaacaagtttataccaggttatttagtaaaatctgaccagttttaccatatgacccaggctaatttctttatgcaaaccaattaaaaaaaagtacccagactggtctgatgtgagctaatcttttgtctgtgtgtttctgcaatatcgtgtggtaaaaatcagtgttaaaattgatgattctgaggaataagatctaaagatatcaaagatttgaatgttactaacgagagggaaggaaagtattaatagaattttcagtgaatgacagtgaaaatattgtacttcaagtttatgaaaatccttttttttcttttgattattcaggatctgattttcatattcagatcagcaaactattggtctaattctgcctactgatttttgtaaacaaaattttattggaaaacagctgcagtttttcagttacaaacaaactgaaaaagtgtctgttgtttgtggctgtttccacattacaaaggctaagctgagtagttacaacagagaacatacggcctgtagagctgaaaaaatttcccgttttacccttcacataacctgtttgccaaactcttgatctaattaatgatccagctctcttgtgtaactttttgttttacttctgtcatttaagattgtatcccaaatctctggctgttgctgccattctaatatagtaaccttttatatagaaaattgccagtttaacagtcttatcttccagtaactggcaaattgttgtttagaataaacatgcaaaatctgcaattgtgttaaaaactaatataaaataattagactataaaaatgaatcttagctgggtatggtggcacacacctttagtcccagctactcaggtggctgaggtgggaggatcacttaagcccgggagttcagggttacactgagctatgattgtgccactgcacttgatcctggagcaagattctgccgcttaaaaaaaaaaagaagcaaaaaatgaatccctgaaactaagttgtttttagtgtcttctgttaactgactttaggaagagaaaatacagtaaactgggatgcaaaataaagagtatgaatggaggttgggcacattggctcatgtctgtaatcccagcactttgggaggccaaggtgggcagatcacaaggtcaagagattgagaccatcctggccaacatcctggcccatctcaaaatacaaaaattagctgggcgtggtggcatgcacctgtagtcccagccacttgagaggctgaggcaggagaattgcttgaatctgggaggcagaggttgcagtgagccaagattgccactgtactccagcctggtgacagagctagacttcctctccaaaaaaaaaaaaaagtatgaatcaagctaaatacacgtttcctaggtgtgttaacttgtattacatgtgttttgaaaaaaaatgcacagggttaacattgttttctcttaaactttcatccattaaaatggttgaatgtctttacagtataagagtaaatgaagcaaaattaaggtttcaatgtgtcctgctttaatgtttatatacaataatttatttgtgcctgcaacatttgcctggggtatttaatttttaaaaattttatttttatttaattcctattattctcctatttaaaatatcacttgtaaagaaggtgtacaagataatgttaaaattactttttccttgggtgatatttgaattggaagcattggaataaatgagcaattagaatttatggagaaggtgatggtttcttgatttattaacaaataattttatatgtttttataatttattataaaatttattttatgactaatctatagatgtttatagtattaatactagggatttttttctacattaagaaaagaaataaccaattattcaattatttccagtggtctttttgtgttctgtgtttccaggcgggcacatgaacgccccccaccccatccacataggatgcacccaaactatggtcatgggcatcatattcatgtgcctcagactatgtcctcacatcctcgacaggctccagagaggtctgcctggtcagtatcttctttaatttcaaaacagtgcttcacagcttgtggtaaaactattggaagagatgccttgtgattgattgctttgcagaaggatgatgtggagaaacctaatccccagtttaactgagaca

SEQ ID NO: 14028 - DNA, 2300 bp, Homo sapien
ttctctttggactgtgctaatcctcccactcttctgctcaagactggtgtcacaccttgtttttcattcttaaatcttacatacatcataagatcatttattagatgaatattttttaattaatacacttaaattttatttcagtagcttttgggatataagtggctttctgtgatgtgggtgaattatatagtggtgaattctgagattttagtgtgcccatcacctaggtagtgtatattttatctaatatgtaggtttctatccctgtctccccttccaccctccctcttctgagtctctaaattccattatatcactgtgtttgcctttgtatattcacagcttagctcccacttacaagtgaaaacatacggtttttggttttccactcctgagttacttcacttagaataatggcctctagctccatccaggttgctgcaaaagacattattttgttcctttttattgctgagtagtattccatggtgtatatataccacattttctgtacccactcggtcgatgggcacttaggttggcaattgtgaattgtgctgctgtaaacatacatgtgcaagtgtcttcttcatataatgacttcttttcctttgggtagatacccagtagtggaattgctggaccaaatggtagaactactttttgttctttaaggaatcaccatacttttttccatagaagttgtacattcctaccagcagtgtttaagcattcccttttccccacatccacgcctacactgttttttgactattgttttttgaggttttttttcttttttagacagggtttcaatgtgttgcccaggctggagtactgtggcacaatcatggctcactgcagcctcagactcatgggatcaagggatcctcctgccccaacacacggccccccgccccccgccccccgcccccctcccagtacctgggactacaggtgctcaccactacacccggctaatatttgtatttttgtagagacggggttttgccatgttgcccaggctggtcttgaacacctgggctcaaatgatctgcccaacaggcctcccaaagtgctgggattacaggtgtgagccactgcgcccggcctttttttctgactttttaatgatggccattcttgcaggagtaaggtggtatctccttgtggtattaacttgcatttcttcgatgatcagtgatgttgagcattttttcatgtatttgttggccatttgaatatcttttgagaaatatctattcatgtcctttgcccattttttgatggcattattttctttcttgctgatttgagttccttctagattctggacactaggcctttttccgatgcatagtttgcaaatattttctcttaatctgtggttgtctattatttcttttgatgtgcagaagctttttagtttaattaggtcccatttatgtatttttgtttttgttgcatttgcttttggggtcttagacatgaattctttgcttgggctgattattagacgaacatttattgagcaccaaccatatacgacaaacgatgtactaggtgttgggaatacaatggagaacttacatgaatcaccagtcacacaaatctcttttatctttttttttttttttttgccttacttgagaatttgggtttttgagtaaacgccattattctctctttttttaagcacacttttgcatctcaaccacctaacacactgcatccctgagcaacccggaggggccggttcctgcacccaggccaacacaacttaaaccccaacacaccagaagaggaataaaggccaaccaacttccgcccacccactacaaacgtcgagagaaattcgtagatgaggccttgtcaaaattcagaggcgtcctacgtctgctttcccaatgagacagttcctttttgtttgtctcagagactggggtttttttttttttaaaagactgtaggcagaaaaaacaccccaaccggctgttgtgacaatcaaacgtgtctaagaaaattcagccaatgagagtgcgagagtgcatcttgtgttggccaatgagaacagcgacccgtgcgcagggccgcccaatggggcgcaagcgacgcggtatttgaatcctggaacaaggctacagcgtcgaagatccccagcgctgcgggctcggagagcagtcctaacggcgcctcgtacgctagtgtcctcccttttcagtccgcgtccctccctgggccgggctggcactcttgccttccccgtccctcatggcgctgctccgacgcccgacggt

SEQ ID NO: 14029 - DNA, 2300 bp, Homo sapien
aagcccctggctggctgggacaagcctttgtttttcctcctgattgattgattggcattttacacttgtgtgtaactgggaaccatcgggctctaggtcacaaaacagggactgagttaaacccccacgagtaacaccctcatccatggaaatcacagaccaagcccttagcacctgcatcgtgtgcccagccagtgccaggctcaaggagatgcccaacaaatggtgctgaaataggtaagtgacccacaggggaaggagacttagatctgcgtagagatgctgaaatgctgacactattaagaaaagtttggagaaatagtggtttatcttaaacttatttgtatatatttagaaattcaacatggggactaccagaaaaatctgggataaataacatttccctttttttcctaattaaaaagtcttcagaaaaatgtcttttttccctttaagacactaacctgggtttcctctagtctgtggatctagcctggcctgccattttgttcactgtgcagttaagcaaatatgaccactttaggagtcacttaccaggaaagaacatacagaagatcaaggggccacccccaccttctggaacttgccatcctgtttgaaataaggggtgttcatgtgcacacacagcaacgtgtatagcagtatcaaacacagtataaaaatgtgacatcccttcaaccaaaggttttaagtaaccaggaactaaatgagaaggcctgactgtgtaccctagggtagaggtgttcaagctttagttgtagaagagagagagacagaggtctgtataagggtggtatccactctactgatggccgtctgtgagacagagagaggctgatctgaaactcctgggatcaaacgatcctcctgcctcagcctctcaaagtgctgggattatgggcaagagccaccgtacctggccaactggcttaaagacatgcaaaagggccgtctcttccacagtgttttgtgaaacaatacagagacatgtggagaggacaaagggtgaagccttcttgaataagcttgctccccaaccatgaaggatgccaacccactgacctcccaacgtgtggtcccagcccatcgtaatcaaacctgactccccactactaccaagtccagcccaatgaaggtagaaaagcatcgtgcagtttcctccttaaaggacctgccctgtgtgcacaccatgtccaccaatattctgctggccagagcttagtcatgtggcctcaactcaagggggctggaggtctctgcacagagctgtctcagcagcttacccagagcaccagagtgacagcgggctcctgccaggtggaagtgttcacaaaaatgagtaagagaaaatatggatgtgcctttatgaattacaaactccatgggcttccatagagcatggcttttacataatctaaattccttctctttgcgactccctcctgaactcatccccagaccctccctgagtggagctggtcacaccaagtcagcctgtgcctctagttgctaccatttcttttataggtgttgtcccagttaagatttcactggcagtagggctggattctggtttccagggcaatcaagagcagagcatgaacggtgcgtctttggtagacaatttaactctgtgtttctggcacccctcacttttgtgatcaaaagaaagaccagaggagcctttctgcaattctgccctctttccctgttttgcttttctcccaaggcctagctgattgattgcagttctttctggatttagtaacttggttttattcctacccactaatcttgatgtctttttccctactagatcatacctttccactctgagcaccctttctaacaagaagactggctcagtatggttcactaggtcgcccaaggtcacacagttcttccctgggggagccatcacaggaactctgagtcaaaggcctgtgcgtttttattttcagacagcacctcactttgtcacccagactagagaacagtggtgcgatcatgccttactgcagtctcaaactccagggctcaggtgatcctcccacctcagcctcccaagtagctgggaccacaagcatgtgccaccacattcggctaattatttgtacagatggggtctccctgtgttgcccagctggtctcaaagctctgggctcaagcagtcttcccgccttggcctcccaaaattctgggattacaagcatgagccactgtgcccaaaaggcctgtgcttttaatcattttctccaattcaacagatatttagtaat

SEQ ID NO: 14030 - DNA, 2300 bp, Homo sapien
agttgtccctcccagagttctcaagccatttcttcagtacttcagggactctggttaatgtgggtcttgctaagccattaaccatctttaaaaattcaacgaccatgaagaagagctcaggggcaaagtatcatagaaccagactgttccactcttaaatagtcagaaatggccatcccaatccaaagccagtgggcttatttctccctgataatagtattgaaaggtagaaagcctgaggccctgaaggacctgtagatggcacttggaatttgggggcatgaagtgttagggacataaaagggagagactgatatagagaaaagaaagctattttgagaaaccaaatagattaaatgataatccagacccaatagcatgaaggaacaaaatgctaaccactaaacatcacaggtgttttgttttgtttttgtttttttctttattagagacacagtgttcctatgttgcctggctggagggcagtggctattgacaggagtgatcacagctcagtgcagcctcaaactcctaggatcaagtgatcctcctgccttagcctcctgagtagctgggactataggaacacaccaccacacccagctcataagtttgttttcatattgaaaatttcatcaaacctatatcccctgtcagctatggcaaaacatacttacagctcgctgctctgcataagctcgatgagatccataaaaagcacatcccggttcctttcacaaaagccatccatgtcataggatacctggccaagaatggaaagaaatcgaatttcattgaacaaaatgtaattaattgaacaaaatcatttattgaacaaaaaatctaatttcaccaaacaaaaaaccaaagctgtcatggctaccctcaccacaacatgtggatttccagatgttgcatttgggatttcattgtgcactgtcacaggaaggctgtgcacgtcttacttgttagctgacttagtggggaaggcctgcagatgctgatgagtatctggctgcctggatggcccagctgatccgtaatcagaactccagctctcaagtccccataccccttcttcagtggatccataggggtgtctaagtgacatactcaatacttttcctaaattttagctaagccagagcaaaagtgaagcccctcatgctcagtaattcactgcaatgagccatgtcatctgaggctttgcagtttctcccagaagtggtatcaaagttgcaccaatctggccagaaactcatgctcagatactctgtttaacaagagatcagctgggatgatggatgagaccaggggatttccatagcactaggaagtccccaagaccacgacctcaacttaacttttttatcatcagcagccccacacagcctggcatccagtaggcacccaatactgatgggctttataagaacaccaaaagtgcactctgggccttgatttatactaccagtaggcatggggagacaaggaatgccagtctgtgattccagcaagaggcaagacgaaaatccatttattcagcagctaatacatgtagcagggtgattcattttccaaaaatatgcagtagtatgctgagatttagtgctggagtgactcccagccggcccctaccctgctgaagccccagccgactgtcccagggtgggtcctggccaggactggcaccaaggcagtggaatcctttcaaaataggcctccagcgccatagaccagaaagcaggcgcccaattctgggacactgggagatggtgcaggcagccaccagtacgcaaagcatagagccctatccttcctggcagggtcacggttcagaaaacgtaaccttattttcatctgtagttaacagaagcatgtttcctcagcattcatattaaaaataaaaaactagtaattccagggatctcggttagcctcttaagcatgtcaactattgataatactcttagcaaaactaactccagaaatcacttgctagagaagcagcccttcactgccttagtctgagcacccacggaaagcacgtgtcggagactctggcaaggcccgcgcagccgcagtagagggccagggggcggggcacgcgcacctgccgtagagtgctgaaggtcctgccaacggctctcttggcgtctcaacgttcggatcagcagcttttttccattctctctctccacttcttcagtgagcagccatgagttggactgtgcctgttgtgcgggccagccagagagtgagctcggtgggagcgaatttcctatgcctggggatggccc

SEQ ID NO: 14031 - DNA, 2300 bp, Homo sapien
aggagttgagacaggcaaggtaaattggggccctcctgccaattggaagtttttgagtgatatttttaatatttattattccatcctccttggttggaaagtcacgacggagagggacactgtcatgctcatggtttgtgtttgtatttctggcatggggtagaattggcaactttgctgaattgaacaactgttccccactagaccaaaagtgcccagaggactgaaaaccctccaattcaacttggtggcagcaaggcagccgccagtgaatgagtgattgatgagagccagcggattaaaggagacaactaattgtaaactggaaatagttttcaaagataaaagtagccccctcagataaaaccactagggcttccttttgagttttcttttcacagaacaggatattagtggttcggtggggctcctgcaggagggggtagctgtggagggaagctggtaggctgggaaggtttctacctgtttctcactcctttcctactaacgccccttcaattgagaggctaggtaattataattacctgagatcacacaaccagtcctgacctgtccccacaaggggtggagctactctttccaggtcaaaatggaaaccaaattcaccactatccgttcaaaagctcccaactccgaacaaagagccattgcaatggtgcccacctgggcaccattttggagcctgatatttattatcacatttaggttcacatgccaggtgcccacctggcatggaggcagcagtctgttcgagttctgccacctgaggacacccaggcctgtgaccccaagcgagggcttttctgacgtttgtgggggagtggttaggctgcttttgctgatatgaaagatcactgctagattcatggccaggataagaaggttttccttgttaggtgatacggactttcagaatgtgaaatttcctgaccaaggttgtgtctgttctggtttaaagacgaggatttgctgcctttgtttttccttaagccaacgtgccatccacctgtgctagaggaatctggtattgctctcctccaaaggccaggacggtctcaaaggagacaggctaatggcttaattgttttgtttattctgctccccacaaattccagtagcttcatttacattcagagaacttttttcaactgtattgtcatttcccttggttttgaatggctcttaatgtttgcccttcatgttgttttgaaaggttgatcgagccgttagtgaagggtgtggctttctccaaatgggggtttttcttagtgtgtggtagagaaagtgagagtaattttaaaaataaaatatgcacattttttctatctgtacacacaaactctagattattttggagcctatttatgttcacatgctttaggttttgggagttaaaagattaatgtgtacaagggaatggtgatatttaacaggacaaaaatttcgcttttacagagctgtggtttgcttttcaaaatgtagaggtttctttacctttgcgtttttttctttctttgtttttttttttttttgagacggagttttgctcttgttgctcaagctggggtgcaatggcatgatttcagctcactgcatcctccacctcctgggttcaagtgattcttctgcctcagccttccgagtagctgggattacaggcgtgcgccaccacacccggctatttttttgtatttttagtagaaacggggtttctccatgttagccagatggtcttgaactcctgacctcaggtaatccacccgcctcagcctcccaaagtgctgagattacaggtgtgagccaccgcacctggcctgtttcttcacctttgacaaagaatccagtataagactattctggttcgtgttgtaaatggatttttttttcttttttttcttttcttttcttttcttttctttttttttttttttttgagacagggtctctatctgtcacccaggctggagtacagtggtgccatcacagctcactgcagccttaaactcctggggtcaagcaatcctcttacctcagcctcccaagtagctgggactacaggcgcgcaccactacacctggcttaaatgcatttttataattttagtataaacaagacattttagattgaataactttgtaatgtgctaggacagtagtttttaatgcaggtgggatccaacttttgagaaagggaaatgtgaaggttgaagaaacttaaaaatcaactgccgttggctagatctaggtgtgctgacttccttagaaaagaaatgcttcctt

SEQ ID NO: 14032 - DNA, 2300 bp, Homo sapien
tttccctatgagatatggagtcagacttatctgagactttatcatgtctgtgtgtacctaggcaatgcctagtacagatggcatgctgttttctttccaattcatactacataactatgtcagatgaatttcctgccctaaactatagctccaaatatggcagttccttgcacaaaactactgtcgcatttcattatgcttgcttctttcctgtatttattctttctaaaaatttatcgtttgttttccccatcctaaaattgtaagctcagtgagggcagggaccagttgtagctccagtgtttagctgtgctgtcttataacacacattcgattatattgttgccaaactatgtaaatgattactacaagaatttggacaatatgattttctttcaacttttaaaagtgagatataatgaacgtaccataagactcacccatttaaaaagcataacacagtggtttttagtatattcataaacttgtacaatcatcaccactaattccagaatattttcatcacttcaataggaaaatgcatacctgttagcaattacttccatctcccctctcccccagcccctagcaaaccactaacctactttttatctctatagatttccctatcctcaactttcatttaaatggaattatataatatgtggtcttttgctcctggcttaacacgatattttcgagattcatccatgttgtaacattttgtttacccttttagacaagataaagtttaataccctttctaactctatgctcagatagtcaagtgaagagctacaaccaaatttctttttcctttcttcctttcttctctctctctctctttctttctttccttctttttttttttgacagaatcttgctctgtcgcccaggctggagtagagtggaacgatcccggctccctgcgacctccgcctcccctgtttaaacgattctcgtgcctcagcctcccgagtagctgagattacaggcatgtataaccatgccgggctaatttttgtatttttagtagagaaggggtttcaccgtgttggtggccaggctggtctcaaactcctgacctcacgtgatccaccaacctcagcctcccaaagtgctgggattgtaggcgtgagccacagcgccctgcctcaaccaaatttcagaaagtatcataatatcattatgcttcatagtttctctatgccctgaagtttaccaattttatcttctacagattccaggaaggcagcctgttaagactcaccaaatttacttcctcagcctccagaacaataaaatcaaactccctaccttgattttaagattctgcttccccccaccccgccccaccccaatcttctccttggatattcgacagtctggaataatgcatttttacagttctgattgttttcagcagatgtgttggctgaggttggatggggtttcttcccacctatctctcctctctccttccctctgcccactgcacgtgcaacaacttttctgccatcaaaacgtgcaaaaaagaaacaagaaagaaaggaaagagaaagaaaagaaaaacagaaaaaagaaaagaaaaagcagccggaagtcttcctttgttttccaaggaaattcaggtaaaaggaggggtggggaaatgatatttttgactttgctcacaatccagacgtaggaaagaaaaaggatttcctttgggctgctgccacgactctgatgttttatgctgataaaatatttccttcttaaaaaaaagttctgggaaaatcatgccccttcaacttggaagcgaaacccaccctaactttcgtcttaaaacgcagcgaagtgaaaggtttgctcctctttcacgagggttttgttccttacagttcgggtcttgctaccaggagcgagctgggtccgcagcgttcttcggtggctggcgcgggaggaggactacaggatccagagatctttggaaactccagcagctccaagcttgttggctactacggtttccctgaggagtgacgctacgaaaacaaaccctgattggtcaggcctgagctgagttctccatttatggacagattgcccggcccgagccgagactcagccagaggagtacggattaagtggccgaagaaagaggagtgaggcaggggagcgaggcggacgctccgagcgcatcggactcacctgggccggcggcgaccggcgagtacgagtggactcttgccctccgcagcatgcgccccgcctgctaagtcgccgccgtctcgccctcacctagcaccgccaatccc

SEQ ID NO: 14033 - DNA, 2300 bp, Homo sapien
tgttttgaaataattattaatacaattatttgtcttatttgctaactgttatgatttttaaaaaggaaatgaaagtcagcctaaatagaaggtgcctacatatggcaagagcccctcaccttccaggtcctctccttccctacctttgagagtgagggagtcttgcagcaaatgaaaaatcaaagttcagttttgatggccagaagtaagaaggcacttcctctgttttataggtgttccattctgaggaatattaggatctactatcactctcctaggaagccaggaaggggtgccttgaggctctggcacctcaagtagtagagggagtagggtcagtattggggtgggcggggaaagggtagagtaataagaagaggaagaaacaagacagaggggacgttatgtgtccatctgagatgctctccatatgcactgaaaggcaccccgatggagacaggcaagaaatattttgaacctttttctagactcttggtgatggactctaggtttgaatgggtactttctgctaacacatgcacacctttccagatgttgtggccagttacagccagaaggtcactgggaagcagagtgacagtgtcatcaccatgacataggatccaattcaatatgtatttacctagtacataccatgcaccaggcagtgggaatctaaccgagaaaggaaagaataatcattgagcttttgcagcactaaagagatgctgttataccagatctacacatcacaagactcaaggccattactctcctggtcacaacggcagtgttaacatgtgtctgtgattatttgatgaatgctcgtcaggctctaagctctgtgggatcagaaagtgatgtgtctctttttcatcttcaccattgtgtctcagggctaagcatagtttctagcacttggcagccatccaatagatactgttggctgaatgaatgttacagatgcgttagcgctttgtggaagttattagcccgttttactggtgaggaaacagtcgcagaatacccacaaatatttcaaagatcacacacaaataacagtccttaatactaatagcccctaaataataatgctgccggagagagaattccaaaaccgctcagccgaatccacagttcgggctcttctaccatgtcgggctccttcccctgggttggaagggctcaggctggggcggggtgggggagacagacaggagcccctgtgctgggtaagtaccagtatctgcgaaggaggcacgaaccagatgaggcaaaggtcgtgtcccccgcaactccgctgaaatcctgcccaccgagaggaagcacaattatgagtgaatgggcttgtgcgtcctgatgagaatccaaaatcgagaggaaggtggaaagagccaggacgcgctgggaggggatgaagctgacgggagaagaaagggctgggaagaggaggggtgttcggggttcttcttctcgtcgtgtctgctgcgatgagacacgatcctgggtcccaactgcaggtgtcaaggcgattcagtaaatgacacatggcagccccggagggttcgttcacctgcacaggtggggcgtcaccgtggcctaatcaaataacttctccccaatttgaggtggggcgggggagagaactatttttgtgggaaagcggtttagtaaataaggtatattggggctctagagagaattgcagtgccaccaccatggctatgatctccgtcaggcaccatttcaacacctctccaaatcaaccatccctacaacaggatttattttccaatgagcgaaatccccgcccgccaactccaaggcgcttggatgcgagctctgtgggaaacagcagcgacgagcagaggctattttgggtgtgggaacgaggagggaggaggggcggcgccgccaggctgggcgcgggtgcgcggggaaagcctccagctcgggctgccacggcaaccgcgtccaggcaacgcgcccggaagcggctccggcggcgcgcggcggctcgcgccccccgggagccgcgaacccggccgggccgcgcgccgggccaggcggcaggcgcgcgctgattggacggcgctccccgcggcgcgggcccgcagccgggcgccctgctcagccagcgccagcggccgccgcacccagccgcgccggcgaggacatgggcagccgcggcgcgcccaccccccgcgccggtgagtgccgcgctctgggaaccccggccgggcggcctctggggctgggcggcgggagctctctgggacggccggtgaccttggggcagc

SEQ ID NO: 14034 - DNA, 2300 bp, Homo sapien
ccctcaaggagcttgtgacaccacagtgaagacaagtctattttggtgagtttgtggagacaggagatagaacaagcatggccgtggctgccctttgcttccgtggtgctgagcagcagcaggggcagctgtgagcaggcagctggtcttggcaggaagcagagcaccacccaaagactggagtgaggaaataaggccgcctttacaatttggcaaatgactggccttgggaatgtgagtagagagagagtagcaaattaagattatctcacctgagaagattcagaagtttcctctgcattttgtgaataagcagtgtgggcctgcctgcctgcctgcctgcctgcctgcctgcctgcctgcctgcctgcctgccttccttccttccttccttccttccttccttccttccttccttccttccttccttccttccctccctccctccctccttccttcactccttccttccttcctgtgaataagcagtgtggggcttgcttgcttgctttgagtaagtagtgtgggctttctttctttccttctttctctttctttttctctttctctctccctcctccctccctcctccctccctcctccctccctccttcattccctccatccatccctccctccttccttccctccctccttccttccctccctccttccttctctccctccctccttccgtccctccttccttccctccttccttccctccttccttccctccttccttccctccctccttccctccctccttccctccctccttccttccctccctccatccctccctccttccctctctccatccctccctccttccttccttccctccctctttccttccctccttccctctttccctccttccttccttccctctctccctccttctttccttccctctctccctccttccctccttacctccctccttccttcctttcctcctttcttttcttccttttctcttcttctctttctctctccccctccctccttccctccccctccctccttccctcccccttcctccttccctccccttctctccctccccctcccctctgcctccccctcccctctgcctccccctcccctctgcctccccctccccctccccctcccctcccctccccctcccctccccctcccctcccctccccctcccctccccctcccctccccctcccctccccctccccctcccctcaccctccccctcccctcgccctccccctcccctcgccctccccctccccttctcctccccctccccttctcctccccctccccttctcctccccctccccttctcctccccctccccttctcctcccctccccctcccctcccctccccctttcttctttccctcccctccccctttcttctttccctccccttcccctttcctctttccctccccttcccctttcctctttccttcctttcttttctctcctctctctttctctttctctctctctctctttcttttcctctttaatctcttttctcttttcttctttaatctcttttctcttccactccaggccatgtgaagtgcatccaggagggctgtctagagcaagggggaactttgagtgcagagaggatgtggagctctaaggaggaacctacaggctgtccctgtctttcagcaaattgcatccagtctgagcttcactttgcaaccctgattagaaaccagtttgatcacactgggtctttcaaccgtttgtctgtggctagagttcataacttcatctttgttaagagcccactacctagaacatttatttaatgttagagctcaaaacaccctacctcccctctcctcatcttctttagtgccttcagtctttttcaaaccctagctccagcctaataagtaacacattaactgggttttcctatttatctatcctctcgcattacttctctgagtcagagcctcttctctctaagtcacgggaactgcccttgctacttgtgacctgccctttactcagcagtttttgttctgggaagccctgggattctgctaatacctatcactgtaggtgctgaagggaaacagatgaagaacatgacctcaaggagcttcctgtcaatgagaagaccaagctgacgcctggcaaaggtaaatgccaccataacaaattaagtaaaagtgtgcattagctaatttgtaaattcagcttaagatgaatcctgcttcttgggcccttctctgacgctggtgttgggactgtaggattcctcgagcctccgtcaaggttaac

SEQ ID NO: 14035 - DNA, 2300 bp, Homo sapien
atggttatttcttgatgatacgctaaacaaggggtgggttattcatgcctcccccttttagatcaaatagggtatcttcctgttgttgccatggtatttgtaaattgtcatggcactgggggcagtgtagcagtgaggaggacaggaggtcactctcgtcaccatcttggttttggtgggttttagctggcttctttactacaatctgttttatcagcaagattgttatgacctgtatcttgggcctatctcctctatctcatcctgtgatttagaatgccttaaccatctgctaatgcagcccagtaggtctcagcctcattttacccagcccttattcaagatggagttgctctggttcaagcacctctgacaaccctacatgactttcttgtctttgctgtggcttcatctaagtcagaggccggtgggcagaggaccaaaaaataaaatacctaaattctctgcgctgaaaatcttggaggtgtgtgcatgtaaacaatttgtgcaccaagaaggcaactctgactcatctccattattgcctcattatcttcaggagaaatccacccttctcaactctactttgtaatgctggaggttattcatgcctcttgcaaaccacgtttctgcttaaactctgccaataaagggcactggagggagacagccggctggaggagggacttcctgtttgcttcctatctgcttcctggttctgtgagcatcaccatgtcaacgcctatttatgtctcagtggctgttcctttgtgtagctgcactaaattcagtttacagtagctatcggcaaagatttcatttgcctcctgagaggtctggatctcagcccagagggccctcctgtgagctcagagacctcagcatttgttgagtggtcaccactcttcagagccatgagtttcagcttcttcggtgtctctccacccaaaatttcaatttaataattttcagttcctcccttaattccctcaatctaggagtggtagctatgtccaacaattgctagtgccttaatagtgactccttccccaacactttatatcttaactttatacctagttgagttctttatattaaatttgccctgttcaggctgggcgtggtggctcactcctgtaatcccagcactttgggaggccgaggtgggaggatcacttgagcccaggaatttgagatgagcgtgggcaacatagcaagacctcatctctactttaaaaaaaaaaaaaaaattatctccgcatggtggtgtgtgcctgtggtcccagctactcaggatgctggggcaggaggatggcttgagcccaggaggacaaggctgcattgagccgtaatcacaccactgcactccagcctgggcgacagagccagatactttgtaaaaacaacaaaaaacttgctctgttcagatatttggttaggagtgttgctttttaggaggagcagttgggggccgggttggggagaagctaacaatgtcagcagctttgaagaaggcattttgtaatctataccatggccaaaaccaccccatggggctctcactgaagtccaacagcccatagtgtaatccattccttagactgccaacagctctagactcatagacattagtgagggagctctacaaactggaaccctgtgggtatttctacaacttacagattattaatagtcgtgcaaagacaggcaaatggatgttttctggtggggtaccgggagggagcagttgcatttgaagaatgaactatggatttcattgatgtgctttttttaaagaaaagtaaaataacaaaagaaaaatccttgaagagtatttttattcccacctcttgtaatgttcagggaacatgagtgacatttggactcccaaacaaaagaagggaggggcatatctctctgtttctatggttcctcgttgagggaaaaaggctttcaagttcttgcgtgagcactgacaggcttttatgaatagttggtgacacaggtacaaactgggctgttctggctgaaatatctgtttgccttgtcggatattgccagcattcttcctgcctcactgacctccctgaatgacttgggcttgagaatgtttctgcatgatttctctgagcttgctgtcttacctgagagcaggaagtcaaaaggagagtgatggagccacctgctgccctctactttgcagatattaaagaggagcctgaaactgttccttggacatcttatgaatgtcagaaaataccttttggagggttagaagatcaggggacatggttgttcac

SEQ ID NO: 14036 - DNA, 2300 bp, Homo sapien
aatgtccgtttaacagttgcttgtttatttgtgtaaacctagctagtaaatattgatgatgttcagggccactgacttgcacagcccttggagcactattcacacagaacacaattcagagtttgttaagacattaacacactttgatatctattccaaaaatacttttgttaccacaggttcattgctgtcatttagacaaaattaatgtactgtgatattttcctactcttaagatgatgttgcccagccgagtactgtcagaaattcagttctgatgtctgtgtgtgcaagatattaatgtggtccctgtaagaaataccagagttggtcatgatttactaaggagatgtaatattttctttgacctgttaggaatataacttgtgtcttgatttgttgcacatcatattttttgcaacattaatgaatttaaataaattaattggaacgttcgtctttgtctttttatcacatttttctttcattatgctactaaatttttgctttgaattatcctataaacctcttaaataatttcagacctttacacttgtttccctttctatagtctaagtgcttctattctttggggattagagagttcagcctgctttattttaacatcaaaacaataatgaaactttgtgtttcatagttgagatttttttttaattaatggggaatccaaggatgaaaccatgagtggcttaaaatgaaaacatggctttttttttttttttttttttttgagacagtttcgctcttgttgcccaggctggagtgcaatggcgccatcttggctcaccgcaacctccgcctcccaggttcaagcaattctcctgcctccgcctcccgagtagctgggattacaggcatgcaccaacacgcccagcgaaattttttttgtattttagtagagacggggtttctccacgttgaggctggtctcgaattcctgacctcaggtgattcgctcacctcggcctcccaaagtgctgggattacaggcatgagccaccgcccctggccgaaaacatggcttaaataagaagaacttgtttagttcatagacctgctcagaggttccagctgataccacttggtgttttttgtggttttgttgttgttgttttgcacatactctttaatcactattcagctattttgtaggataaactgctctacacatgactgctgggtttaagccagttagtgtaccatgcaccctgacacctaaaacaatttgtgattttgcaaacttgaaatttatagtgaagtatttatcttgcatattagatgcaaattttaaatataacttctcccaaattaaagttcttcatgaactggtcacaaactaaaaactttgcctgcagccctgtttcgaggggtaaagaagataccctgcttaccctgctataatttttttttttttttttttttttgagacggagtttcgctcttgtttcccaggctggagtgcaatggcgcgatctcagctgactgcaacctccgcctcccaggtacaagccattctcctgtctcagcctcccaagtagctcgaattacaggcatgcgccaccacgcctgcctaattttttgtatttagtagagacaggatttcaccatattatgctggtcgcgaactcctgacctccggtgatcgacccgcctcagcctcccaaagtgctgggattaaggcgtgcgccaccgcgcccggcccctgctataatcttttcagaattcgtctgcaaggtcttcaacactgttaccctgaacacacttccggcatgaaatatgaatgccctacatttcttaaattgtgcatctaacaatggagaagattagtctctaaaaattataattcccttaggaacgatttagtaaacctggtgaattactcgagcagagcgcctgtccaccactttaaggcttcaagctccagcccgacgcccctccttccctctccacgcccttccctgacaaggcttgagtggcgggcgagagcagggctgggcggggcctcccgtccctcgggcggggtgtcacttccaggttccgcgagcacttccgggtcgtcagctcagttctgcggtttctgcggcggctggagaggtggtcggagaagtaggaacctcctgccgggctcgtggcggcttctgtccgctccgcggagggaagcgccttccccacaggtagtgggttagggagggcagggttagggagggaagcagggccgcgctccctgccgcccccccggagtcggagtgcgttggtggggtagtctctgagggcccttc

SEQ ID NO: 14037 - DNA, 2300 bp, Homo sapien
gccaccctgtggggaattctgcacattgcagaactgaagaagcaaagtatgaaactacaaaaacttctgtaaatcaagatgaaatttcttggcccaagtagttgtttagctaaagctctgttgatcagttttgttttctctactagctatttagtgaaattgctagactaggataaaaagaatacctaatacttaaatgtgattacaatatgacaaccaaggtcctaatacatatatatgaattcatctcacaaaaaccctataaggtaggtactattttcttcccattttatcaaagagacggactttaatctaccaatggtgggtaaatgttgccaaagcaatgtgaaatccaggcagaatgctgcatttttagtcaatgatttaaaattttgagcttttctgttcccctcaggcctgatcgtaccccaatggaatcacccaaatacttgatgctgagcctttctatggatttatcagatgaaactttggaaagggacttttttttttttttaagacagggtttcgctgtcacccaggctggagtggagtggcgcgatcttggctcactacaaccgccgcctgccaggctccagagagtctcccacctcagcctcccaagtggctgggaccacaggtgcatgccaccaagcccacctaattttcttcttttctttctttcttcctttctttctctttgcttctttttctttctttctttctctgtctctttttttttttttttttttaagagatggggtctcgccatgttgccctgaggtctggcgatctaccgactcggcctctcaaagtgctgggattacagtcatgagccagcacgcccaactgagagagactatgatgttctccaaacaaatctcatttggttgaaactctacagctgagtatggtctaatttgagtagtttaccttgagtactctaaccatggtctatagacctgggctcttctgagaactgtttgcaaatggttcacagagagagagtagaaaactctatgtcaattttgcaggtaattttatggctgttaactctaacgataaaaagttttgacttggactttgtatgtcttttcatttttctgttttattaacttgtcaaaaactaattgaaaattgaaaaaaataaaccgaccgttcccccagtgaagagaagcactgctgtaaagcttttcacactcaaatattaccaaactctaaggtcgcttctgaggcctaactccccaaaatgatgcctcggatatttttcctcgccttatttcttttttttctttttctttttttttttttttcctttttccttttatttgagacggagtttttgctctgttgcccaagctggagtgcaatggcacgatctcggctcactgcaaactccaactccgcctccgcctccgccctcgcctcctgagtagttgggattacagacgcgcgccaccacgcccagctaatttttgtttgtttagtagagacgaggtgtcaccatgttggccaggctggtctcgagctcttgacctccggtaatccacccgcctcgccctcccaaagtgctgggattacaagcgtaaaccaccgcgcccgacctcctccccttatttcatccattttataattcacattattgatcgctgataattgcacctattgtaatgatactgataattgcacctgttgtaataatattgatattgataattgcacctattgtattacaatattattattgatatcgataatttcacctactgtaatgatcaataaaggcaggcagaaagaaaacaaaagtaactgaaactaccaggcagcgtccctgcgaacagcaaagagggaagaaacgccttgaggcgtagtaacgccaccaataaggagtcgacgcgacgggtccgcccacaggcaaggaaggccgaccccgcgagtgcaggcgcgagcgctagcccgtgacgtctgagggggttggggggatgctgtgtgggtttcaagaagacgccacgcctccgccgccgccacgcccccgccgcctccaccgccggctgccgcgcccggaggaggtcgggatgttatcacttccgccggggcttctcactgtgtccgggtcagctgctgccgccgacgccgtaccgctgcggccgggggattgggccggggtctccaccgccgaccgaggggagcgggctccgctcggccctgctttttgcgacctggccgtcagccccacgtcgccggcctggaggggcgaagaggacgagggggccaaggcttcctccggggtgagtgcggcctgg

SEQ ID NO: 14038 - DNA, 2300 bp, Homo sapien
ttctgtgtgggctgtaagtattgagtttttaacaacgcagtaaaatgaatgtcttttaaaaaccttaaaggtcggagaatgtgcagaaacccgtgggaactcctggtgtgtacttatagagtgcgtgcatgcaggcggggtcgactcactatttatttcatagcaatttgatgatgatgatgatgacggcagcgacgacgatgaggataatgataataataataatgattcatttaacccttccaaggcgaatccgaaccgaagggagcctgctgctcgcaccaggcggagtgacccaaggcacattccccgctccccaagaaggaaaactctatggttctttccccaagttgtagaagatactgctgtcttagtgggatcgcaggcggcttttgctacactctaaatcctaaataagttctccataccaaaaaaagcggcagttgggggatggggggtgggaggttgggggggtgggagggctgggaaggggagttccgggtgtaaaatgaaaacttccaggatgtgcctgagtcctaaagtttcaaaccacctgggaaaagcgagagcccctgaggcttacctggtgataaactgtgtcaaacaaactcaggccctccccaggtccgcacaacatttgccccaacagctcctgagcctccatcctgtgtccaaccaaattcccggaggacttttaaagcaaatacctggactcttcgcccagatacactattttaatttttaaaaatttggtcaatacagttacattcaaaatgggttcttacatggggatgtccaatcacattttgaaagtatttgtaaaccccatcactttttcaaagctacacactaactatacaaagctgaagcagctgcataggaaagtcaagtcaaatttcgacctaactctccggggactggggggcaagggtgtgttttcattattataacccatgcaaccaaccccgggtagtgctaagcgcaggaaaagggtcggcttcaggggaaagccgtgcctaaagttacctaacgatacaaaccggatacaacgcagaggaaacagaataccccagccaagcaatttccatgtcaaacatcatccgcgcggctgctccatctgtgaacgtgagtggtcgcctggctccctcttccgcggcggccgcttcctcataccttcacacggcgcacaccggccggcgcgtccagctgcctgcccagtggccgaggctcttccccctcgcccagtcttgagctggaagtgattcctattggccaaggtgtccatgtaaataggtgtgaaagaaaccagagctggccgggctctcccttctcgctcagtcccctccctctgcagcccccgctccccctcctcttcctcctcctcccaaggcgattgtcatatgatagctaagaagtggcacattaatgaagcgccgctacaggggtcttttctgctcctgtcaccgcttaaaactatcagatggttcgagggaggacatggaggcagccacctagctcagcggagacgcggagcccacagcagcgccctccggagccctaacacgtcgctgccaccatccgcgccgggactccgcagccgagctcggccgcccgcaggacgctccaggagcgtcgcggaccgggcggcacgggacgctgcggggctgagctcaagagcccaggttcgcgccgagtccaaccggacccggacgctgcgcgcggagtgcgcgtcgagtgcgcgccgagagagaagcggcgcgcagcggcgtcctcccggatgcggacgcgcaacttgaagcaactttaaggtgagcagctctctgttccgtccctgccccctattctggccccagtaccgacttacttcccggctatcctcgcgccgttcgccggcttcccctcccgcgcccactaagcccgcaaagttgctggcgaaagagtccgggcgctggctgatcgagcgccgcaggccccacccccgacccccgaagtctgttactcggtctggctgaccccgccggtgtctctgtgcatccatgctacctttccctattacccacccccttcccagatccgagcagtccgccggcccgcgcggacccagagcaagaagagggcgaggaagaagatgcctcggcccggccgcaacacgtacagcgaccagaagccgccctactcgtacatctcgctgaccgctatggccatccagagctctcccgagaagatgctgccgctgagcgagatctacaagttcatcatggaccgcttcccctactacagggagaacacgcagcgctggc

SEQ ID NO: 14039 - DNA, 2300 bp, Homo sapien
gcagctctactctgttttctttattcttggggtgattatgttgatgacctgtcttgtctctgttgagataaatttaccaccaattgagcactccttattggcagggattgggtgtatcaattccgagaactgtatgattgcaaaggtggaaagccaattcatcaggctattgttttgctgccccattaagtatattaactggaagatgacttcatttcaaccatttcaaatcttaaatacaacagattcagtcctttatggaatgagttaaggtcagaaaatctgtccatcgtctttctcataaatactttaatatcttccaagtatcattggactaagaaagtaattatgggtaataataaagattccaattaagaattagggcaacatgaaaatgctactaatttcgattcacatcgtagctttcaggtccttctcaatatgtttaattacttgtgagaaatacagaagtagtggctggttcggcaagcccatcaccttttatgagaagtagaagactcagttttatcctgtctgaacaggttgcattagccatggggaacattttgtttttgcattcacacatcagtctccccaggttctgtttacacagaggaagagaaagactggctagtttagtagtccatcccaacccaaggcagaccatctctgaggtttagtttttacagtcgtaagatgggaattgcatctgtttgcaaaaactactccaatatcgtcagatgaaatggtccaaggagtagaaattagcataatgaatcgctgtgcttcagagtaaaggagagcctcttcataaagactttttgttgtactttttttccagcttccttcaaaatgtctactgttcacgaaatcctgtgcaagctcagcttggagggtgatgtaagtatatcactttcactttatataatttttgcaagttggacatctctctggataaccatattactctctatccttgtacatctaaggaagatggggacaattcagacagtcatcatttggttctcctctttcttaatacttcagctgttcctagtagttcaatttgaaggaaatatcatggcactggaaacttttcttggcctcacattaaaattggacagaattagtgacactggaatggctggaattttattctgccatacttagcatgtcattggtaataactgttatgatggtacatgacttttaatgtcatgtcctgggattttattactggttggcataagccacagccatatcaaaactaattctgcatcttttggatttcttacagtgtccaggaagttattccagatgaagacttatacttttattttatttattaatttattcattttttgagatggagtctcactctgttgccaggctggagtgcagtggcgtgatctcggctcactgcaacctccacctcctgggttcaagcaattctcctgcctcagcctccccagtagctgggactacaggtgtgcaccactacacccagctaatttttgtatttttagttgagactgggtttcaccatgttggccaggatggttttgatctcttgacttcgtgatctgcctgccttggcctcccaaagtgctgggattacaggtgggagccaccatgcctggctcgaggacctatactttaaaaaatttcacacctggaaaatattttctctaaaaaagctaggatatttcttttaaaaaaccaagaatataatgaaattattgtaattcatctgtttcctttttttctgtggctattagggaatttagaactaaactgaattttctttcataggaaatatgtgaacctagaaattctgttgcatttgtttcttttttttacaaataaaaaatttaagctatatgtgaagttaaaattatttcaaatacttttagaatcaagtggaatataaattatgaatatgtaaaatagctaatggtactatacatcttccaggtcatcctggcagaaatggcttttacgcagactcagcactgatactggtttgtagccatatccgacagatctttcaaaatattctttgattgaaattaaaatgcaatgaatcactcaacagagggttgacagtgacttgggtcacatggtgcaagaccctctgtattgttcatggtacttgccatcaaaatgttcaaattaatggagcctgtgaaagcacaggttgtatggagtataaagcctatagagtttttttaaaatcttttttcttcttgaaacgtgtgcatgctgtttttgggaacaatacaaactgcatgttgaagtca

SEQ ID NO: 14040 - DNA, 2300 bp, Homo sapien
gacggagttttgctcttgttgcccaggctggagtgcagtggtgtgatcttggctcactgctacctctgccttctggtttcaagctattctcctgtctcagcctcccgagtagttgggattacaggcgcccgcccccacgcccagctaatttttgtatttttagtagagatggggtttcaccatgttggccaggctggtctctatctcctgacctcgtgatctgcctgcctcggcctcccacagtgctgggattacaggtgtgagccaccgcacccggccgattgtcttcatttttaggaaagttttaggttcatggcaaagttgaatagaaaatacaaagaatgcccatgttcccctgttcccacatacgcatagcttccactgtcaacatcccgtatcagggtggtacatttgttagaactgatgaacctacattgacacatcgttaccactcaaagtccatcgtttacattagcattcactgttggtgttgtacatagatgcatccaccattacaatatcagatagaatcatttcattgccttaataatcccctcccctgaatccctgatctttttgctgtccccataattttgccttttccagaatggtatgaagttggaactatacactgtattaccttttcagttggcttctttcactcagcaatgtgcaatttaggttcctctgtgtcttttcatggcttgatggctcatttcttttcagtgctgaataatattccatgtctgaatgtaccacagtttatttctagagcaatactttttacaaaccagaattataccccaacggtgggacaaattggggtggggaggctgtctgagagttgtgagtgtgggggaagtggaaggtctttgactgacttttcgctgtgcataaaaagcttctgtgagcatcaagaagagagtagtggtctgggggagagcccaggatgagaatcttgcaaaaatacatccttcaccacaactaaaggcgaatcctctcctcttacatttccccactttcttcccacaccaggcctgggatctgcttagtccaaaatgttcctataagttagcaaatatctatgtcacatactctcgccaaaccagttttatgaaaatatttagactaaacaaagtgaagagaatagaaagctgtatttgcatgtgtgcagtttccttgatcaaagaatattaagcaaaaagagaccaaagcaggagtcactgcaatttaaatgtcgttcctgtctatttcaggacgcagctctactctgttttctttattcttggggtgattatgttgatgacctgtcttgtctctgttgagataaatttaccaccaattgagcactccttattggcagggattgggtgtatcaattccgagaactgtatgattgcaaaggtggaaagccaattcatcaggctattgttttgctgccccattaagtatattaactggaagatgacttcatttcaaccatttcaaatcttaaatacaacagattcagtcctttatggaatgagttaaggtcagaaaatctgtccatcgtctttctcataaatactttaatatcttccaagtatcattggactaagaaagtaattatgggtaataataaagattccaattaagaattagggcaacatgaaaatgctactaatttcgattcacatcgtagctttcaggtccttctcaatatgtttaattacttgtgagaaatacagaagtagtggctggttcggcaagcccatcaccttttatgagaagtagaagactcagttttatcctgtctgaacaggttgcattagccatggggaacattttgtttttgcattcacacatcagtctccccaggttctgtttacacagaggaagagaaagactggctagtttagtagtccatcccaacccaaggcagaccatctctgaggtttagtttttacagtcgtaagatgggaattgcatctgtttgcaaaaactactccaatatcgtcagatgaaatggtccaaggagtagaaattagcataatgaatcgctgtgcttcagagtaaaggagagcctcttcataaagactttttgttgtactttttttccagcttccttcaaaatgtctactgttcacgaaatcctgtgcaagctcagcttggagggtgatgtaagtatatcactttcactttatataatttttgcaagttggacatctctctggataaccatattactctctatccttgtacatctaaggaagatggggacaattcagacagtcatcatttggttctcctctttcttaata

SEQ ID NO: 14041 - DNA, 2300 bp, Homo sapien
tatggtagagactagaattctgcacagcagatgacaacagtttatcccctgctgcagacctggtccagttctgactgagtccaggggtgatagttaaggccagggcttgggtggtttgatgtccatcctaggagtttcacctctgcttcggtaattctcgggctgagggatactgatgagaccctctagaatgtttcttggtccatgttgaagttagagatttcttgctctgtcaagaagactgtcagcctgggcaaggtaacgcgacattatctctactggaaaaaaaaaagccaggtgtagtggcacacgcctgtagtcccagctacttgggaggctgaggcaggaggatctcttgagtcctggagatcaaggctgcagtgagctatgattgcaccactgcactccagcctgggtaacagagagagaaaccctgtctcagacaaaaaaaaaaaaaaaaaaggtctaggtgtggtggctaacccctgtaatctcagtgctttggtaggctaaggcggagggattgcttgagcccaggaattcaagaccagcctgggcaacacagtgggaccttgtctctactgaaacattaaaaaaaaaaggaaaaaaaatggaaaaaggaaaaaggaaattaaatggaaataagatatattcaacatatcatagttgtaattgtaatatatgatcaatatataaattattgggctggacacagtggtttatgcccgtaatctcagtgcttggatcacttgaggctaggagttcgagaccagcctgggcaacatagcaagaccctgcctttaccaagaaagaaattataaatgagaaattttatataattttttcatactatgtcttcaaaattcagaatgtcctttacacttatagcacatctcagtttgaactgaccacatttcagatgctttgtagccacatgaggctggtggctactgtattggacggttctgctacagagcaagactattctaaattgtctttttttttttttgagacggagttttgctcttgttgcccaggctggagtgcagtggtgtgatcttggctcactgctacctctgccttctggtttcaagctattctcctgtctcagcctcccgagtagttgggattacaggcgcccgcccccacgcccagctaatttttgtatttttagtagagatggggtttcaccatgttggccaggctggtctctatctcctgacctcgtgatctgcctgcctcggcctcccacagtgctgggattacaggtgtgagccaccgcacccggccgattgtcttcatttttaggaaagttttaggttcatggcaaagttgaatagaaaatacaaagaatgcccatgttcccctgttcccacatacgcatagcttccactgtcaacatcccgtatcagggtggtacatttgttagaactgatgaacctacattgacacatcgttaccactcaaagtccatcgtttacattagcattcactgttggtgttgtacatagatgcatccaccattacaatatcagatagaatcatttcattgccttaataatcccctcccctgaatccctgatctttttgctgtccccataattttgccttttccagaatggtatgaagttggaactatacactgtattaccttttcagttggcttctttcactcagcaatgtgcaatttaggttcctctgtgtcttttcatggcttgatggctcatttcttttcagtgctgaataatattccatgtctgaatgtaccacagtttatttctagagcaatactttttacaaaccagaattataccccaacggtgggacaaattggggtggggaggctgtctgagagttgtgagtgtgggggaagtggaaggtctttgactgacttttcgctgtgcataaaaagcttctgtgagcatcaagaagagagtagtggtctgggggagagcccaggatgagaatcttgcaaaaatacatccttcaccacaactaaaggcgaatcctctcctcttacatttccccactttcttcccacaccaggcctgggatctgcttagtccaaaatgttcctataagttagcaaatatctatgtcacatactctcgccaaaccagttttatgaaaatatttagactaaacaaagtgaagagaatagaaagctgtatttgcatgtgtgcagtttccttgatcaaagaatattaagcaaaaagagaccaaagcaggagtcactgcaatttaaatgtcgttcctgtctatttcaggacgcagctctactctgttttctttattcttgg

SEQ ID NO: 14042 - DNA, 2300 bp, Homo sapien
ggtgattgtacaaatctatagaagttagaatttgtggcatgcccaagatgagcacaaaactcttttggacatttgatggcttttatatattccacatgatttgaattaaattttatcttctgtaaagggcctatcacagcacgattaggagtaagagactgtggaacctatcttgagatacacagaagggaggctgaatcgtgcccaatattactgtctgcctgtgttcccctaaccttccaaaatgttcacacaaagtaagcagataaacattgtttctgactttgaagctttcaggctaaattgaagagctataaatgtaaatcagcaattgtacccaaagtgttgcttgattttctatttggctctgtggtagggcccatcgcgtataattcctcgtgaaagcgctgggtaacagaaagctttgggcgggttaaaagacctcagctgtggccgactttgcctgtgtcactctatgcgagtgggcagagcactgaatgtctgttggccttgctatcattctctgattcccaggagtgaattgacgctcaaatggaaagtaaaaatggatgttaagataaatgggagattgaaacacagaatcatcaaaaccaggaaaaagagctgcaggaagtagtgtgcaaggaggggtttaaaaaacgcagccagagatcctcgggattctcagcgtcgctttcctgttagtttgaggttcgaatacagtatttgcgtcgtctcacatacaacaaataggtgtctgcctgcacgttgccaacgtgactcttggaagaaaagcgagaagcagcaaaaccgagcaagggagttggctaaacggctgcaagaaacacacacacacacacacacacacacacacacacggaagaaaagcgagaaacagcaaaaccgagcaagagagttggctaaacggctgcaagaaacacacacacacacacacacacacggaagaaaagtgagaaacagcaaaaccgagcaagggagttggctaactggctgcaagaaactctctatctcactctctctctctctctctgtgctgcaagaaactctctctctctctctctctctctctctctcggaagaaaagcgagtaacagcaacaccgagcaagggagttggctaaacggctgcaagaaacacacacacacacacacacacaccacacacgcacacacacaccccagcagtcatgaaagaaggagaggaaagttctttgttgaaactccgggttcgaaacacacacacacacacacacacacacacacacacacacacacacacacacacgaaactccgggttcaaagctatgggccccaccccgctcaggactgcctgctacgaggccgcgcagagatgccccaggcgcggagagaagcggagcacagccgtgctagggacaggggcgccaccctgggcgggactgaggtgggatcctggctcccggctttggcctcccagcccaggctcggggcttcctggccctcggaggccggggcgggccaggctttgcagcacagggcgaatctccctccctccccgggcgccccccgggaactggcggccagaggttaagctgacatgtttgcagacggtaatggggcgctggatgccaacagccccagctcaggggagtccagatttatgtttcttggaacaattctttcctccattgcattaacgccaaaaaaaaaaaaaaaaaaaaaaaaacacttaatcaagcccagagtctactactaaagtcttgttaatttattaacccaagccgaggctgagagctcgacgtggcacttaagaagtaaaatgaggaaaggaggaagaaacggggtccctgtgggcctcggggcagcctcggccgggctttctcggagggcagggccaggggcgctggggccgctcccgcgtggcgcggctcgggagcgttccagggcgcggtccctgcgggccggcgggccggggtgagtcacccctgacttggggtgggagcgggccgtgtaagggggaggcggggcggggcggggcgggcctcgcctcgcctagggaggatgtggcgggtataaaagccccacccaggccagccggctctgctcagcatttggggacgctctcagctctcggcgcacggcccaggtaagcggggcgcgccctgcccgcccgcgatgggccgccagctagcggggtgtggagacgctgggaagaagggtacggcctggcagggaggccccggcaactggccccggaggccgtcgggggcagggggctgaagggacggccggcactggag

SEQ ID NO: 14043 - DNA, 2300 bp, Homo sapien
ggattcttgggaagggaaaaagtgtatctttgtagtctgtttatatatgtattttcaatctttcatatatattctcatcgtttattattattcatactttctggattcctttttattttttacttagagacagtatctcattgacttagtataattgtgtctctgtcaaatttttcttttatttttcagtttgtacaataaaaatttatgaccactatctgtttatcatggattttcttttttcaaactagcatttctcccttttctatataacgcttcttgctttgaattctgctttgtctaacactttcattgctattcttcctctttttatctcttgatggcatctgtagttgttttgtttttaacctttttgtgtaggaatgcctcacataagcagcatatagtttaattatacttttttactaaatttggtagtcttttagtaggaattaccattcactagctaccatttactgagaggctacttactatgtgacagccactatgccaagagattttctatatataatttctcacttaatctttagaacaaatccaagaagatgcccctgctgtacctgttttagagatgaggccgttgaggttcagagaggttgagtaacttacacgagttgatctttcttactcactgctggtgactgttagaacctttctcttaaatcctcaactgtaaggctagtggatgtacataaccagttatgaaatttctatggtatttaaagtgctctgtcagattgaagagaggtcttctggtgcttgtctccttgtagaggggacagtgtagtcctgaataagttaaaagccgtgtgtagtttttccattaccaaaacagtacatgaaaaacaatatttatgacttcatgtctcagaatacaataaaccaccttctgtcaatttctgccccatcttttattgctaagagttgttttccctgagtagttgtggaaagaaagtcactggttgatattaagggtgcaccagaagctggcgacacttctctggacgcattaaaaagcagcgtcctcacagtggcagagggactttcctcctggtcagctaagaccaagtgtctctgcaggagcctatagagtagacataaatgaaaatctgcctcccgtttggccctacatttcttctttgtggtcttgtctattttttgattcgttgaaattcctcttgagatgtggtagtttgtaaatattccatttcttgtgctattataacttggcaaatttgcctgttatcatgaacatatcagtgggaagatgaggttaataatagctggtagtagtttgttgtcatcttaaacaagaaccttttacaaccattagacttttctttctactttaaaagagcaggaagtatgtatgacagggatagggacattaagagataggtagggtggcttgaaatttttactaatactttaccaatttatttacataagatgtcctgtgaagtcaacgagtgccgaaaaattgagagtcttgaaaacttgtatttggattttgatgatgatgtcacagaacttgaaacttttggagtaaccaccaccaaagtatcaaaatcaccaagtccagcaagtacttccacagtacctaacatgacagatgctcctacagcccccaaagcaggaactacaactgtggcaccaagtgcaccagacatttctgctaattctagaagtttatctcagattctgatggaacaattgcaaaaggagaaacagctggtcactggtatggatggtggccctgaggaatgcaaaaataaagatgatcagggatttgaatcatgtgaaaaggtatcaaattctgacaagcctttgatacaagatagtgacttgaaaacatctgatgccttacagttagaaaattctcaggaaattgaaacttctaataaaaatgatatgactatagatatattacatgctgatggtgaaagacctaatgttctagaaaacctagacaactcaaaggaaaagactgttggatcagaagcagcaaaaactgaagatacagttctctgcagcagtgatacagatgaggagtgtttaatcattgatacagaatgtaaaaataatagtgatggaaagacagctgttgtgggttctaacttaagttccagaccagctagtccaaattcttcctcaggacaggcttctgtaggaaaccagactaatactgcttgtagtcctgaagagtcatgtgttttaaaaaaacctatcaaacgagtatataaaaaatttgatccagttggagagattttaaaaatgca

SEQ ID NO: 14044 - DNA, 2300 bp, Homo sapien
tattcatataactgctttgattgcagaaaagtgtgttgaaattttcatgtgcctttaacagtttcttaaatgacatggaaaatatgtgtcttctctaattttaaattttaatgagactgctaattttagtattaaacatcaatattgtaagtaactgggttaaaaatatgaaaataaagaatatacaatgtgtgtattagtagcttgattaatgaaatcgggctaatttttgcaatgaataattacatagtcacatgtaactaaaaattttctttttgcattattagagaaatacaaatgaatttttcttaatttctgtttctcagaaaattttaagagcttgcattgaacaagtgaaaaagtattcagaattctatactctccacgaggtcaccagcttaatgggattcttcccattcagagtagagatgggattaaagttagaaaaaactcttctcgcattggtaaggtttattatcagacgatataagcttttttttgtctgaaatagtgtgtgtgtgtgtgtgtgtgtgtgtatatatatatatatatatttatttatttatttatttttttttttggagacagagtctctctctcgtcgcctggcgtgtaatggcatgatctcggctcactgcagccttcacctcccaggttcaggtgattctcctgccttagcctcccaagtagctggaattacaggcgcctgccaccaagcctggctgatttttgtatatttagtagaagtggggatttcaccatgttggccaggctggtctcgaactcctgacctcaggtgatccacctgccttagcctcccaaagtgctgggattacaggagtgagccactgcacctggctcatgtatattttatatagacattaaattttaagcaataattagataacttttaaaatatgtaataccaatctgtttccctttctttttattctgtggatagaaatacttgatgtttttaaaaatgtcactactttgttccttgattttcttttcttaccacccatctgaatgcccctgaatacaagcagaaagcccctttttttaatgggattttattgacaaacatattggaaataagtgtgtggagaggatattttggagtttctaccatccccgttatgatttgtatctcctgaaaggagaggatagactttaaagtggcaggaaaaattctatgaaactggcctggtatgatggctcacacctataatcccagcactttgggaggccgaggcaggcggatcacttgaggtcaggagtttgagaccagcctggccaatatgacgaaaccccgttcctactaaaaatacaaaaattagctgggcatgctggcacacacctgttatcccagctattcgtgaggctgaagtgagagaattgctcgaacccaggaggcagaggttgcagtgatctgagatcatacaaccgcacttcagcctgggcaacagagtgagacttagtctcaaaaaaaaaaaacccacaggtagtggttgttaagcaaaaacatgaatatcttggcataaagtttctaaatctgatgtttacatttagtagaattataaagttcaagttaagagtttcatatgatgaaagatacttttcttagaaaaaatacattgcgatttttgcaataaaatgatttttttttcatatttagggcagtgtaaaatatgtgaaaacagtatttccctcaatgcctataaagttgcagctgtcaaaggacgatatagctaccattgaaacgtcagaacaaacagctgaagctatgcattatgtaagtaccaaggcaacattggatcttcctaaataatcttttatatctcacaaaatatatctaacccgattgtcccaaagtcccctttctgactttttttgttctttattgaagaaattttcaataagtataaccaagtaacaaattacttgttgtttttcaggatattagtaaagatccaaatgcagagaagcttgtttccagatatcaccctcagatagctctaactagtcagtcattatttaccttattaaataatcatggaccaacgtacaaggaacagtgggaaattccagtgtgtattcaagtaatacctgttgcaggtttgtaatttgctatgtcaaataatgctctcaaaaaagagaagttggactgcatgttctcactcataaataggagttgaacaatgagaacacatggacccagagagtgaaacaacacacaccggggcctgtcagggggtggggggcaaggtgagagagagcattaggacaaatacctaatt

SEQ ID NO: 14045 - DNA, 2300 bp, Homo sapien
tttttaaactgttcttaaaggcatttatccaaaaaactatattaaggtattaatggtaaaattagaaagtcttatttgctatgcatcagtatagtttcttattaccttgtcgtggtattgtatctgtgacatctcaataaattcttaagtttctgcacatcatataaaaacaaagtaaagggtctcagggattgtgagctccctggggatgggagtgttgttagcaataaacaaatactcaatgaacatactgacttaatagtctgagtcaggtactattttaatactctttgtaaccatttataacatttgatcctccttggctggcttagtaaatgtgtgttaaaatgaactaaagcagcacatgtattagctagatggctacaaaaccactatattatttaaccaggttctctatttgcaaagttctcatacacttttaaaatacagtctatgcatttatatcatttgatatagatttcaatataacaaaaagcatgtctattcttaaagagggtcttttttattacttgtatggaaatgggccaaggttcttggactcaagaaaattccagtatctctccttcacaggagaccaacaataaatacctgagggaattatacctaaaaataatttgagtgctgaactgtgttgttccactataggagtggaagtacagtcagccataactctagcattccgtatgtgaagatgaggatagggtaaattctgagaccctaaacttgtattttctgtttcctccaaatctctctatgccagaaatctattttcttatgtcaaccatcagccccactacactcctcttcagtggattacaaagtggctacaactcaccaattcagtcctggttcacttatgaccatcttggagctcatcttcctagatttctgcttcactctagctcacagttcacagctgcctggctgcgaaggctccaagaggcaggatccctccagaacttactcagctgagtaaaaacaaaaggccaagatcaaaagcaagtgattggctaggccaggtgctattaggtgaggaagaatctctccctaaacatctaccctcaacagactgtggcacctaaaacagaatacagcagacccaaggttctttgtagcagagcagcaatgacgatacaggacgagcccttttccatttaatctacgccgggagtgttactctcaggacactcactatggaaataagagctgaaacagaacggtgttctcattgcttacatactaggccacttgatggcatggaacgggaagtcaactcagttttccattcccttactgccaaaataaatcttttgttttcccgaccatgctttgttatggggcagattctggcaggcactttatgacaaaagctacctcgatatcaggaatcttaggcctttcacaaagaacctcacatttgagaagacttgaggtcaacttaagtgacatttcacaagatcacttacagacatcatcaggactacaaatcaggcttgatctctcatgttcagtacttctcctgtgaccccaggcagactgataaagtgacctgcgagaacctaatcaaatttaggagtcggtctctcgacaccgaacgggcccgaccggctcccacttaatctacctctcacacttcgacccagtgtggagctgggggggaatagtcgaggaaggcaaaagaaacggctgagggaaaggggacgcaaagagaggggaaacaaggttccagaaaagcaggtaaaagggcaagcaaagcaggggtaggagccgcgcagagccaggagcaaagggtcctggcccggccgccatgttccctcctcccgcccctgcatgagcacgcccgctggcccggcagcgccctcccgtccgcgtctgggctgcaacacagcctttccgcccacctcatggtccgcggcggctcttgcccaggccgcagccacacaccacacacgctccaccccactcctcacattgtcgcgcgcgcccaaaaaagaccatatttaaaggatgtggccgcgccgactcggccctgcgtgatgacgtctcagcgacatagtgggcggggccttgcgtcttgacggctgctcccctcctttcctcccgccacaagcgctcgctgtggttctggcagcgaagtgcgagactgggctcgccaggcggaagtggttggagactgcgtgttttcctagaaagtcctcgaccttcgtcggggagaggaggggagtgataaattggaaggcggacaagcgacaagtgcggtactggaaagacccaaacat

SEQ ID NO: 14046 - DNA, 2300 bp, Homo sapien
tgtttgtttgtttcctagcattttatttcttatgcaataaagtcaaacttccttagtctggcttataaaatcttacgtgttctagcttcaaccagtttttccaaccccttttcctctactactcttcagagaccttgcattccaggcaaaataaactacctatggtttcctgtagcatattttttacattaacataatttctaacaatattctaaatcagtctaaaatgtcagccaggggtagtggctcacacctgtaatcccagcacttagggaggccaaggtgggcagatcacttgaggtcaagagttaaagatcaccctggcaaaccccatctctactaaaaaaaaaatacaaaaattagccaagtgtggtggcatgcacttgtagtcccagctactagggagactgacgcaggagaatcgcttgaacccaggtggcagaagttgcagtgagctgagatcacaccactgcactccagtctgggagactctgtcttaaaataaaatgtagaacatgcttccctaatagcacacactagattctgtttatgcaataagtttatgcagttccttgtattaaaaaaaattataggaggccattgtttagaacttctgcactagaccccaagagaccagactaaaataaaaatggtatcactcaggctcaccacaccgaaactgagttatgtggccctccaagaaatcaggagacagaggtaacaggccagtttcaattttcaatcagcaagataatgaatttcctctgttttagtccctacagcaaagagtaacttgaagtaacctgatgttaaccaatcagttatctttctattgtactgtctgtctccaccttaccaggaaagtaactttgaaatgatcaatctgctttttgttctttgtttctactttctacagaccttttttctgtccgtaatgccaacctcctctgttccactcattgggacactcattccattttatggaatgaagtgttgcctgattccagaatcgcaataaggccaactgagatctttagatgtgtcaaatttttgtcttttgacacttgtgctggtctgtctagaacgccctttctcttcattccacatacccacattcttcaaatgagctcacacggcaggtgctcagtgcagcaactgacatgtaagtactcaatactattcaaaactgcgttttgtccctcacactagctattcctctccctctaacctcaatctatacacctttcttatgtagtttattactttctattgtatttaatgtaaatgtcttagattgccagagatccaaagcactggaaaaatcagtattcagtcttagtccatgtgtacccagcaccaagcacaaagtactctgtttacggtcaataaatctttccgtaatggatgagaacaaaactagtgtttgaactcacagctaaaactggatggggagtggagcggaggtgaaggagcacttaatgaggccctactatgtgccaggtactgtgcagagcacagcttcttcctttgtttcatttaatcctttccaaaaaaccgtatgatgcagcagtaacaatttcatctccattttacatatgaggagtttgggttacggaagtcaggaaacttgcctgaggtcacaaccaagtatgtttgggtctttccagtaccgcacttgtcgcttgtccgccttccaatttatcactcccctcctctccccgacgaaggtcgaggactttctaggaaaacacgcagtctccaaccacttccgcctggcgagcccagtctcgcacttcgctgccagaaccacagcgagcgcttgtggcgggaggaaaggaggggagcagccgtcaagacgcaaggccccgcccactatgtcgctgagacgtcatcacgcagggccgagtcggcgcggccacatcctttaaatatggtcttttttgggcgcgcgcgacaatgtgaggagtggggtggagcgtgtgtggtgtgtggctgcggcctgggcaagagccgccgcggaccatgaggtgggcggaaaggctgtgttgcagcccagacgcggacgggagggcgctgccgggccagcgggcgtgctcatgcaggggcgggaggagggaacatggcggccgggccaggaccctttgctcctggctctgcgcggctcctacccctgctttgcttgcccttttacctgcttttctggaaccttgtttcccctctctttgcgtcccctttccctcagccgtttcttttgccttcctcgactattcccccccagctccacactgggtcgaagtgtg

SEQ ID NO: 14047 - DNA, 2300 bp, Homo sapien
aaaaaaaaaaaaaaaagaaaagaaaagaaaaaagaaaaagaaaaaaagaaatgctatctgcacagtgccaggcattgtagtggttgatttttttaagcattcacaaacactgtctcctaactggcctcctcccttcaatgaattccgtaggttgccaggtgaactttcctgaagcacagccagccagttctgattgtgtcattatgtaagcttttttgtttgtttgtttcctagcattttatttcttatgcaataaagtcaaacttccttagtctggcttataaaatcttacgtgttctagcttcaaccagtttttccaaccccttttcctctactactcttcagagaccttgcattccaggcaaaataaactacctatggtttcctgtagcatattttttacattaacataatttctaacaatattctaaatcagtctaaaatgtcagccaggggtagtggctcacacctgtaatcccagcacttagggaggccaaggtgggcagatcacttgaggtcaagagttaaagatcaccctggcaaaccccatctctactaaaaaaaaaatacaaaaattagccaagtgtggtggcatgcacttgtagtcccagctactagggagactgacgcaggagaatcgcttgaacccaggtggcagaagttgcagtgagctgagatcacaccactgcactccagtctgggagactctgtcttaaaataaaatgtagaacatgcttccctaatagcacacactagattctgtttatgcaataagtttatgcagttccttgtattaaaaaaaattataggaggccattgtttagaacttctgcactagaccccaagagaccagactaaaataaaaatggtatcactcaggctcaccacaccgaaactgagttatgtggccctccaagaaatcaggagacagaggtaacaggccagtttcaattttcaatcagcaagataatgaatttcctctgttttagtccctacagcaaagagtaacttgaagtaacctgatgttaaccaatcagttatctttctattgtactgtctgtctccaccttaccaggaaagtaactttgaaatgatcaatctgctttttgttctttgtttctactttctacagaccttttttctgtccgtaatgccaacctcctctgttccactcattgggacactcattccattttatggaatgaagtgttgcctgattccagaatcgcaataaggccaactgagatctttagatgtgtcaaatttttgtcttttgacacttgtgctggtctgtctagaacgccctttctcttcattccacatacccacattcttcaaatgagctcacacggcaggtgctcagtgcagcaactgacatgtaagtactcaatactattcaaaactgcgttttgtccctcacactagctattcctctccctctaacctcaatctatacacctttcttatgtagtttattactttctattgtatttaatgtaaatgtcttagattgccagagatccaaagcactggaaaaatcagtattcagtcttagtccatgtgtacccagcaccaagcacaaagtactctgtttacggtcaataaatctttccgtaatggatgagaacaaaactagtgtttgaactcacagctaaaactggatggggagtggagcggaggtgaaggagcacttaatgaggccctactatgtgccaggtactgtgcagagcacagcttcttcctttgtttcatttaatcctttccaaaaaaccgtatgatgcagcagtaacaatttcatctccattttacatatgaggagtttgggttacggaagtcaggaaacttgcctgaggtcacaaccaagtatgtttgggtctttccagtaccgcacttgtcgcttgtccgccttccaatttatcactcccctcctctccccgacgaaggtcgaggactttctaggaaaacacgcagtctccaaccacttccgcctggcgagcccagtctcgcacttcgctgccagaaccacagcgagcgcttgtggcgggaggaaaggaggggagcagccgtcaagacgcaaggccccgcccactatgtcgctgagacgtcatcacgcagggccgagtcggcgcggccacatcctttaaatatggtcttttttgggcgcgcgcgacaatgtgaggagtggggtggagcgtgtgtggtgtgtggctgcggcctgggcaagagccgccgcggaccatgaggtgggcggaaaggctgtgttgcagcccagacgcggacgggagggcgctgccgggcca

SEQ ID NO: 14048 - DNA, 2300 bp, Homo sapien
ggagttggggttaagagtcagaaacaatgtgctcagggatctcctaaaactcttaaaacagggtggccagtactactgggacaaattgtgttttttattattaataataatgataataatactatccctccaaggcacaagtgaactatatagaactgcgtgtgtgtaaactctttactctcgtctcattttgttgagtttagaacttgatgtgctcgtcagtcttgtgtttcaaaacactgaataacttccaaagcaaagttatgccagtgtgttcaaaagataaattaataatgtaccagcaaagagcatcattcaaagtatagtccttgcatattccagttaccatttctctaataattaaaatattcatgataaatatatatatagcatcatatgttaaaaactatttcaaattctacatattaaggatgaaaattttaaaatccagtaataagaggagagacctgcctatcagtacagtgatataggtaaaagatgaaatatgtttttaaaataccagcaattaactattgttttcatgggttctcctctagaagcaaaccaaaaattccttcatggaaaacaattcttacttctacatgtgtagtttatatctgatgcattacaagagctaatgtttaaagacaaaacaaaacctgcctgtatgacagcagcaactcgagccaacatttagtgttacatgttatatttttgaaataccgttttgttatcatattccacatattactttccataaagtcagagaagttcaatgtaattgttggctctgattcttccaccttgggatacacattcacaagaagatttatatattttcttactatgatagaggaacataatctgggaaaacttcccatgtctgtaagatgaaaaggatacctttaccatgttgtttttgataataaagaatatggaaaatggtagaaatctctcctctctatgtgtatttgtatatgtgtgtatacacacacacgttgacatttttacataacatgtgattgccacttcttataaagttatgatatagaaccccatgaaaacaactttatattatagatcaaataatgtgcccagaaacgcaattgcaacagtaaatcttgatctattggtaagagtctatgatacaggtcttcattctatccctaaacataatgttagtaaagaggttccatcagattgtattatagagaccttcctattgctatttatttttaagagatgagaagactgactagcaatgtctccacagtgcaattggtttcacttctgggtctgtctgtctgtttgtgtaggtgagatcagtgttgtcaggctctcagaataatttttaaaagaatccagaagcctgacttcacaccaagtagccatcctagatgggcgggggggatctccatgttcaaccaaaccctcagaacttagagcaataaatacattcagtcatttatttataaatgaatgacagaatattcaatccaaatagaaacaaccttttgtcagtgatgcaacataacatggagtcttatattgagaaagtgaatatgaatattttaaatagatgcctaggaaatctgtgtttgctgtttacatttaatgtactttgccacattagcagtaccacacttcttttactttcatccttctaagaactaatgaaagatagcttgctattagctttgacatgttgcacatgccattatgttgttctctaagaacaactaaattctctccagtgttcatgtgtgattcctttttcatcattattactttaatgtggatgaatactatttctaggaacttgattatcactgaacagattgcatatgtaaatgcagataattcttgagcaatatagtgaaaatgatttcacaaaaaaaatccatatgtactgtatacatcttcctgaatccaaaattctcctgttatccacacagtttgaaatctcatattaaacagtggtaaatttttaaacattaggacattagctggctgcttctataaatgtacctgtattgtctgcctgctccttttgtggagatgtgtttttgtattggatgtttgggccaatgggaggcttcaagctacaacatattttcccactttaaataatatttaacatatgacaaaccccagacaaggcttttaatatgtataaagaactgcagtgttaggtggtttatttgcaaactgttttcagtgttgtccatttttatggcacctttaacaatattcttgtttccaaagtacaaaaaaaataggttaaataatctagccataac

SEQ ID NO: 14049 - DNA, 2300 bp, Homo sapien
aatactgattactagtgatgtcagattattcaccttggagtcagatgtctcacaaggcacgctagagctaatagatttggttcttttgaaaacattgttttctaaagcaggatactgttttaaagtagcattgtgaatcatccgagttgtatatctgggttcacttgcattgagtagggaagaacatacttccgaggatgcagtctccgatggttttccatcctttaacgatacaaaagaaagaaaattgtacctgggacctgcttataggatagcttggcattagtcgttagcacaagggaaatcaataaccaaatgtgaatgatggtgtcagtgtaactgaggggcgttgcctcattgggagatatagttgcatcataggaacgtggtgtgatttaatttcataattgtaaacattacagtgggtatggctgattcatttgaaactcttgtccactttgctatggctggacagctgagttaacatgggtaggtcttgggttcacatttttataatttcttttctttgtagttttttttgggggaaaaatctttaagaaaaaaagctgtattagaatgaatttatctgaaatcaaacttttataaagccatggcttgactgaaggacaacgaactttattgaccttctaaatcagagcgctgtataaatgtttggaagactcaattttgccttgaaagggggctggggagggagtgtatgaatccttgttttctacggtgctgattatttgcttgtgttttaaattgtggcccaactcaggggcaagagcaactcacttacatggagaaaaaaatatgctagaattatccttgcttaatcatcatgaatgcaacagctaatagccatctgatattttaagttgtgcgtggcaacagaccaacagaaaagcaagcagaatgaaatttcgtgaaggaaccgcaataggtacgcaaacttggcttttcagaatttttttctgttatgctcggtactatagacaccctgaccaaagttttaaacaatgcagactctgggtatgtagcatctgaaattcattgtaaagagattgacctgtaaaataataacgtcatgatttacagttccgtaaggacagtaagaagaattaagcttcaaagtttagagggaattaagtcttagtcgcatgttaaaatgtacaaagttcaccttcagaggtctttattttctgtcagaattaccacagtgtttcatttttagggtatgaaaacgatagcttttcctacttgtagatgggttctctggagagatatggaagagcctgggaatttagcggctcaaatcagctggcaactggagttcatttaggtgattcacatacaatttccggctttccttgcaggtatcagtggtcttggacgcggggaagggggttgggggggacaggtgtagaccaggaccttggttattggtataactgccaatatccaagggttgccaagggttgggtgggcggagttcccccgcccaggccgagtctctccagaaagacttcggaggagcttactccactccccggacggtcccagtggcttcgttctccacggcccagaagtgggccgtaccttccgattagagctggggcactctaggaaatgcgggtgaccgtagctccccagaccaaacctgtcttttccaccaacgagctggcgcatttatcgcccccgagtgctccggcaagccagcgggagagtggcgtcgggttgcgagcctcttgccccaccgagtgggggcagaaagtggtcagaggcgcgttccgcggggcgctgcgtgcagaaaagcgaccggcggccacaggtgatcccgaaggcgaggggaaggcgggcgcccgggcgagggcccggggcgcgggagggcaggcccggccggggtgggccagcagagccgccgctgctactcacctgcccgcgggggcggggcggggcgcggcgctggggcgcgcctgcctcccgcctcccgcctcccgcctcccgccccgggaggaagcggaggggcgcggtgtaaacagagcggcggccgtgatgtcagccggtcacatggagcctcttatggctcgggatggctctcggcgggcgggcagctgcggcagctgctgctgtggctcgggcggcggcggcgcggcggcggcagagggggctccggggtcggaccatccgctctccctgcgctctccgcaccgcggcttaaatgatgtattttgtgatcgcagcgatgaaaggtgagcccgggcgccccgccggggccgggtgggctggcggctccg

SEQ ID NO: 14050 - DNA, 2300 bp, Homo sapien
ctacccagttcactcttgctccatttcagggcctcttacagcaactcctcacatatcttcttgtcactgtctcatgccttctcagtctcagctaacatcagcccattcattgatacagcaagacaatttgagaaccactatgtgctctgccagagtgaataacaaaacgcagtacttgccctcaaggagcttagactctaatgagaaagacagacaataaagaataaacagtcatcctggccaacatggcaaaacctcgtatctactaaaaatgcaaaaattagctgggcgtggtggtgcatgcctataatcccagctacttgggagactgaggcaggagaatcgcttgaacccaggaggcggaggttgcagtgagccgagatcacaccactgcactccagcctggcaacagagcaagactctgtttcaaaaaaaaaaaaaaaaaagaataaacagtcaatccttataaacatcgaaaagctatgaagaaaacaatcggagtgctgtgagacagagtggcaggtggagcctatcttagatagtgtaggtctgcagaggtcacatttaagccaaggcctcaagaatgagaagcctgccagccatgagagaagaggggtagaaatacctgtggacttcaggctcagcatgtgagcagatcctagctcagggaaaagctccttgtgcttgagaactaaaacgggcctctctaaacccaccccctttccagacacctctttcacacagatgctgacttcacctgctcattctgattaattcatctcttgagctgcaataggtcattctctgggttctccttacttgacatttgggtgcataccgtcttttattattcagctgtgtggaagatctttacgggacttgagttcctttcttcacctctccaagggcatcagtcaggcttctatttatgtggaagatgctgaagaaatacttgaattctattcagttcaataaacattaattaaatgcctggtctgtgctaggtggtacctgctgggtatttaattcagtgctggtgtttaaaaataaccaagcctggcaagatggcaagaccctgtctgtatttaaaaaaatgtaaaaattagctgggtgcagtaaacatacctatggtcctagctacttcagaggctgaggcaggaggatcccttgagcccaggagtttgaggcagcagcgatttatgacagtgccacagcgctgcagcctgggtgacaaagcaagaccccatctccaaaagaataaatacataaaataaacaaaccccagtctaaccatgagaaaaacatcacacaaacccattaagggatattctacaacactgctgaccagtactcctcaaaactggcaagatcatcaaaaacaaggaaagttcgagaaactgtcacagaccagaggaggcaaaagagacatgacagctaaacataatgtgagatcggatgggatcctgcaacaggaagaggacaccaggtaaaaactagcgaaataatcagtaacataccaatgttgattccttagttgtaacaaacacaccatagtaaagcaatacgttaaccagataataaagtatacaggcattatctgtactatttttacaaatttctgtagctctaaaactatcctaaaatagtttatttaaattaaaaaataaataaataattaagacatgttccctgctctctataagcttatactccaggagaggagacacacatctaaacaaatatttgcaactcagtatgataagggtaacaataaaaatgtatgccaagtacaaaagtagtccatatgaaggcatgattatctcaaatttagagaagaaatcactgaggagggcaatgcctggagctgggttttgagggattaataagagtttgaagaatgtgaaagacgcttggaaaaggttaatttgagcctaggaaagggcatttgacaaagcctggaattttttcaaactatttggtattgaaaaaagggaagaaagaaaagaaaagagaggagcccagctttggaatttagtcaacaattatgggagaattgtaagtacctcattctttgtggctgggattccactgcccatggcagcagattcacagggcctctgagcattatcccccatactcctccccatcattctccacccagctgttggagccatctgtctgatcaccttggactccatagtacactggggcaaagcacagccccagtttctggaggcagatgggtaaccaggaaaaggcatgaatgagggggccccaggagacagtgacttagagactga

SEQ ID NO: 14051 - DNA, 2300 bp, Homo sapien
ggtcttttcagggtgactaaacatcaccttagttaaaggagaacagtaagaaactcattaaaggtccaaggggaacagacttaataaaaaatgttaacaagttgctactggtacctaaaaggaaaccagggatactttttaagtcacttgcgtcccagatagaattactggtgaaatttaatgtgacgagtattttttaaagtattctaaaataaacatgaggcagccaatgtattctgagatgctcactgtcccagaggaagttgtttcttaaactgtacactttgatatatttgtttccttagaaaagtcaagtgtaacaagctaggtcaattgcatcaagaacattactaacaggctaaccaatggtaaatgttgtgaaggctactctggaaatctgtgctttcacgtatggggaaacccacacgtctgatttgggatggaggagacaattgtgcattgtttgtaggcgccaacagacaggctaaagccagggatccttgcagagacaggattaaggtatcaggactgttcacatctcatttacatcaccccgaagagtggaccacaggttttgctgattagtacacagactatggcaaagggcattgtgtatttgaaataagatcaagatcagtaacagtaacagaaactatgtgtgaaatttggcatatggcggttcctctgaaggattagctaactgggtttcccgcacttactattttttaaagcatttttccaaaccaggaagttagcaaaagaaaaatgtcccccaattccctccgcctaccccacgttctgaagcacatatatttatgccaccttctggcctctaataatattatttattgtcaaaattttggatccttttgaaaggaaggtggggcgtatttccacagtgtcttcgcaggcaaaagaaagtggtagattgagtatgaaggcagacaaatcaggctactaccattggagtattttccattctttcaatttgtattgttccttcatcttggagtttgcagtcaaggtaacgatgatgcaattatctgctttcctggagttttaggtacctactaggggatgaatgtatttcaatgggaggagggtgtagaatgatgcctataataatacgaattattaggagctgttaattatctgaatgttatccgggcattagtaatgcctctccagtatatctaccttttatggatgagactgtacatttaataggaaaagtaccagtgggaattgacaattagcagccacgcttgagctagatgcagcgtggcatgttttatccagcttagatagttgtcgaccaaacaggccaaagttttcttcagtagaaaatgccctgccaaatggtttctggatccttcgcggacaaacagcaaaggagctgaaagcgacctctttcaaccatgccagaaactgtccatggcgcttctagattcacaaaatctgttttagacacagatgtctttaaccaagattggaaacccactggccgtcccatcccaaagtaaaaagtgccacgtcctcccatcctccgccttccttgggatgtcagccccgttctaattcctttttagtttctcctcagccctcggcagggctggcagggggctacctgcgatttcccaacgtggacgtggacaatcggatttgtctctacccaagctggcagcggatggggacgagttctgttcccgagagagtctcagaagtaggcacggaatcatctcaccgattttaatttctgtccctgggctggggagaggggaggattggggcgcgggaggctctgttctcctcctcccctcttttccccacctcccaaaattggcagccagtctgtggctctcggtctggggtctggagggtggggaatgtgggtgtgggggccggctggagaagctctcgctagcgctgcctgtggccagacccgcctcttgtcccctttcgggcgcacacacacgtccacccagacactccgcgcgctccctcgcgcttttgcttgcccgcccgccgccgcctgctttttccctcctgctttcgccggtcgccttctccttctttttttttttttttttttttttttttttttttttttttttttggtaccatagagttgctctgaaaacagaagatagagggagtctcggagctcgccatctccagcgatctctacattgggaaaaaacatggagtcagctccggcagcccccgaccccgccgccagcgagccaggcagcagcggcgcggacgcggccgccggctccagggagaccccgctgaaccag

SEQ ID NO: 14052 - DNA, 2300 bp, Homo sapien
tttgatgctttcaacctacttgtcaatgtcccagaccagataattggcatttagccttattgtttctgctaaacatatcactggatcatttacaatagctataaatggtatatcagagtattttaaaacatgggcatttgttaggtatatttttggcatattcattctttgggacattatgatgtaattattaaaatcatatttatgaaaagtctttacaaacagaaaatacttaaaatttcaagaaaaaggataaaaaaattgtgtgttatatatttacctaattatacttatgaatatatatgtacttatgtaatatacttcagtacagagaaaactactgtaagaatgtaccccaaagtgtaacagtaatatccttgattggcatgtggtgaatttctttttacttttttgtttttatgtgttttcaataatgtgtgtgtattgatttaataattgggtaaaaaaaattcatttaaaacctcatgctcatttttcaaggtccatccccaaataccacctccttaggaagacttccgtgatgcccgatccctctcctccctcccagataccccagactagagatgcatattgtttcctccaaaatccattagaactgcttatgtttctcttgccccatattcatactcagtattctgtgctatcttctctagtacccaccaaagaacataaatcccatgacagggaactcctgctgcaaccccatttcaatgccttcaacatagtgggtgttaagtccttatggaattgaaatgggttcagactatgttggcaattgcgagaaacagtgtccaagttattcaagcgataagactaagtaacagtaacggttccataaaaaggaaagtgcagacaatttccaagtgaccagtgagcattccatgtaaatcatggaataatttacgtgatatcaataataataccttggtatctagcatctcatttgacctttcccggagctctgtgaggatatttttatccactgcagatggggttatttgtgtagtgatagaaattcctaccatatggaattgttctaagattaaatgagattgtatatgtgcttgtgtgcctggcactgaataggtgaataaacagtaacagttttattattttctgtgatttgtcacagagcttagcaaagtgctaagacgggagctgtttagccctctctcttacttttctactataccacaatagcagacctagaaagcaaccatctttcttctctcctaaggattcctggtgcttatctgtccctgcagttgacaagggtgaacagcctcttgaaatcttgggctttttaatccaatgattcagtcacaacttcagtgaccctgatcaccattatggttccagaaaagacaattaaacattttgaaatctgaagaatattatcatatatttagtgtcaccaggccacaaactttccaatgaaagatgccattctttctaaaatgaatgcatctctcatggccattatcctgatgataatagtattcacttactgaaagtcgattatgtattctaccaggtaacctgcataggttagctccatttaattattacagaagccctatgaggtacacattatcatctctattcttcacctgcatttattgaggctcagggaggtcaaggaaattgttcaaagtttccaagctagtagatggcagatctaggtctttctggctgcaaataccatgcttgtttcacgtttccgtataggaggtaatcaatacatgcattataataatgaaagaactataggaatatgttactatagtaatgacctgtataaatatacagttgtgaccttcatgtcatcactgattttgccatcttcaggtagggaggtagctgggtagatgagagaacaggagaaaagggtaaaatacggtcttgttccatcaaaactgttctatttattcatttcctaccaaagagtcaaaaataaacatcaaaaaaacagcaaccccataatcaatccaagtctagtttaacccagttcctccccaggccctctatgtggaggatgcccatcaccagttttttttttttttttttttttttttagaccttgaccttccattttcctccctttcctggttgttctgcctgtgccctcctggcacatcagcagtcactgcaggcacatcgacaaaaggtgagtaaacacacttagaatgaacaagaagccaaggggacaaggtcaggagctgtgtatcagtactgtcagcctcccctcgcccctgccgccatcagccttgaggcaacag

SEQ ID NO: 14053 - DNA, 2300 bp, Homo sapien
ttaaaaatggaatagctactgtgctaatatcagctcatcacaaaaacatgtgctttttttctaggtcaattttgataaagatccaatggaaatgcgcctccctattcgtagccctattaaacgagactttttatcaggaattcagattgaatttaagcagtcttctcaccagagaagtttaagggccaggttgtactggcttcaggtaacattgtcattctcaaataagtatttatcatcactttgggaatcttgggaatgaaatttcttttttacaactatatagtttacattgtaattggtatcttttctttgtttgtatgttttttcccctttttccacatatcctgtttatttaacatcttacttataaacttcgtgactgttaagactaattttgatcgattagcctgcaaaagggttttcttgcactgagattgttattcttaaatgttcctttgaatttgtcatgggacccccaaataagattttcctttgtcgtcattcaggacagagagcagagctttgctggaggttccttttggatgcttgcttgctctctcccagcatccctcccttccttccttttagctgttaagtactgtttaggctactttaattcttcttctttttctcttatcccctaatttcatattcagtttcaacttttatttaaaccatagagaattgaaatctcacaggatccatagatacaagtattttcattaatgatgtacatactgcacactgttaatacaattatgagagtatttatatagtcctttattgaaagccttgcccttgctgaggtatgtaacttttacagatttaaaatgaaacttctaattacaccgcatatacacgcagacacttaattatgatgaaagtggtggcctcttctataacattatctttgaaactaaaagtttaaattatttgaaatcttgataagttcgttttcttttctttcaggttgataatcagttaccaggtgcaatgttccctgttgtatttcatcctgttgcccctccaaaatctattgctttagattcaggtaaaataaaataagttgtgacatagatataccttatttataaaagttaaataggcattagtttaacctagtataaagcattatttttttttatgtgttacttcttcctcttagagcccaagcctttcattgatgtgagtgtcatcacaagatttaatgagtacagtaaagtcttacagttcaagtaagtgaagattcctgctgtttctctaaaagaatttaaaatgagaatctactttgaaaataaatcttactctttttgaaagtgactttcatgtaaaaagtattttccagctgaacctattaattcacttttggtcaagtaatcttttatgcttcaacttattttagtagtagtctctacatattttaaagtgtagaatttcttcaaccatcttcttccctttataacttcaattagaatataaaatagtaagtgaaatctaaatgatatgtatttgtgagctgtgttctttaatgtaattgctgtgaactttaaaaattggatcatacatgctacatgatctggttgtatttgtttcatctgtgacatgacgaatgtggcatttgggactgtaattgctaagtgttaatgcagcagtattaccttgagtgaagctttcactccagtgaaaaagtctcaatctaagaagactttgatcttattaacataatttttaggagatgaaggaacaagatataactgtggcttttcactgaaatcaaagttttaacattgaaaattaaaagatttggtagaaatccttttccattttaaattttttttcttaggtattttatggtcctcattcaggaaatggccttaaaaattgatcaagggtttctaggagctattattgcactgtttaccccaacaacagaccctgaagctgaaagaagacgggtaaaaatttttatttcttggggaaaatataaaattaacaaaatttaaatcagcctcttttgaacgaattctaatagagaaaaaaattaaaatagaaattcttgattttatttttttcagacaaagttaatccaacaagatattgatgctctaaatgcagaattaatggagacttcaatgactgatatgtcaattcttagtttctttgaacatttccatatttctcctgtgaaggtttgttgtaattattattttgaaaatttagtgaaattattgtagaactttttaaagggtctgtggaccaaggtaggttttaatttgttgcatcatgtatttggtggg

SEQ ID NO: 14054 - DNA, 2300 bp, Homo sapien
gctgaagtaatgcaatatatgttgacagtatagtttccaaactaagcacttaccgtaacattttcaaatcacaggaaagcaatggccagaaaaattagaaaatttaaggcaaaatatgtcatcacacggaatatcttaacaaatacaaaaaacaataatgaggctgtaagcaaagtaagtttctgagtgacttacttgttagctaagccaggaaagtcttttaccaatagtgagttaattgaattgtgtctgattgcagcagctaaagaaatgtatccagagaaaatgaactcgtttaaggccattagcctttcagtaggaacagttgcttaaagaattgaagacattcagaacaacctcaatagtcaattacaaaaacaaggcaaatgatattgagtggtttcctttggctcttgatgagtcaacagatgttaccaatactgctcagttatatatttgagaagtcagcacggagtctgaagtgactaaaggattaacctgtataaatagtttgcctaggacaactacaggtgagaatattttcaaaccagcgaaagaaatactaattcagtacaacctgaagatagatacaactgattatgggaaaaatatgtgtggaacagaaaaagacttagttggacaaattcataaagctagtgaaaatgtaaagcatttaaagcctattgtattatttgtgagcaggtacttagtggaaaatatttcagtccaccttttgttaccaaaccattagtgtcaaatagttaacttcattaattcatgtggacttaactatcatcagttctgtgaattttcacgagaagtagaagctgaatgttcttacttgtgttaccacacagcagtttgatgggttagcagcagtaactttttattgtactctttgagttctgggccaggattaaaatttttttgaacaaaaagaaccaccctcaaccactatgactaaacaccaataatagtggctttggaaattaatttttgttgcagaattgataatgcaataatagtggctttggaaattagtttttgttgcataattgcagaattgatgatgttttttaatgaatttcaagctaaaattagaagacaaacagtgcttatgtgaaaaatttatactacagtatagtcaattttgaagacagctaatgtttgaatctcaggtagtatcaagatgttccatgtacttcctgtgctgtccaaggttaaaacatgaagcaaaatctccacttccacatgtatttggagaggatatattttaaggcctgcaactccagttccagcaacattttttctgacctcagtgcaggtgtaaggaaatttccacatttcaaaattcatttgtgcaattgaggagcttctacctaactttgaattggaagtgattgacctgtaatgtattaatatactaaaaggcaaatatcaagagaagaatttaatagaattttatgaatgccttccaagtgatatatatgctcaagtaaaataataaattctcattgaccaatatcagtatttggcagcacctatctgtatgaaatggcatttttaaagatgctcattacagattaccattaatagatgaacatttacaatagattttggtaataaataacactaagtgacatgttactttcacaaaagaagttttttttttcattaatagacttgtttttaagaattgctcttaattattttatattctaaatttcatcaattaaaatttatgggagttttttctctctttggtatctaagttgcctatctaataacttgaattttgtctcagtccagaaagcctaaaatatttactatttaatatatgaccctctgcagaaaaagtttgccagtcccttagttggttgatgtcaacgttgatagaaaaagtattttcttgcctgcctcttttctttttgtactcttgcaacacaggtatagttcgttattttaagaagtcccttataccaatgtaattttcataggaaaataatagttacaataatctggagttgaataaagttccacagacctaaatacatattgctaatttaatttttttgtgtgaattatttagttctggtgttgtttgggaggtgaaaccaaagcagaaatggaagccatttagtcaaaagcagataatcttattggaacaatcctatcagaaacatcaaatatcaagagaccatggctggattaagctagataataattttgaggtataccaaaattcttttgttttgatttttatatgtgtattttcttggtggtggtagtaagtaaaattg

SEQ ID NO: 14055 - DNA, 2300 bp, Homo sapien
ccaaaaattttataacagtaactggtcttctttttaagtttatgtcttagaaaagcaatttgtggtgatcatttctagtgatgaggaaaaatactcttcattattttgaggtactaatgattgttatagagaaacattggcaaattaatatttggaattcttttcacttatgcactgccttagtacctcatggatatacagaagttgcaaatatccctgtggccagacctggacggcgattgtataatgtacggaatcccaatgccagtcattctgactctgtcttggtacaaattgatgcaactgaagggaataaagtaattacccttcgctctcctctacaggtaatacttcaaagttaattgtatccctttcagtgtaccaagaaatggttaaatcatttagctgaatataggaatacagtaaaacttcatcaggtcaattctgattattcagaaataaatagtaattattcagaaataaatagtaacagaaatggcttctatttactgtccagcttgctctgataatatttattttaaatgtctgtagttttgtttacttaaagctcatttttgttttctgtcttttaagacaaatgcaaaattaataaagctcttttggtatattcctttaaatattcagaaccgaggattattgtaattgtagttaggaaacattccattctctttgtatgtcacttggattatatttttcaagatatgtatgaaggcatattggaatgatctatccctctgaaaaacattttagcatcttaatctgtgtaaatattttttctacttttaaggttttatccaacatttttctttttctgtgtattactacaggtttcagcatatggtcaacaaaagaacattttttttcctacctgtaacatcagatacaaatgaaaaggtttcaaattttggacattgttatcttatagtttgttatttgctccaatgcgtaacagactgatgtcaagaaaagaattgtactatttttctcatgattttttgctatccatttctgtttagttgttatacatgatacattgagaaaagattgtcatggagaaaaaatggcttaaatcttcagagaataatacatatttgaaagataatatagactaatactaaacataagcttataatatatggagcatttgaatatctcagttttcaactgacacttaaacattaaatttaatatatatagcacttaaataccctaaaatttttcaattgccaataaaaatatcttccaatactgagtttgaaattttttagatctaaaagtatttgtttgtggctctcattttttctttcgaacttacatatcttttaaaaaacttgtatttttttttgtccaacagatcaaaaaccatttctccattgcatttatcatctataaatttgttaagaatgttaagctattggagcgcattgggatagccagacctgaagaggagttccatgttcctttagattcatataggtagatacttcttaaatgtattaaactttaaatgtattgagttggggatttatattctggcaaataacttcatatttttattaactaaagatcagtaaaagccagttttaagacataatttagtcttccattgagaaatacatttatattatcattgaatttatcaggtgaaaattcctgactgtatatttgatgtcaggatttttctgactatttttattagattgcctttgtatttgaaatgaaaatttttttaagttgtcttgtttacagagttgttttttgtttgtttgttcttttcagaaagtcctccgtaagttagctatgtgattttgggtgaatttcctaaccttttttttagccctggtttcctcatctgtatatctgtaaaaacaggaataatagcacctatcttgtagagttgtcaggaagatttaatgagatgcttttttttaagttgtggatcaaaactttattgtcactgtttcctctttctgcagatgtcaattgtttatccagccagctggaatcttagagcatcagtacaaagaatctaccacttatatttcctggaaggaagaacttcataggagcagggaagtcagatgcatgttgcagtgtccatcagtagaagtcagcttcttacctctcatagtgaatacagttgctctgcctgatgaattgagctacatatgtacacatggggaagactgggatgtagcttacattattcatctttatccttctctcactttgcggaatcttctcccatattccctaagatatttacttgaggtatgtct

SEQ ID NO: 14056 - DNA, 2300 bp, Homo sapien
gaatctcatgattccttaaaagcatgcatttctacttaaaccatcatgtttacttttctagagagcaattaacttggaggtgggtgccggggaggttaggttgcttttgtaatattaatggatgtacaccaagaatattgcttctgagaatgatcttatcctcattgggaaagatttttctgtttttagttgaaattgagatgaaatacatcttattataaataaattttgactcttactaatgattacaggattgtagacaattaactgtctttcctcatgctgagtacataaaaaaaaaaaaaaaagccttatcagaaataagccggcagaagcttagtttctaagactaaactttattgctgtggcctagcagtacagaattgaacccaattttggagaagtacggtactgcccttctccctttcatttaaatttgaatttaaaataaccaacattcttaataaaaaggagatttttaaaagaactgttgcaaaaatttatcatgagaataaaataattctcaattattttatattttataaaatattttataaaatgaaaaatattttatgaaatgtaagaaagagctctttcttcctacagtaactattgttaatagctcagagtgtatgtttctagacttcactctctacatacacaaaatcataaataacatcttttatattacttttttatttagtttttaaagtaaatgctttttaaagttttttcttttaaaaataaatgccttttttcccctaaatatctgtctcttccaacagaacttcctcaacaatttccaaactgctaaagaagctttgagtacagccacagtccaggctgcagaaagagctgcttccagcatgaaagacttggctcaaaagagtttccgccttttgatggatattaatttgaaagcaccagttattattattcctcagtcttcagtatcacctaatgctgttatagcagatctgggtttaatcagagttgaaaacaagtttagcttggttcctatggaacattattctcttcctccagtcattgataaaatgaacatcgaactcactcagttgaagctgtcaaggtataaatatgtaatctaattgtgtattgcttactagaaataggattttcatacaatttttacctaaggtaaaatgttgtagtaatttgtggttttcattccttatttcttctaattatgaaaccttgaccattggcttcttggtcagtggttaaacagtcatgtatgtgcctcatggagtctgtattttcccttactacatatgtaatatgatttttttcattctataaaaattagctattataaaattatagtttactcaatacttagtttaaattttttatttttctcactttgcacgtagctatttccttttttatttttggtgggaaaaaacttcgtaatatataaaatttaagatttatttctcatttccaaaccttgtcacatttgggaattttcagtgagttatcgaaaggattagtgaatcgaaatgggacagtgttggctctattgagtgacaagagcgtttatttggttaggcaaatggttgttggcaggcaagctggaatgactattaccgtatgttcgtttaacttttagattagttgagtttcccccttgagtctggagaagtaccaataacatattaagggctaagtataagattactttcttcatcttccagttttaggaggatgtaacatttgtttgcatgacagtaaactattcgctgtatcaaacagcctttgtgaaaaataataaataatgcagttgtcatagtgtatgaaaattatgtttttgaaatcagtgttatgtaggtttggttttggatagctctgcatataaacttatgtgttgtgatttagattgatcttaaaaatgtgaaaagaagtgtattctaaaagacttctgttagcagcttttagcctttatgaaatgctgtgtggaaactgttacacaataggatagtcctcattttaaaatgtaaatttgaagtaaaaaataaattcttgtttttctttcagaactattttgcaggctagcttgccacaaaatgacattgaaattttaaaaccagtcaacatgcttttgtccatacagcgaaacttagcagcagcatggtatgtgcaaattccagggatggagataaaaggaaaactaaaacctatgcaggtaagtagctagtatataatatatgaaaatttcttgataggcttttctcgttgatcatagtgcagttctagtggatatcagaatgtaggagttg

SEQ ID NO: 14057 - DNA, 2300 bp, Homo sapien
ccttcactgttacccattgagttatgagagaccctttacaaataagtatgcaaagtatattgtctttataactatcttttttttttggtttacagagcatttatattagttgttaaatttctccttaggttaaaatattatacctaacctgtagggtcagtgtggctaattaagctcaagtgtgatttggttttctaagagctagacatatttgtgggtgcccttgagttacccgttttcttaaaaatttaaaaaatttcctgatctataaaaggagggagtaatatataaaaaactcaattctaggacctttctgagagattgggggataattagtataaatgtagagaagaaaaggtttagggaacagacagtccctttctgtatgctagttaaagggacgtttcccactttttctgtcttatgctcaccaagaaggcaatcaaataaattttgttaggagattttgagataattacaaatgtaacagtacctattgtaaatataaaatcactggacttagaaatgacccagagcgttgtagacttcccgtgacatgcaagccatttaagaaattcagcaggtttacaagctgaagagaagtgaaaatctaaatggagaaataatttgatattttaaccttgggaatagataccaggtaaaactggctttcctacatatccatctaggtgaccccaaatattctgtcttacattgcattattttattttctctttagtttgttatactgtttttcagttctttgaactttgagcattttcatttaaaaatgattttaaatgaaaaaccaccagtgattctggtggtgtaagtgactttaattattcacatacaagcatgacttagttgaatcaaattcttttctcctgaaaatcttgattagtagctctgagagacctatagattttaaatataagtttaaaaattatagatgaaggaaggtattttattttggaacatgtaaaactttatgtgtaggaaaggtttggatagaattgctgtagtaaggcagattggggacattttgctgcctggagacctggaacgaggggatactagagattagggaaagaaacatggaaagattttgacagattttgcctatttcaaaatttagctgagagcatgcccttttggtcttctcttgtcttccctgaacaggcttttcccccataaaaccccaaaattgggacagtaatattagggccatagttcatctgtgtcatgagtgaaagttttttgtgggctcacctcaggaggacttgacattaataccattgtttccaagagagaacatgtgttctgtcttctaagtgatttataagtagatatttggaatataactggtctgagttgcctgtgactcataatactattcataataccgtatgccttgcttttagagctagcctcttcctgttgtgacaatttggtatgctgtcaaaattccatttgcacaaagttcctttgcatctcttctctgtgttgctgcttcaattcctggtagcttgtgcagatattattttactgttgatctataaggatttatttgttgatgtggatagaagagcatgtgcaatattaagactatcaactgttgttgtgcaccgaatctggtccagcatccttactaataatctggtcactgcttaactcactagatagacttaagcaattaatttaacttcactagggctgagtttcctttttttcaggattgaaataatagctgacttattcattttacagtttttgaatattaaatggataatgattatcaaaatattttatattgaaaaataaaaattacaatgtgactattcacttaatagtaattttatgtggaaaagacctttgtaaactttagtgttggatttttttcattttttctgagtgatgtacataccatgaagagttttttatgctttttcgcttaatggaaagtgagaaatttttgtgttcttgagcagtcaaataataatttaaggttgaaattatgtttccttagataaattaactttgaagattccttggaagaacctttatggagaagcagttgttgcgaccctggaaggattatacctgcttgttgtccctggagcaagtatgttattttaggttataaccattcaataacatcacattgaaattaaattgttatctgagttaagtattttaatacatttatttattaagatagaaggtaatttaaataaatgaatcatacatagatgcacttatatgcatacttttatatatgtatgcacatatatcttacc

SEQ ID NO: 14058 - DNA, 2300 bp, Homo sapien
tcacggactgaactaactgcagaccaaaaatatttcggggggaaaaaataaaaagtatcaattcagcaataaaaaaatgcaaattaaaaaacaacagaacaactatttacatagcacttacttattgggtattataagcaatccagagatgaccaaaagtatacagaaggatatgcatagggtacatacaaatactaggccattttatttaagggacttgagcaacctccaattttggtatggtcaggggtactgaagccaatcccccatagataccaagggactattgtattgttgggcaaaccacagtgaaccaatcaaatgatcagccacctattaaaaacaggctcttgccaggcactatagctcacacctgtaatcctagcactttgggaggctgaggcaggaggatcacttcagcccaggagttggaggctgcaatgagctacgatcttgccactgcactccagccttggcaacagagcaagtccttgtctcaaaaagacaagccaaaaaaaaaaaacaacaacaacaacaaccaggctcttccgtaattcagggtataaacagcattgcccaatatatgttccatatacgtaattataaattttagaagccaagtttaaaaagaaaaaaagtaaaactaaaaaacacgggaaatacactttaatattatatttaatttaacccaatatattcaaatattatttcaacacataagcaacataaaaattattgaggtattatttttttctcctacttcattaggagtaatgcttattcaaaacgatgttttaattcatacagcaagtctcaattagcactaacctcatatcaagtgctccacagctacagtggctagtggttaccctagtggacaggggaagtctatagctatttgttgttgcttgaattaaaagcagatccatacatttgagtcgttttttgaattttcctccaaagctgacaaagttcccaaaccttttgtggagtgagaaagtcccaaagtcctcaaagcttaacacgtaattcatgcaaacgattaagctcgttgaagagtgtatgtttaagtacactatttcctgaatacttttatacacttaatctccaggataaaaacgttggcataaattcctgagcatgcaaccaagcagacacctaattaatgacgatgctggtcgaggcttgaatttctctctattgctccaaaacaaaattcaaaatcctcttcgtattgacggaaaagtaaatattaaaggaagaaatcattttcacaggagctgaaagcattaagagtaagaatccctaagcacacgcctatcttaaagatctcctgcccgttcctctccaaacccggtaatcctaaagagaaggaacccagttcttgctccctgtaaaatgatagtgaagataactgcgagatgcaacttcctccttttttcttagtgccacttcgagcgtatatgaccagacaaccatgctcactccacgcgataccgaaacagaaagggctctgtttttatgctgtagggccaaaggggccaccctgagtgcagcgagaggaccacagaaacgggcagggcggggacagcagggccagggcttggcctcgggggacgagaaaggtgggaactttggcagcgcgggcgggatcccgccgcatctccccagccggagtcgggactgggaccccgagaatccgcgggcggcagaggctcccgcatctagcacctgccgcaccgggatggggagtctcaggcggcgcagggagcagggcccgggcagaatcccggacggagcagccctcggctgggccctcagcgcccgcagcccactggccgcgccctctcgcttaccgccccagatgcccagcttcagctgggacttgttcaggttctccacatagtcccccaggaagcggttcagcaagtccgcgaccaccgactccagcaccatggtggcgctgaggcacaaggagagggaggagccggaaccgcccggcgcagctgagggctgcgaccagcgctgcaaatgacagcccctccggcgcaggcccacccccgcgccgcgcgcgtgaccccgccggtgcgcaggcgcgctgtcgcccggccggtagctaaggaggcccagctgtgatcccgaggctttgtaggcgccgcagccctggccctctagaggccgacggaggagtgcgggggaagttagcttgcgcctgtctcgtcagccgtgcacgagaaaaaaaaggaccttcgagaagaacaagggagggcaagagttaccgagtacagggacatctatgt

SEQ ID NO: 14059 - DNA, 2300 bp, Homo sapien
taccttcgcataataatgacatgaggccttacaaagtataactgaaacataataaaattgaatgatgcatatgaaagcacatttacacattattctttcaaaattaccaagttataccatagaactgtaaggaattactttattagacaaagcattagtgttactcacttctcccaagagattgtgcctattgctccacctgcttgaccaagctatgttgcctgtgccatctttcctatcatcttatactgttattcatacatccttggattggcttctttcttaactttttatggtacatgccttatctcaaccagaacatatattgcttctttacattcctcttggagcatagtcagtgtgaatgtaaaaaggaagcgggattgttagagtgtatgactagaaagaacgtggagaaagtttgaagagagtgttctaaacactgggaagttattggatgtttttgagcaggtgactaacctaagctcacctgtgctttgggaaaacacatccggtgttcatgagaatagactggaggaaggaataactggaggctaggaagtgaatttcaaggagatggatggcatggtccagaagaaaaacatggagaatttaggaaagatggcaaaagcaaaatagacaggttaggctgttatttggttgtggatggtgaagaaatccaaagtacttactagtattttgtctttgtgaccagctaggaaaaacagacggttaaggatttatcttcttaaagaggaatggagtgtgcaaaagtgggagaggaatgtgatcttgatagtactagttagtactgactgggtctttctttgtacttttaattttatttaatacacaacaccaattgtagccattttgattttctttcttctccagcggactttgaatttaagatttttctttgtgatcctgtgcaagcctaggttgtttaagaaaaatacacgaatagtttctcagacacttcctcgtagcaaagcacttattaatgcttgtgactacaaataatcagcatttcttaggtttcttcctgtgtactgtatctcaacaactttttgaaatatattttaggaaaaaatttctagttctctaaagaggtgaatctcaatgggtggttaaatttcacaagggttgaaagatcttgtggtataaaagctctgcttttaaggtcgtgctacatcaaagacagttcaacgatagcatggaagaaagtgatatataaataacaagtaactcatacttaaaaaggcactactacgttttgttttttatatctgtaatgagataggtaactggttagtggctagtgaattaaaagcgaatcttagagaaaggggaaaagaacgcgtttcccacaaaacgcgtatattcagttctcattctatgatatctgccatttgatgtggttctgttcccctcctcccactttcaaattatttgtcgcgcgccagtggtcccagctactcgggaggctgacacaggaggatctcttgagtccaggatgtcaagtctgtagtgagctatgatcccgacactgcattctacccttggcaacagagcgagaccctgtctcaaaacaaaacaaaacagaaacaaaataaaaaaacaatgttttcaagaagcagagaccaagccccaggcggagtcgaactctagcaggacaagaacgcggtcggtccctttcccccacctgatccacaggtgcaggggtggttgcctaggtgacgctcagcgcatactccaggccaggcggctccggacaccgcgatgcggccggagttcaacagcaggtgacggcgggaaagcagagcggccacatagatgtccctgtactcggtaactcttgccctcccttgttcttctcgaaggtccttttttttctcgtgcacggctgacgagacaggcgcaagctaacttcccccgcactcctccgtcggcctctagagggccagggctgcggcgcctacaaagcctcgggatcacagctgggcctccttagctaccggccgggcgacagcgcgcctgcgcaccggcggggtcacgcgcgcggcgcgggggtgggcctgcgccggaggggctgtcatttgcagcgctggtcgcagccctcagctgcgccgggcggttccggctcctccctctccttgtgcctcagcgccaccatggtgctggagtcggtggtcgcggacttgctgaaccgcttcctgggggactatgtggagaacctgaacaagtcccagctgaagctgggcatctggggcggtaagcgagagggcgcggccagtggg

SEQ ID NO: 14060 - DNA, 2300 bp, Homo sapien
tcaaggacacagtaaatccagagacccaccaatcctgccccctactagaaacatataagtaatgttcaggccaggtacagtggctcacacctatagtcctagcactttgggaggctgaggtgggcggatcactttgagcccaggagttcaagaccagcctggtcaacatgttgaaactccatctctccaaaaaaaaaaaaaagttagtcgggcctggtggctcatgcctgtagtctcagctacttgggaggctgaggttggaggattgcttgagcctagaaagcagaggttgcagtgagccaagattgtaccactgcactccagcctgggcaagagagtaagaccctgtcttaaaaataaataactaaataaataatgttcggtagtctcttctcacgcctgcctcacccagatggaattcaaatagtttatcctcatcattttactccatcatttatggatttacatagctgatatgatcttgtacagccaacctgtatccacttgcctaacatgatggctggaacctagaaaacattcagtacatgttactttgaatgaatgaactaatgagcatttgctctcttctgtaataataatattatatccgacattgtgtatgtcatgccctatgctgaactcttcatattcaccatcttactttatactcatgataaccgtataggttgacactattattaattttaaatttgatactgtggcttagaacagttaacttgctcaaggtcacatagcaaccattctggcattaacagtagatccaatttcagacccaattttcttaaccactatactttacaactttccttctatctttattaataataatcagttctatgtatttagcacttaccatgttacatggtgcaaaatattttacattattatttccccaaacagctcatttatacccattagtaggtatgatttcctccatttcccatcattatgtgaccttggataagatacttgacctctgaaactgagttttcatctataaaataaggatgatccgaatatgcagggtttctgtgacagttctacagactatatgtaaatcatctagcacagtgcctgtgtgtcctggaaacaaaatgcacatgccctatcctgaaatcatttttgcatgaattcaatttaattcattaaatattatttagacaagtgaatagtttgcaaggcagtatcttaggcagaaatatctgcctgaacgctgaacaaaatgcctcagatctctttcagcctgagctaactggaagcaactctcttacaaaatgaacacaggttagttttcaaaaggaaggaaaagggtctctctggtgggcacagcctagaaaggccagatgtagtcagggcgcctccaaaggatgattccaactgcccagatgcatgcaagtgtacattttcccgataaaaaatcagcacacatggcttaagaagtagattgtgattttttaaattgatgtataacatacaataaagtactctaatcttaagtgtacactagttgattgtttttacatatggatacacctctgtaactccaccctgatcaagacatgaaatgttccccctaacccagaggggtttataatcagaaaagaacatctaaaatcagaactgaaaaccggaaagcaagtaaagaacttcgaaagctgggcaactgggaagctggatttggggaagggtattaggcaagaataagacaaaccggacttgtcttcattttaatggtgaatgtagagtacttctacgtgctcacattcattacgcccgtcgatcctcacaatgactctgcggtatagtagagacttaataccattttgcatgtgaggaaacagaaacttgttcggggtttccgaggaaaacacctccacctgaagccggagagagaaagaactgggtctccaaaccttgctcagcaaatccagccacgtggcagagggacagggaagagcctggcgtcaggttaccaggcagcgcccctctgctcggcccactggcaagcgctcccagcggcaggtataaaagctcaggctggcagtccttgaacactggtgctgaaccccgccgcgcgcgctttgaatttcccagccgctaagcgcctctcctggtcggtgtcccaggcagaaaggtgcagagacccatctgacgcaggactccaggtattttaggagggacccatcggcttgcttaattccctgggggattcgtctgaggctctttgcctctgcaaggggagaaccagccacagtttcccggaaggaataacaattact

SEQ ID NO: 14061 - DNA, 2300 bp, Homo sapien
acctatgaatatcctctcatatactttaagtcatctctagattacttctaacacctactacaatgtaaatgctatgtgaatagttattttattgcttcatttcttttgtattattattttttccaaatattttccatccgtggttggttgaattgggggatgcggaacctgtgggtcaattaagcagtaaagtattattagcccagagaaacacttactcttttcacctttaaggatttaaaaatagtggggcttattccaaagcaagtatagtggaaaatactacttaacagtagactgagatgctgtaagaattaacattctgggtgtaaagggcgatacaaatcacacagtagactctgcattatattgaactgagtgaatagatggaggaaggatggaagaacagaaaaaaggaagaaaggaaagacggaatgaattagaagaaattagccaaaaagctaggacttaggctctatgtacgctatgatcatagcttgaatgaccctagacaagtccctcagtttctcatctgggaaacagaaaaaatgtcttccttattggttttctgtgagaaagaaatcaaattacgtagagagatatgtggttgatagcacctgacagtcataagacctgcagatcagtatcaattcaatacaattcatcaaatatttactaagcccttactatttgcctggcattgtatcctgggtgctagaattacgtagagacgaataagacagccaggcttgtagcctggataaggcaaccgggatggaggcaatcccagttcttgatcttaggacttttatttttcatttattcataatagactcccgaaatccccttctggttgagctgccccagtccttgcccactgaaaacccacaaggctattagggggagacaaaactgtaaaccgaaaattccaaagcagcatgcgaaccgcaacaatggtggcccctagatgtaggaaggaaatgaggagggactgaggaactggagcaggggagttccgcggcggctgggtgggtgaaggcacctgaaagggacgatgcgtgggctgaattacagaaaataaacaggaattcctatataaagaaaaagcagagaaaaggcatttcagatcacaggaagcatcacatgcaaagccaaagaaacaggaaattgctagttccagcttctgccattaactggctctttttaacctttctggaatttcctcaggtccctctgggatttcagtcttcacatctcagaaaatgaaggtcgggggtggaaagaaggaatctatatttcgggaaggtgctttctaactggatacctccgtgctagagcaaaaaaaaaggggtagttttaaaaacgtcaagtgttattttagggcaggagccagaagccccatgttttgtaactatcaagatgacaggcagagcctgcagccattcagaggctttctccacttgatcttagccaaaagaccaagaagcgatcagaaattttctcaacgattaatttacccacttcaccagtacttagggcatggactgagccagggcctatgctatcaaaaagagcacagtctagcagagggagacagacagtaaataagtatataaataactggaaaccatattggtctgcacgctgcgagtgcgtggggacaggaaaacagaagctcccaggacgtgcaggtcacgtccaggttacatgcagggtgagtgacggtttatctcctagccaaattaacttcctgtttcctcgtccagcctcaccttctccaagaagccagaaacattttcagccgccaatttttccttggcaggacgacagggtgccctctcttcacctgcaacctttcccaggccttgcctggggctccacgcactcactgcaaatgcgggtcccagagctgaccacaaggtgcctgctcccgcgacagcttcgcgcagacctgagcgcccagtgcatgcagacctcccggcgtcgtgggagagggtggcgggaaggcgggctgtgcagcacctccgggttgggccgctggcggctgggcgggactcagcctacggtataagaggggagcgccactctcctggccgcagtactgaaggtggcgcctcggcagcgggctagaggccactggcactgagcttgcaaccagatccagagacactgaagaagagagaaaggtctgaagcggggctgatttgttgtgggtgcaggggagaggaaggctggaactggtctggggtcttaaacacgtgggggacgtttacagggtctgggggagggatccagccgcg

SEQ ID NO: 14062 - DNA, 2300 bp, Homo sapien
ctagtcttttacaaaattgacaaaaagaaacaattgggaagggacagtctatttactaaatggtgttgggatagctggctaaccatatgcagaagaataaaactaaagatggactaaagccttaaatgttaagacctcaaactataaaaatcctagaagaaaactcttctggatattgggctaggcaaagaatttctgactaagacctcagaaacaaacacaacaaaaccaacaaaacaaaaattgacaagcgagacctaattaaactaaagagcttctgcacagcaaaagaaactatcaacagagtaaacagacaacctacagaatgggagaaaatatttgcaatctatgcatccaacgaaggactcatatccagaatctataaataactgaacaagaaaaaacaaataaccaggctgggtgtggtggctcacacctgtaattccagcaatttgggaggctgaggcaggggtatcacttgaggtcaggagtttgaaacatgcctgaccaacatggcaaaaccctgtctctactaaaaatacaaacaataaaaaaaattagccagacatgatggcgtgcgctgtagtcccagctacttcgagattgtgccactgcactccagccttggcgacagagcaggactccgtctcaaaaaacaaacaaacaaaaccaaataaccccatttaaaagtgggcaaagaacatgaacagacatttctcaaaagaagatatacaaatggccagccaacatataaagaaatgctcattgctaatcatcagaaaaatgcaaataaaaaccacaatgagatatcaccttacaccagtcagaatggctataataaagtcaaaaaatcgcaagtgttggtgaggtttccttcctgactgaaatatatgtgtgtttaccatccaccatttggatatgtcttcatcctcctgccagacccagctaattggctaattgcatccacctgcactgttgggagggaagagagaatgatctgtaacctacttttctccctggtcttttggtgaacaggggaagcttatacactattggtgggaatgtaagttagtttagttcctgtggaaagcagtttggaaatttcttagagaactaaaaatagaactacgattcagcccagcaatcccattactggatatatacctaaaggaaaagaaatcattctacaaaagacacctgtacccattagtttatcgcagcaatattcacaataggaaagacatagaatcaacctaaatgcccatcaacagtggaccggataaaggaagttggtacatatgcaccatggaataccacgcagccataaaaagaatgaaatgatgtcctttgcagcaacatggatgcagctggaagccattatcctaagtgaattatcacagaaaaagaaaatcaaatactgcattttctcaaaagtgggagctaaatattgagtacacatggacagaaagatgggaacagtagacactggggacttcaaaagggggaagagaaggagaggggaagcgttttaaaaaataggtcgggcacggtggctcatgcctgtaatcccagcactttgcgaagccgaggctggtggatcacctgaggtcaggagtttgagaccagcttggccaacatggtgaaatcccgtctctactaaaaatatgaaaattagccaggcgtggtggttggcacctgtaatcccagctactcgggaagctgaggcaggagaattgcttgaacctgggaggcggaggttgcagtgagctgagatcgcaccactgcactccagcctgggcaacagagcgagactccgtctcaaaacaaaaacaaaaacaaccctacatattaggtactatgctcactaattgggtgataaggtcaatagaagcccaaccctcagcatcatgcaatatatccatgtaactcatctgcacatgtacaccctgaatctaaactaaaagtaaaaaaatgccctggccacatagcagatatgctgacatttctaccatcagaccaagtgttttcgctgtcatatattgcatattaaatcactgcagtgaaattttgtttttgtgtaaatttttgtgcgtggaaagggtccatagctttcactagcctcctaaatggggttgatgatgctaaaaagttgaaagccagtactttagagttgaaaagttggattcaatgatgggaatagattgattgtttccaaaagggttctcttaatatgtctgaatagtaattgctgtgcttctttgtgtagtaaaattcttaatgtggcctgatagctgtacaga

SEQ ID NO: 14063 - DNA, 2300 bp, Homo sapien
cactccccagattccacctcatccccacagggtccctgataacctggtcccatgggtgggcctgtcctggggcattggtggcattctaggggcatgtcccttgctgtgccatctctgcctccccctagtaagagctctgtcttcctcttcctataggaaaagcaagaaagccagcaaaaccggggagccctaaagaggcaattacaggtgagtggagggtgtgaagttccctcctgtcctctggagaatgttgctttcctcctctttcagcatttgcttggcttttctcctaaaggttcaattcagataattagagtcttgatgtttgagaaagcagaattgaagacaacactgtatcacaatgaacgtgctgccaggcagtttgaatgtgggaatctgggcacccgtcatccttcaacctggtgctttgacaggcctttagggggagtcctttgggccccatctcaacctctctcattctagaagaggccgaggatctggccagccatctgctgtattcctggcagcatgtgggagagttggagcaggagcagaggaaggcagatagggtgagtccaaccgcctgccccataccctggcagcccggctttccagatggaggagtgagggacctttaggtcccttctgcgggatggagtgtcctgcccagaaagcagcatgggccatttctcgctgcttttgtgcgtgcttgttagagtcagcctggggctgtgtcggctgctgtgggtgagttggggggtgctgtggggagcgagcactggatgcagagctcggaggccaagtgcctaccctgcccttacctggctgtggccttggtcaagtcctaggtgggagatatggtacttgcactgtgaaggtacagaagagtatctttagtatgttaacatttgtgcagagagagggaacacgtgtgtgtgtgtactatgataatatacataaaacatgtctgcaaggatttgtaaaaaactcaggagaaaggaccagggtggctgggagatatttcccttctgtattttctgagttttggactatgagaatgtacccttcaaaaactgaacacaagattatccccctttccatctgtgcccccacccccagctgttaaaagtggagggtgtccagcttcttgacgtcttgaacaaagaactggacaaaatgcacaaacaaagcgaggaaggaatgaaaggacttactgaaactgaaagcacactccacagtgtgggagcgcacccgagcataagggctcaaaggcaccattacagaatttttgggagtttaccccctagaggattccattggttacttggggtatgccctatgtaaatggagaggatgaagtaaagttacaaagtcatttagccataggccccatagagaggatatttcctgttatagctgaagtgtgaacaggccttatgttccctgcctccagatcctattttcctgcctcacagcgaaaaaatgggcttagagaatcagatatacctgggtgttcaaatcccagctctgtctgaatgatcttagacaagcacttaacctctaataccccatgtttttcaacgacacaatagaggtgataatagtaactgtctcctatggtggttgtgaggattaaatgggattgttagcatggtgcctggtgaagcactcaataaaggttccaacaatggcagtcataacggtaataacaatagtaatattctcttttttctctgggcctctggtagccagctgtaaattcgatctctttccctgtcccttccacccttactgagttatttgagaaacaaatgagactgtgggcttggaaatgccttgcaaacatgtcaggcgtgattgagagtgaggaagtgttactgtggaatagtcactgtagctgtcgttcctagtctgccagctgcttctctgcctgctgtatcctgacttcacctttctgtattttcagtacaacaaccagttaaccagagacagcgatgccctcaggctggagttatacaataacaggtaggacgggggagggtgggatgggaggtgtggggcccttagtgtgggtgatgtgctgggaggtggaagggctgcatgtgagcatggtgacgtggtcacacaggtttgaatgcgtgcacaggctacgctttagggccagctgtgcctctgactcatgggatagccttggggaactcatgtcttctctctggcccgccacctgtgacttttgattcctgaggtcccttccagtgccatggttctgtggttgtggggtgagggtagagggctgatca

SEQ ID NO: 14064 - DNA, 2300 bp, Homo sapien
aaggatgacgggtgcccagattcccaccttcaaactgcctggcagcagcacgttcagtgtgatacagtgctgtcttcatttctgctttctcaaacatcaagattccaattgtctgatttgaacttttgggagaaaagccgagcagatgctgaaagagaaggaaagcaacattctccagaggacaggagggaacttcacaccctccactcacctctaactgcctctttagggctctccctggttttgctggctttcttgcttttcctataggaagaggaagacacagctcttactgggggaggcagagatggcacagcaagggacatgcccccagaatgccaccaatgccccaggacaggcccacccatgggaccaggttatcagggaccctgtggggatgaggtggaacctggggggtgagccttcttcccaggctgggggtcagcaagacgagactagcacctctacatctgagtgccccccaaacccagcagtcatgctgtgagcaaagaaattacattactagtgtgattctagttgatccacaatttcctggttgtgctgtttccttgggagagtcaaaggaaggtgaccaagggtggccccctccactctattccccaggccatgaagcagtaggcaggggccaggagtggattttaaaggcaaagttatcagacccactaggaccatgaactggtaaactctcctcaagctcccaaggacagaggatttgggactttgttggttttggcccacagccacagaactgaaagtctgaatctggattctctcaaaaggacagtaacataaagctctatgaggcaggaaaataaggtctggaggcagggaatctaagactgtttcgcgctgatttcctagaatcaaattgaatggtaaagagtgagaagttcagatctggggatcctgggccattccacacagtgccctttaaaaggtctagagctgggctcaatgtacaacttggtcaataaagatctctactgtgaagttgctttgctttagaaataaaatattaaataatttttaaaaagatctcaggccaaggatggtggctcatgcctataataacaacactttgggaggctgaggtgggtggattgcttgaggtcaggagttcaagaccaacctgggcaacatggcaaagccccatctgtacaaatacaaaaattacccaggagtggtggcatgcacctgtagtcccagctacttgagaggctgaggcaggaggatcgcttgagcctgggaggtggaggttgcagtgagccgaggtcatgccactgcactccagccctagtgatagagggaggccccatcccaagaaaaaaacaaacaaacaaaaactctgctatctattatcaccgtggaatagttgaagtgttggcttgaacctcagaaggaaataaacaggctcatgagctagccatataagtataatctatataataatggttttcatccatgatgcatttaaaacaaatttaagccctaaccctgagattctggttccccaggtctatggcagggcccagtttgtagatttttagcagtctctagaggattctatggcaggaccagaacaaggacccaaattttccggctcttggctggagcctccccataacctgcatgatccctagaccatgtccccagctggatggggctcccaccacccctggggctgcagcctcttgccagaagcaggatcttagccctctccagcttcctttgcagttgcttcagattgagtcgaaatcttcggtcactaggacttgaagcttctcttctagttctgagttcttctgcttccggtcctcgttgttttggctatggccagaggcagtagagaaaagaatgaacaaagaacagaaaggactactgtggaatcaatgaagagcagaaaggactgctcctctatcctcacctcaccccacaaccacagaaccatggcattggaagggacctcaggaatcaaaagtcacaggtggcagtccagagagaagacatgagttccccgaggccaaagcatgagtcaggggcacagccggccctaaagcgtagcctgtgcacacatgcaaacctgtatgatcacctcaccatgctcacctgcagccttcccacctcccagcacatcacccacgctaagggccccacacctcccatcccaccctcccccatcctacctattcttgtatgactccagcctgagggcatctctgtctttggttacctccttgatatactgcaaatacagaaaggttaagtcaggacaaaacagg

SEQ ID NO: 14065 - DNA, 2300 bp, Homo sapien
gtttaaaatataaggacatagaaacatagaatacacttatttctctactatatttaacagctacccagggcataacaaagagtcattagtaaactaaaagatttattagtttgtagcataaaaagaaaagaaaacttgaaagaagtttttaaaaggaactgttgttcttcttaacacttactgtttttaaaaagggaaactttgaagaggaactttttattcttaacacgatgatgcagggccctcccagtggatacctgttgctgactacaaaagatgagagtgcgcatggaaatgttctgcccctcagtgtctaagccctatgacctcctttcttccccagcaactggcaatattttcttttctgcctatcttgaacccttcattccataactcttttgtaccaaattctctcacagttcttatctccccaccatccctcccttcagagcagctctcatctggtgcttctgcagcaaaaaatgatgcaaccagtcatgtggtccaactccttcacgtgaacagcttcaagggagaaggctaagggaaaaggcgacttcctcaacattgcccagcagcaaatcagctgctcccaggatctgtcctctcttgcaaaaccctgcctcagtttctttctatcatactttccttgcccctgcaccccactctgggcttcaatttctgaggtacctcagaggcaacaccattgagctgttggtagagttactgcaggctcttggtcaatgagaaagtcctaggggtggagacatgggtcacgggtgcaagtggcttgatgggaaagaaggtcatgggcagtggccttcctgactcccttggcctagaggctgctgccccaataggagacactcacttggtttcacctgtaagattagggccattgtcagcatcatgtttctgtgtgggaagaaacatataagagggtcattcaatttctggtaacaatcacccagggtggggtgagccaagctcccaagctcattccaacaatcttgcatctccccagacctcaaggaaaagtccagtctcagccttcccccagtccagttcccaggaaggccacttggtcctagagaacaagctacctgtgagatagcgagaccccgtctctctaagttctcaccatgttgcccaggctggtctcaaactcctgggctcaagtgatcctcccaccttggtctcccaaagtgttgggattataggtgtaagccactgcacctggcctattaactgtgtttctgattcaggccttttcagggaaaaaaagttgcccaactggaagcctctccccgctctctgtaggtaaaaagacaataaaccacagtcaccacccccaccctgtccttttacatccagaaacatctacccaaccaagaaacaacccaaaaaaacagacataagacatctgccctatggctcttggcaacttagaaattgtggggcctctttcctgagaacagcagttggggaccatcctaggattcaggacttggagtcatttggagcctctcccttgccctgaactggacctacttgcttgaccagagccccacccagcctgtctccaggctctggccttactcttggcccaagcatctggctctagagatcttctaatatccaacaggccaggtgggcagacagtggaaaaagctggctgaccagctaagcttgacaagagaaaaccaccagggagccagggcctggacagggaagctgggtttggaggaagtggctacacctcgctccagggaaaggactgcctgctcactggaccctttggtcctggcctctgaaaacccaaatctgcttccctccttagagcaagtgctgtagaggctggaagaactgaagataattttaagtcttgtagctaagaatggagtttaaaaaaaataaagcctactctcctcaaatggtcccatcccattaagatttttttctctctccattattccctacttctggaaatgttatcagctctactcaggatactgcaatcacagacctacactcctggagtagaaaacttacatggttggccaggcacggtggctcacgcctgtaatcccagcactttgggaggccgaggcaggctgatcacgaggtcaggagatcgagaccatcctggctaacacagtgaaaccccgtcaccactaaaaatacaaaaaattagccgggtgtggtggcaggtgcctgtagtcccagctacttgggaggctgaggctggagaatggcctgaacctgggaggcagaggttgcagtgagccaagatcacacca

SEQ ID NO: 14066 - DNA, 2300 bp, Homo sapien
agaagggaagtgcacacccacgtgtgtaagaacactgaggtgaggggtataaggcgagttctaggaatgtggagtaattaaatatggccagaaaatagagggatgtgcatggggtataggggaactggatgaccaggcttaggagggaagtgagcacatatttgcgaaggcctgatgagtctttctaaaaaactcctggcagcattgagtagccacagaaaccttcctttttttttttttttttgagatagggccttgctgtgttacccaggctggagcgcagtggcacaagcacaactcactgcagccccaaactcctggactcaagagatgctctcacctcaatccaggtcctcactgtgttgcccgggctggtctcaaactcctgggcacagtcttcctgccccagcctttcaaagcactgggattataggcatgatctgctgtgcccagcccactttttttttttaatatataaatatttttatctgctgtcattgtaacccttatttcttatagaaaatatatacagaattagaaagtaaaagcaaaatacccatagcccccacctctcaggaaaaaatttgtattttgaccaacttattttcaggttctgccccatggcattaatttatttcttgagtcgacatagttacgatcataagtacaatttagttatctgtttttttcccacttattatagagtgagcattttctcaaattcttgtaaacagtattttactggctaagtagtatccactcgggagtatgaaatatggttgacttaaccagctctttctttcggatcattcagttgtttccaagaccttattagcataaagaatgaatgtttagcatcttgatttgtgaaagcatttctgcacctgagattatttcctagtgttaaatctgcaacattgtgattactagttcaaggcagtggacattttcaaagatgtttgaagtttggaacacattgtcagagtccttccctaaaagattgcactgaccgaaaaatagtgtaaagctctctgtgtcatgaggcacctggaggcctggtgagggtggatttgagcagcaagatgctggtgggagtaatatccagacaaagcctcccccaaggcgatggcattgctgagaaagaatgaggggaccagccaggagctgtggctcacgcttgtaatcccagcactttgggaggccaaggcgggtggatcacttgagggcaggagtttgagaccagtgtgacaaacatagcaaaaccccgtgtctactaaaactacaaaaattacccgggcgtgatggcgcgcgcctgtaatcccagctacttgggggtggggttgaggaaggagaattgcttgtacctgggaggtggaggttgcagtgagccaagatcatgctactgtactggagcctgggtgacagagtgaaactctgtcttgggggaaaagacaatgaggggaccttgcttgaatgtgaaatgtgtaggcttgtggcacatcatgaacttcggccaggcatgctaaagatgatgccttttggtttaggacctccagaattccctcttcccgttccccctgtaatctgtaccttgtaaccatttgcttaaatgtcactttcccctactgagttgagttctctgagcccacgaccacagatattattagcatttttatgtccctaattattatttaattaaggtctataaaatggaagcggggtgaagggaaagggggctgggcatggagtgtggcttgggcaaggaacatggtccttgtcccagtgtggctggggctggcagggctgggcagcaggagggagcggcaggaggggaggggacaaacctccctgccctgggcgaggtagagtggagcccgagcaggcagaggtggaagatttgactctccatcgtggccctggtttcaccactgagtgatctggggcaaaccatcgcattctgtctatgcttcattttcttcaggagggtgccagcagcagcaatctctttaaatggaacattgaacgattatttttggtctataggtaagaggtacaatttaaagaaaaggtagggagtgatgaactcaaactcagaagactcacaagtagtcctcttcagaatgttggaagcacagtgcgtggcccatggggagtgctcagtctgtgttagcaacggagatggataatgacagccactcatcagagggtacctttctcactgaccagctgggaatagtgtgtttctttgggtagtctctgccccttgacagatggaaacaccttctctcttgaccctgccc

SEQ ID NO: 14067 - DNA, 2300 bp, Homo sapien
cacagctgtagatggttcaaactgcatggtcttcaccacgttgcagtggcgcacacaaatctttaaggacagggccaccattttcctagatgatgtggacagtctcacttagaatgtctggaaaacacaaagagacaaaccctgatgttcacgataataatttgtcttggggaaaaaaaaacaaaaaaagtgctggactttaaaatcaactttaaacatggaaagagaataaaacagcaaataaagagtacactttaggtacaaaacaaattttacaaatcaattttgaaaaatttaaaggaggacaacaacagcatattggctaagagttattactacagggtgacaagtagaaccccttaggaggagggagctccagatgttcaccacacctccctctgagtagtccccctccttggggtttctgagagaaggtcctaggagtggaatttctagggttaatgtcctcaaggcaagaggcagagagccttgggcacctatgactgggtcctaaagacagcctcagttccctgggtcctctcagcacctggggacagagaagaatcagggaagccctctcaggtgctcctcttggcacaaaagctccaccacccttggattctgggcccagctccatcactaagagcctgtgtcaatctgagaaagtcactttggccactctgcctcaatttcttcacaaataaagtggctataatgatatcagccctgcacagtgcataaaatagaatcccaagaaaagatcaacatgaggccagagaggccaatcttaaacccaaagggtaccaagaagcttcacgtgattggggtctcaaagggaataaaatgcaactcaattctgatttgatttagacaaactatggagatattttgtttcttctccagttcaatagtttcagaaaatacacaggtggctgggtgcagtggctcatgcctgtaatcccagcactttgggaggctgaggggggcggatcacttgaactcaggagttcgagacagcctgtccaacatggtgaaacacggtctctattaaaaatatgaaaattagcctggcatggtggcatacacctgtaatcccagctactcgggaggctgagacaggagaatcgcttgaacccgggagacagaggttgcagtgagctgagatcatgccactgcactccagcctgggcaacagagcaagactctgtctcaaaaaaaaaaagaaagaaaagaaaagagatgagacgagatgagacgagacacaggtttaggttaagtttgaacttgctcataaatgctttcttttaaaaatgtaagttcaacaactcagtgtttttcctttgagttggtggctcacggtgtatttccagtgcctgctctatttcatggccagaaacttacctgtcccctactcacttaacccaagccagtctctatcaaatatactccttgggcacaagacagaaagaaacctgtatcacaaacgcttttttctttgtgcctgaagaaccagctgagtgtcatcctagcaagcaaaacaaggccctttatagttagtagctaatagaatcttagagcagcccaggtaacatcaatccacaggtatttcaagctcactctctttcttgtgttttatgagagaacctgcaggtagtaaacctggactccagcttcttcccacggaagaagggaggtgctaggaggcaacaagatggccacaaggcagaggggacaacaggctgcccaggcccaggcagtgcagcgagtgcctccagggtctcagcttctcagcatgcttgattgctggcgtcctaacgacaggtggctgggtcacatggatacaggagatgtttttcaacagatgctttggtgaatgcgggcatggtttacacggtctcacaaagcaacctttcaggccgtccaactgcaatgtcattctgacccctgcttgcattctgaatgaattttgccatgaaaattgtgaaactattccttagttgagaaaggtcaggatacacttctcaataaacaacagcagtgttcactgggaatctgcctgaaactgaattaagtaactaaggcctaggcagtggctggattgctgacacagcagaggggttcaaaatatctggcaattcccaactgcaatattgaggacttttaaagccatatgtaaaagcttcctccacccctctctttataggcctagttaacccagcaactccccgattgggggaaataaaatttaaactctagagataaatggactaatttgctgtgatgcagatcattccgtgggc

SEQ ID NO: 14068 - DNA, 2300 bp, Homo sapien
agcttttacatatggctttaaaagtcctcaatattgcagttgggaattgccagatattttgaacccctctgctgtgtcagcaatccagccactgcctaggccttagttacttaattcagtttcaggcagattcccagtgaacactgctgttgtttattgagaagtgtatcctgacctttctcaactaaggaatagtttcacaattttcatggcaaaattcattcagaatgcaagcaggggtcagaatgacattgcagttggacggcctgaaaggttgctttgtgagaccgtgtaaaccatgcccgcattcaccaaagcatctgttgaaaaacatctcctgtatccatgtgacccagccacctgtcgttaggacgccagcaatcaagcatgctgagaagctgagaccctggaggcactcgctgcactgcctgggcctgggcagcctgttgtcccctctgccttgtggccatcttgttgcctcctagcacctcccttcttccgtgggaagaagctggagtccaggtttactacctgcaggttctctcataaaacacaagaaagagagtgagcttgaaatacctgtggattgatgttacctgggctgctctaagattctattagctactaactataaagggccttgttttgcttgctaggatgacactcagctggttcttcaggcacaaagaaaaaagcgtttgtgatacaggtttctttctgtcttgtgcccaaggagtatatttgatagagactggcttgggttaagtgagtaggggacaggtaagtttctggccatgaaatagagcaggcactggaaatacaccgtgagccaccaactcaaaggaaaaacactgagttgttgaacttacatttttaaaagaaagcatttatgagcaagttcaaacttaacctaaacctgtgtctcgtctcatctcgtctcatctcttttcttttctttctttttttttttgagacagagtcttgctctgttgcccaggctggagtgcagtggcatgatctcagctcactgcaacctctgtctcccgggttcaagcgattctcctgtctcagcctcccgagtagctgggattacaggtgtatgccaccatgccaggctaattttcatatttttaatagagaccgtgtttcaccatgttggacaggctgtctcgaactcctgagttcaagtgatccgcccccctcagcctcccaaagtgctgggattacaggcatgagccactgcacccagccacctgtgtattttctgaaactattgaactggagaagaaacaaaatatctccatagtttgtctaaatcaaatcagaattgagttgcattttattccctttgagaccccaatcacgtgaagcttcttggtaccctttgggtttaagattggcctctctggcctcatgttgatcttttcttgggattctattttatgcactgtgcagggctgatatcattatagccactttatttgtgaagaaattgaggcagagtggccaaagtgactttctcagattgacacaggctcttagtgatggagctgggcccagaatccaagggtggtggagcttttgtgccaagaggagcacctgagagggcttccctgattcttctctgtccccaggtgctgagaggacccagggaactgaggctgtctttaggacccagtcataggtgcccaaggctctctgcctcttgccttgaggacattaaccctagaaattccactcctaggaccttctctcagaaaccccaaggagggggactactcagagggaggtgtggtgaacatctggagctccctcctcctaaggggttctacttgtcaccctgtagtaataactcttagccaatatgctgttgttgtcctcctttaaatttttcaaaattgatttgtaaaatttgttttgtacctaaagtgtactctttatttgctgttttattctctttccatgtttaaagttgattttaaagtccagcactttttttgtttttttttccccaagacaaattattatcgtgaacatcagggtttgtctctttgtgttttccagacattctaagtgagactgtccacatcatctaggaaaatggtggccctgtccttaaagatttgtgtgcgccactgcaacgtggtgaagaccatgcagtttgaaccatctacagctgtgtacgatgcgtgtcgagtcattcgggaacgggtgcctgaggcacaaactgggcaaggtaggtcatgggttatttactggcttcttaaaacgtgtttgcatgtttttcacttttttgctaa

SEQ ID NO: 14069 - DNA, 2300 bp, Homo sapien
cagctccctccacagccccagccttcaaaggagcattgtcatgggaggcaagataccagttctgtgttaaaccctggacaccactgaagggaaaggcattgaaggagttaacactttttagttaagggttttgtattcattcagataggaggtttggctttgctgctgggacagtcctagagtaagagaagttttcccagttctctccagaggataggacactgcacacctcattttgttttgactacaaaaagccagtgcaattgcatgcagaaatcagtcaacaggatgaccaagcagaggcaaaaggagagaacacccagcccagcgctagttggaagctggcagtcagcacatggggctcgcaccccagtcagcagcttcttagctgtttaaacaaagagtctttttttttagaaatgaacaaacaaaaacccctccctatttgaaggcaagagtaagctcagttgaagttgaataaagccagtgtccaggttccccatgatcctggtggcaggttacctgaattaccatcatagttcacagtaattaggaagtaataaagcttacatttaaaaatgtttattttgtgctttaggtatgttactcattcactccatacaaccaccctgtgcttatccccattttacagatgggaatctgaggcacaaagaggttaagtaactttaccaaggtgacccagccaggaagtggtggggcagaattcaaacccaggccccagagcccctgctttcagccctggcatgctgttcacctctttgggatggagagacgaagtcatctctccagcctgggaagaaagaccttgctgtgtttgcagggcttgtgtgtgagtttggggaggtaagggtggaaagagcgatagagttgacagcagtgacatcgttggttgctgtgtaatgagcttatctcagttaaaatcaatcattttctggtcgttaaaaaacattatatttagatggaccaacggagtaaaaacaggaaagacactctttattctgtcgaaatttctggagccctttcttgtctgcctcctcttcagttttaaatcctgacctatctctatataaagcatctctgttaagatctcatgttcttttcagattctcctcacagtgtcaaaccctctttgcgattccctgcagcaaatgagctctcgtgatggcctaaaagataggcctgtgcagaacatcaggggaggaatgtcggggggttgtaacgtggaaaagataaaggcctccgtctcctggcgcaccctgggaacgaggagcaatgcaagaggaacagaaatgaacgtgctgcccctccgcgtgtggaaatgggcctggtttttcaattcccatcatgtggcagggtttgctgggagccatgagctttgcttttaatttactaacaggaaagtggtaaaggtcatttcactgtagcacatggtactatatactgaatagatttcctgtttgaaggaatggttatgtgttctgtcaaacagaaaaacaaatgaatatttaattccctcagtgcttaagacaggtgccctgatagctgcatattgctcttaagttttatgctgcttagtgctgtttttttcttttaaccatgaggatgtgcccaagcctaaatcccagctgccacacccttatagtcatgaagaagggaggggagccaccaagagaagcacgagggagcaggagcagattacctcacacagtggctcatcggcatcagtcactactgatggcactctttaaaatcccagagcagggctccacgagaatccatttctgtgtttctgcctcctgccagggatggctgtaaatgctgggcatggtagaaggatgcacacccctaaccacagcggctgtctctccgagtcaccacatacgctgttgcctgcctttttcctttcattcagctcattacctagtcttgaatcagatgtgtggaatggaatgttattttaaatgtgcagtcactcacatttgggtgccaagtagaaattatgcaacagcagcgtttgtttttctgagaagttgaagtttggccttgcccctcacagcagagttaaagctcggggtttttgcaattaagcactttcagtgtgtaccacagacacccgatccagctctctttaatcgaatttgacttggctgtgagtatgctttcttggtcatccctatgtttggattgggaaagtggtttctttagaaggaaaaggaaaaaggctgttgggctttttactccttgttctgttgcctttgtctaaggtcagcaggagagaa

SEQ ID NO: 14070 - DNA, 2300 bp, Homo sapien
tgtcatatgcattctcctatttgaccctcataagagtcagtgtggatggctctatccccattttacagatgaaacccctgaaaagttttgagtgatttatataagattatgcacctaataaatggcagaagcaggacttgaaccaggtctctcttaactcaggatgttttcctcagaagtgtcccccagacccagaaatcacatattcacaaacgaacatgcagctcctcaatttttccctgggtttatcccaggtatcaaataaaggtgagggaggtgtgggtcagagagggactcaagagggccaaaaaatggaaatgcactttaggcctttcacaatacaacaagaattctgagatttctgccatttatgatttgctacatgactgatgtaaacatacttttagcaatacagacaatctacattttaacacttacaataaaaaaatctcgaaaattggaaacaaaatgtccaaagtatagggaaattctggcataatcagttgatgtaatatcatgcaatcattaaaaatggaactcatgaagaatgggccagctagctttgcatagagaagttaatgaagccttatcttcaaggaaaaattacatatgataaaatgttaagtgaaaagaaagcagaatgtatctcgccatgattacaactggacaaaattattttatatgtagataaaaacgaacagaaagcaatgataacgtttgctatatgaagatgttggggctgtgtgatttttttcatttaagcatttcttttattgtatttaaaatatttttataattaaagcaatcaggaaaatgtatctgctctgagaaggacttgattgttaccttcctaacatgttctctgggctctgggaaacagcaacagtctcatagaatttcagtcattttactcccttctgtagcagacactggctgaaggcctcctctgaagcaggcaccgagttagtaacgtatgagagaggcacagatgaagatgtggtgcctgcatctaagaggctcacaacctgctcacagacagacctacagtagcaccatgtgatgggaacctgagtggtctggctaggggctctcaaagcacagaggagggataaactgcccaaaccctgggagtcagggagggcttcccagatgagtcacaaaggacaagtaggggtctgctgggttgggctggcgaggagcagggccccagggcatgagaccagaaggcacacgaggagaatggcagcgtggtggggcagcagtggaggatgcatggacgcacgcagtagatgaggctggaacgtggacagggctggctgatggaaggcctggtgggtcatgccaaggaagtgaggcttgtcccctctggtgacacttacccgctccaacaggagtattttcccaccagcatcagtgaccattacctgtagccgcctcatggcctctgaatcctggtcggccttcaccttgcaggccaccagcagctgagccgtggaagcggcgacctgcttggcagatgagatgagcttctcctcgctggcgtgtccctgaacggaggcattggccgcctcacagagactgctggtcgcagccgccaccatccgggcctggggacagtcaacggagaagtgacccaaggcccaaacctccctcaggggaccccaaaagcaaactgggaggaaggagaaggcaactcacagcagaaatcagcccctgtgaccactgtccgtcgtctgcagcattggcagggatggagcccacctagagagtagagtcgagaaattggccatgagggcaggcagccccagtggtcgcagcccctcatccccagaccttgctcgggaaccagacttgtaccccgcttggtgcctcctgccaacagcacaggcctgagaatggagcaacctttctcacgtgggactcaggccatgccaagaaagattgcacagcacatcctggcaggtttcgccaccaagaggcgacaggaaatgctaagaatggctccacttagcttccaggtactgcaattctgggaaacggctcaggaatgatgacctggggctgtctttctacacttactcctctgctgagctttctccatttcatatgtgggagccactaggcctcctcttttcaagggctaagagaaatttaaatctctcccgattactgaccctgaaaaccacactgcgtttctggcagatgatgttaaaaaagtgtggtggaactccctctggtacaattgagtgcagacccttgtcttaaggaaataccatttgtcaggggtgggagagaaatat

SEQ ID NO: 14071 - DNA, 2300 bp, Homo sapien
gatattgtgatagggaaaaaaatcattgacgtcatagaatattcttcttcctctcaggagaagacggaagctggagttggacatggttcataaaagccagaaacacaaacccgtgtggactccgggagggtgactcaggtcctccttccatgtcttgagcactggctcacccagggggtgaaaaattcccgcccctgtttgcacgctttcttgcctccgtgtgtaagctccttgtacaacccagacccatcttgtattttgtggcccagaaaactgaacgattattttgttcctccgtagtccaaagggcagagttgcggaaggccgtcggggcttggtgagcaggggctgtaatacagtctgtgggctccttaccctgcagaggctgtttcagctcacacagagtcatccacacaaacccacggctcccagttgacagtcagtggaatgctcgtctccttagcgtccagggtggggattctgctggaataaagagcttcctcagtgactcatctttaggtcccacgctggtttctgtgccttcagaatggtcacaagcccggattggaaaggatctgcttacaaacctgtcccctgtcctccaacccaaaacgcctttttttctgtcttaatatccagaaaatctaaatgcatcctaaaatcaatgtgaacctttaacaagatagttttacttattatcacataagacataagatgttttcattttctggatgtcacacttccagaatttcatatttttcccctcttttctttccccttttcagagccctcccataggaagggaagggcttgaatttacccttaatctgcacctttagccaaggcagtgcatggaagatgaatggctcgtgggacagaatctaatgccagggagcaggagtgtttgaaagaattcatagtggggaaggtaaaagttaatggaagtacatgattttcaaaactggtaacagttaaaggcactcaccctccgcctctctctctctctctctctctggtgtgctatcatgtcttggactccatccacactatagtttcaaagttccactgacgggggaaagttggtgctttggtcctccgaagatgtcacctttcgaccttgcccgatcttgtttcaccagactctagcccatgtcatggttttaaaatacataaacttctgacagcttcccatatttataagttacttataagtgctgcacgtattagaatttttttttttcagaccagtaaagttagagaaaagacgctgtaaaggaaaagcaagtgagagtatgtgtaggacactgacagtgtgtgggcaccagttctgaagaggaggggagctgctggagccctagcctgttggggaaaagctggcacactcttggctcgccctctttgagtggagctgatccaacacctcatgcctgccttggccggacactgagaggaggggcacacgtgcttccagagacactcaggagtcagaccccaatgctcagagtcacaatgtgttcatggcctcctgtaacaggactctggggatcccctctgtggcccagcccaccccaccctctgctcttctatgctgtgcccagggcagctgccctcttctgcctgtgccccatcccatcctgaaaacccaggaccaaggcaggggcaggcagccagttcttccaccttgcctcagagtcatttaaaacctttactgcatttgataccagaaaagcctccagagacaaaccaaatgcaaaggcctttcctttataactctaaagaacaggcatcgaaagtttatttttgtaggagctatataaatactcacctttctggagtcgtccagtgctgggagctttggggagtttggttctcagttatcacctggtatggtcccagtttctcatctgtcctttcctcatccaccctgcacatgtgtatgtgaacggcttcgtggccggtgtggtggtttctcatttcataagatagttgaagggccatgccttgtctggatgttatttaataggcactactgcggtgtcctcagatggtactgagggggccttctggtccttcaaaggaaaataacacaggcatgagttcatttgggagtgtgaactttcagaacacctaataagagagtggtgtcagagtaaaaacggccccaggtctggagcatagaagtgtatctctgtgaagagagagccggtgtgttgacatgtggttcttctcacacccctctactcctcgagggctttgaatccttgggctgatttttgtgccagaaattgctgttcccgatg

SEQ ID NO: 14072 - DNA, 2300 bp, Homo sapien
catgttaagtgtatacaaattcacaaacattatatattcttaatgggatgttgcttttataactttataatgtccgtattcttaataatgctttggtcttgtatttgtctgttctcacactgccataaaaaactacgggagactaggtaatgtatgaagaaagagatttaattgactcatagttatgcatgctgtataggaagcatggctgggaggcctcaggaaacttacaatcatagtggaaggtgaaggagaagcaagcacatcttaccatggcagagcaggagagagagagagtgaggtggaaagtgctacatacttttaaacaaccagatcccatgacaactcactcactatcatgagaacagcaagggggaaatctgcccccatgatccaatcacctcccaccagggccttcccccagaattgggaattacaattcaacatgagatttggatggggacaaaccatatcaggccttaaattttatgtggtctgatataaatattgttagttatgtatattaattacatagggccgccataacaaattaccataaactgggtggcttaaacccatagaaatttatttcctcacagttccagatgctggaagtctgaaatcaaagtggaatcaaagcctgaaattggcaggaccatgctccctccaaatattctaggagaggagcctttcttgtctcttctagctcttagtagccctaggcagtcctccgtttgtggcagcataacaccagtgtctgcctcccccatcacatggctggcttctgtgcatctgtgtctctcatctccttataaggacaccagctgggcatgtggctcatgcctgtaaacccagcactttgggatcccaaggcaggtggatcatgaggtcaggaattcgagaccagccgggccaacatggtgaaatgccgtctctactaaagatacaaaaaatcagctgggcgtggtggagtatgcctgtaatcccagctactcaggaggctgaggtaggagaatcgcttgaacccgggaggcggaggttgcagtgagctgagatggcgccattgcactccagcctgggtgacagggtaagattacatctcaaaaaaaaaaaaaggacaccagtcatattggcttaagggcccaccctattccaatatgacctcatcttaattttattacatctgcaatgactcttttcaaataaggtcacattgtgagatactgagggttgagacttcaacgtatcttttggagcatgcagtttcacccataacaatatatatttcatgttttggttagcattgaactggtatatctttttctaactttttatttccaattgttatggttttgctttaggtgtatctcttataaactttgttcatttgttttatctaatctgagaatgtttcatttgagaggtaatctgtttacatttattataatgacgtatagtttaactgattcctgccatattttgttttctatttcccacccttttgttttgctttggtttttctcctttccagctgtcttagtccccccaacacacacacacacacacacacacacacaaagcagactctgaaataatggcttgtctgcagcttgtttattttaggaaatgattcaacgaataggagtggggcgggggctgggaagaatgaaaaagggatgaagacaaagctgatcatcaccataggcaaatagggtcaatcctattagggaccctagaggagggacatggatgcatcttggtcttgtcttcagagacactaatattgcttttcaaatgtggctgtgtcattttaccttacatttctctatcacatatagagcagagagtatttggagcagagggcgtacattgcagcatgaatttacaccactatcctggcatgtctgcatggctgccatttaacttctccatcatcctatgaggcactttatcatccctattttagaaaggaagaaattgaggctcagagaggtaaagtaaattgcctgaagtcacacagataaaaagtgacagagccagaactcaaactctgttttatctgattccacagccattccttccaaccttaagctctaccgcctgtgtggtgctgggtgtgagtcggagctagcctgggtttacctgagttgcagggtcacccctcatcgcacccttgtcagtcctcaaataggggtgcaactgttccatgaaagggaacaaagagactgagctactagacaccaagctgtttaggactgaacccattcctgtccaaacggaagtgatccagagggactctg

SEQ ID NO: 14073 - DNA, 2300 bp, Homo sapien
tggcgcatacaacggccctcctctctagctaactgctacccttcctttaaaatcagtttaaaagccatcaccttttcagagaattttttcccatctgctctgacctagtcatttctatttcttcctcgtgtgaattcttaacacctttctcatgccaaacacctggaggacatagacctgtgctactcattctttggattccagagcctagtacctgcctagtatatagcaggtactcaacaaccgtgtgtttaataaattgcttgtagcatgatttcatttaaggaaactttaatgagtccctcggctacatatggcacagtaagaaaagaaaagtcagtaacatgtggtcccgcaaggagtttctctagttcagttgcctctttttataagtgagaaaaaaggcttagagagattgtaacatggctaaggtcacactgcaaggaagtgaccaggccaggtctggatccctggaactgactcctaactccctattcttgcctcctctgctgagctccaacctggggagtcagctccctggagtccacgcatctggatatcgtccacatgcctggaactttgtcactgttccggtggctgggttgacacaccgtgattaaagggctctggtcaatttctgtgccacgcagcccctatgctaatggtcagatctaatgttctgaccattaggtcagtgtatcttttccctcctgggcagttaggttagtggaagaaacccgataaaatcttggagaggaatttgatcattctctgaaggacttacaagttgtttggcctgcctaatctgctcagataccgtccggggaatatttggtaaccatgcagtacagactgtgaattattctgtggggactattaacaagaccctcaccaaccctgcctcagctgatctcagggcttgggggcagccccctctcctcccctcccactgaagctctgaaaaaaagcagcctttcccccttgggagatgggaggagtagttaaaaataagaagtgttgggggaaatcctcctccttccaagcacagctcacacggcagagcctcctcagagttgcggctgcggatgcaatgacttagccaggttaacgccgatcccatgttttccgaaacctggcacctaagcatctaacatggaaggccgactccctaaaatcagtgcaagaaaaatgataacaagttatatctggagggacctcggggattatctacccgctggatttaaagttgaggaagccgcgggcagcaaacaaggtctcacagttgctggtggcagagtagagaccacagaccaaattgcctgagtctaaactcaatgttctttccccttagactgccacccgcacacacacgcacacatgcacacctttttggaggcactgcacagcaagcacagaagtacgccactgagtcctgtgtccctaaagtatttgactgtccctccgctgggggaaagggcaggcagaaaacaagactccgtgtgctgtcgctgtgccgccccctgcctctctgacccgcgcccgcagagaaagtctcaagagccgccccaggctttctcccacgttctccctttctctgctgcagttgagtttccagagcgtgagcgcgcaggatgacacctggctggctgagagctgccggggaggcgctggcgggtgccgagagcgcactgaccctgacgcggggtgcagcacggctgggaagcccccgggcctttggctaagcgcgccgggggacggcacaggggggcgacgcgcatccaccacctggtccgcgctctcccggcctccggcagctcagggcgggctcggttggggaccctaatggctgggtgccggccctgggagaagggcacgcggagggcggagggttgcgcctcggccccggctcggccccaacgccctctccctggcgcgcaggtttagaaacagggcggcctctccggccgccgcctcggcggctcgggtccccatatatagtcatatccaccgtcaactgggaggccggcggccggcagcgaatgggcgagcggcccccgcgggaggagcggggagggggcacggggcggagggaggagaggaggaaggggggcaggagaaaaaagcttttccaaaaaagtattggctgtcttgaggaatgcggtcgcccccttgggaaagtacatatctgggagaagcaggcggctccgcgctcgcactcccgctcctccgcccgaccgcgcgctcgccccgccgctcctgctgcagccccagggcccctcgccgccgccaccatggacgcc

SEQ ID NO: 14074 - DNA, 2300 bp, Homo sapien
aacatcattatgcagtgcatgaccatattgagagtattcgttttttatttactaaaaaatagtcaaaacttgaggaggaagagacagatgtcactagaaaaagggagaagtccggtaagggagaagtcagcttcctgaggtggaatcgtattacctttgggattaggacatttcattgtcattattcaccagtgtaaaacacttttacatttttctactattattactaaaaacatttttctactactttacaaatcctattctggaagtgggctctacctagcttagaagattgtcattcaggagtagtatccctgatggtcttgtttcgaattttgtgttgtctttccacctaagtcaaaagtgaggctgaaggggatcgaagactccatttttttctggcccccaatctcttccccagtaactgtgatatatctgatatttatagcatatgagtctttatccctttgtaggtctttacttcttaacttagggattctcaaccttctctaaacataatcacttagggagcttttaaaacccaaagttaggatgcacccaaagccagttaaatcagaatccctggggatgcaacccaggcggcagcatttaaaaaatacccaagtgattccaacctacagacaaggatgagaaaactctcctaaactcttgtataatgacatcggcatgaaaatgaactcacctgaaactgaccttcccaggacattaagtcactagttggctgcttatggcacttgccagtgtccagcagtttcctggctgctcctggaggttgccagacacccggttcccccattctcaatgttggaggcccacagtctctgcacttaggggaccagctgtaacctccccacctgaccagatgaaccgcggggaaacaaagcgagaagctcccacctacaggatgcaaggacccaagctgggatttgtgagagtctcagcagaggctgtgaggaactccacagaaaatgaggcaggaaagcaaaagttccttgttagggcttggaggaggagagggttgtcaagcatgttttctttattattcccacacataagggagctggctttaagagctttctgtgacaaacctgaggagaaaaagccctgagacttagaaggcatttaagaatacagctcaagggggaaatcggtggagactgtatctgcggtggttttctccacctgtagccagaggctctctcatagggttctgtggctttccttggggtgccttttaaaggcatcccagtccagcccaggactgactggattccaggagatctcagaggctggtctgacaccaaagaaggctgtaaagagaagagaccatttggatgactgttttcatggaaagtgagccccagggaggctggcctgagattacacagctgattatgggcctcagcctgactcttaaaacaatgcttgtgtatttcttaatcgtagctatcatttgagtttttaactatgtacaaggtattgtgctaagcgctttacagtccttcataattctcatagcagccccatggggaaagtactattattattcccacttttacagatgacgcccagagaagacaggtaatgtgtccgaagtcacgcagcaggaaactaggagccagagtcaacctaggaaaactgcatttagaacaggaggtctaaccactgtgctctacacgcgggtggttttcacttcgtgaagttttggggaatgggggtagtgcttgggttataatcttgcggttgggatcaggccctttagggcatattccggctccagacccgccgctcagcttctctggctcccgggcatgggaatctggactcgggagcggagcgctcccgcggccagcaggagtcgctattgcccttagcagccagctccgttaccccgggtcaccaccgcgccgcggaggggccctagaagtggaagccagagccctagtgcagtggcctcccggagcgcccagctcaccaggtacccccgcagcgcgccgggagcgcctttctccccgccgccgcgagcatgcgcagtgcccccagccagtcccgggatccacggcgcgcgcccctcccagccgcgcgcgcccgcctgcggtttgtctgcgcagccctggaggctgcgacttccggactgctcctggccgcagggggcgccgccatcgcacagagaggcctgggcggggcggaccggcgctgggcagccaggacagccgcggcagccgggtccgcagggcagcagccggcctctcccactgcagccctcccgcccgcctacc

SEQ ID NO: 14075 - DNA, 2300 bp, Homo sapien
tcctgtgtgtgccaaagcccataatttatgaagcatatttgtataatgagggagaacagacatgaacaaggcattgtagtgcctctgccttgcctacatatgaaagcggaaatcgagagtatacattccagttaacagccactctgggagtgccaatgcaagcacaaaatgcaccctcggttttcctatcccggaaatacttaccaagtgtaaagagggaaagtgctgggaatttttgtaaattggttatttcccatgatttaatcatgttactaattaagaaccttctggccacaactccctgtctccttgtttgctggatactactcagaaaggaagattcatcctgcctttttctttaaataatgaaaaaaagcaaacataaccctagtgggtcacaagatctggaatcaatcatgtcaagcaaagtagcctcattccaacattttgaaggatccacacaccttggaaacacagactaggaggaagtaagggatggctgctttttccaaggtaagggctggtttaatagggcctattaattacagtctgagtatttgaatttaggccaactctctggtcaaatattttttgcagtggctcatggttttgtcactaaacctttatctttgctgccaaaagaaactgttactgctagcttaactcacagcccaagctacatctaaatacctaagtcagctacatttaagttccaatttcagaagttaggaacaacttgcagcctgaaagtctctcttcaatggtctgatccagtcttcaagttgctgtcttaaaaggttctgtgttcaatcaatcacccaggtagattgtttgcaaagattacttaaaaaaattgaaactacttaaactacttttgatataaagccgtgaaaagaacgaaagtactatctttagccaactggcacaggaagagttctgttataaaaacgacgtgcaaaagagaaggtaagaataaaagtaataatgtgcccttcataaaatttatcttttgtgtctaacatcaatcactaggccaggagccaatacaaggctctcctgcatagggtcacacatactctttcttagcagggtgaggagacctcagacttctaccactgataccactttaacccatcaaacatgcctaccagcccgcccacttcctcttcattcaagccccccgccccaacaaatgttgattaaaagcagtaaatgaagtgttttatgatgtcatgaaatgagcaggccatctttaagacctcttgctgggtggggaactgaaggtgaaggagcactgggctgccagggctgtgcagttttaatgacagcgggcacacagcacttacccttttgcgccaagcatcagtgtactgtctttacatagtaactcctttaaccgacaggtagatgctgttactatccacactttacacacagggaactgaaacacagagattaagtaacttgcccactgctagtaagtagtggagacaggattcaagttctgacagtctgggtccaaagttcttgtttttatccatcatattctatatagttctaatggttcaaggacagctactagcgagtaagggagtcggaattagtttaccacccagccaagttcagggatatccacaggacttttgctgactcgtcctataaagcaaatactgagaattatcttttgcctattaatttccttattcctgcttgtattttatctgaaactttctctagttgagctttcctctgaagaggaccatttcaggtcttgaagtttctgtggccagccatacagccatttacaaacacttaactagaacgatttactcaactcagaacaaccccgtatattaagcacagcaggacatcatactatcaattgtcataaaactcccaaggtgtttgtttcagtatcttcattaaaaacacacacacacaaaatcgacaaatatccaatactagactacctctgaaatcctgttcgtgtttgctggatacatttgccttagaagaaaggaaggaagccaggtattacatttaacaagggggaggggaagcccgcaagagaatacacccaataactgttgacatttcgccaactttttccaagacttggtaacaaagcattatctatctgtatgagagaaaaggggaggaggactgctgaaaaaagggacgggttaagggttttgcactatagtttagctcttccagcagaacgcggcgctgtcaagctgtcaatgtctgtctaccgcctcggagacacaggccgccgggaaaccacagggtcgacggga

SEQ ID NO: 14076 - DNA, 2300 bp, Homo sapien
gacctcctgaatcagaatctctagggacacggcctggaagtttgatttttttttttttttttttgtttttgagacaagagtcttgctctgtcgcccaggctggagtgcagtggcatgatctcggctcactgcagtctctgcctcccgggttcaagcaattctcctgcctcagcctcctgagtagctgggattacaggcatgtgccaccatgcctggctaatttttgtgttttttgtagagacggggtttcaccatgttggtcaggctggtctcgaactcctgacctcatgattgcccgcctcggcctcccaaagtgctgggattacaggcgtgagccacagcgcccagctgaaagttttttttttaatgctcatctctgagttgattctgacactcagccacttgtgggaattgctgatctggacaatgcctagggatccttctagctaaaaaattgagaccctattttttggatttacagggcctcctcaggaaggggcagccactctcaggtctgctgtgtgtgccctaccattcctcccactatatcacaaactggcacctagaaactggtctccatgcccagtcgttgctggggcaccctgtatgaagccctgctggctggtattcctgtaggacatattctctgatgtccaggagtctgaggttctacagaatgcccctggggaaacaagagtggcatttagacaacagcattctgtaaacacagtgccaagagctaagggaaagaatgggggtgggggtgatcggagggaagacacggatggattggtaggggccctttgggtaggaagatctcatgtgcaaggctggaatgaacatgaggtgctgtttccttcctttctggtgactcggctgtgtggggagctggggatagagacctgtcacccagagggttctttccccaaagcataaacagtcgtctttctgtgagtacaaagtccttgaggttcaggcccagatctaaagcagagcagagaacttggaacttggtagctacaaaaaagttttgaaaatcttgctggcatttctctaataggccatagcctctgtaacaaggatatttgccatcatattgaaaatgataagaaagggggaaagaaaagaaagtgtacagtgcttttgagtacataacctagacactctatggaggctttttgttgttgtagggcttttggtttgtgtgcttggtttttttgtgtggctttaaattttgttttgttttgtttgccctttgtttttgcttccgctttgagtctcccccccaccctcaaaaggaatagaattttactggaaaatgaaaatatagaaaagtgaagaaatcttacctgacccaaaagtatatccttaatatatacatccttccagtaatagtaataaaaaaaaaaagcctaatggtttttaaaagacacttccctataattgagagatttgttatcctattaccctcacccttcaatacacacacacaccagaaacaacagtcatctgccagtaattcctagctgggtccatttaccagctgtgcactgataatgatttactttgtaggcagtacagttgtaaatgctcttcctctgatttatttcacatttgccctgctccctgcctccatcaaccaattactacatttttgtcaagataaaagtgtatttacatgtttttatagagtccttcaccgtggttggagatgccctactcacctctcttcccagataaaacttggcatttaaaatcttacaaatctaggtgagcaaagagctgaaggttctcagattcctttgattaaagactatgaccacagtttctaactacatttgcatttccaactctgtattgtggatccataagctgagaacgttgcttttattaaaattaggttggttttactcatcttactgagcccatactctgtgcagagaactgtgagttctctggatgtgagcagcttacagttcaatgacaaagacagggctgtgtgtagagaaatttgttatcctattaccatgggtccctaagtgtgtattgtaatttctagaaaactcctaagtgttctgaaaaccccaccaccccttagtgaacatacattcaaagtggatgaggatattttacctgattagtaaattccatctcccacttccatgcacaatatttaaacagccaccagtgcaagtgtgtataatggaccatcatagtcttataagtgttctgaggctcatagcaacaatttcttatgacaggaaaaaaatcattgcctctcaaagaaaccaacattttat

SEQ ID NO: 14077 - DNA, 2300 bp, Homo sapien
ataaactcaccaccatgccttccttgctccctaatctccatctttgcactcttgtgttcaccctttttgtcataacctagaatagtcattgttttttcactttctgctaatataaaggccaattagattaagtctgtctatacaaaccattttcttttcagaatccgtttattttgtaaacgctgaactagagcagtgaactagaatgagtgaccttgagcactgtccttttgggaaattaagctaaactcaagtaaaactagaaggccatgccgtttgttgtacaggaacttctcaaaaaatatcaaaatttgtttcctgaaattcaactaagtacaacataatcattttcgttaaatataatttgaaggaacccttaaagtgtcaggttattgagaatctgaggataaggaaattggcatgatccaatacagctttaacagtggtactacaaaagatcatctcttttacttttaagaattctagagtaggccgggcacagtggctcacgcctgtaatcccagcactttgggaggccgaggcgggcggatcacgaggtcaggagattgagaccatcctggctaacacggtgaaaccctgtctctactaaaaatacaaaaaaaattagccgggcgtggtggtggatgcctgtagtcccagctactcaggaggctgaggcaggagaatggcatgaacccgggaggtggagcttgcagtcagccgagatcgcaccaccgcactccagcctggacgacagagcgagactctgtctcaagaaaaaaaagaatggtagagtaaaaagaaccctctgctgagtaaccaagcctttaattttgtgtttttatgaaaggaattaaaatacccacgataaatatttaccacaacctgtgtcaaataaatgggaaattaaacacagattgtacaatgtgagcttgggagttaatggcccagattttactgttaggcagtaagagttggagtaggtagtcttgttatcatgagaagaaccttgaacagatacaactaatttacatattactaaccaaacttaaacattaaactttttctactactttaaattctaacctggaatgtttcagagttcttcattctaatatcaccctgaattccattgaagctggaaatgtcattttccaagcccacctgtcattcatttacccatgcagaaaaaatggtaacttgaagagagtggcatgtgcctgctgccttagaggttatagaatccccacagtcaacaaaaaagcctctagagacatgactgttgccatggaaaccagagaaaatgtgtcttctcatccctcatttgtaaatgagggggtggagcagatcatctgtctctaaggtctttttcagtgctaaaatgtggtgattctttgggaaaaactttttgcatcaagtatgattaaatattctgaaagacgagtgtagcttaaaattttttttgtttttaaattctgttcatgggtcttcttaaaatggacccttgccgaaaggcggcctgtgacggcctcaggtgggaagatggatgtccttccaagggtgtggctggcagtggggtttgcatgactgcttcttgtctgtgtttcaagtgctctcatctattggtttggtttcctttcttttttttttttttctcattgtgccactttttttttcctcccacctttttatcttcacgcagataagtttctttgcttcacttctcccaagactccctcgtcgagctggatgtcccacctctctgagctctgcatttgtctattctccagctgaccctggttctctctcttagcatcctgccttagagccaggcacacactgtgctttctattgtacagaagctcttcgtttcagtgtcaaataaacactgtgtaagctatttctgtttgctattctttttacttcttatttattgacattttagtttcaacattgaataaaactacaaagctgcttcacacatatgagggttagtgtttggctgctgctttttctttttaaatactgaacactatacagaattatatcaggagtttctaaagcagtagttccttgttgaacttcaaaaaaatacccaggcctgcattccctctcagagttctgattttcaaaggttagaatgaggtctggacatctgggggggttttgggggaattgtgatggctctgctttgcagtctgggtcacacaggggacattgcttgttgagagttgaaaggtctggcttgatcagtgtcttcctttgctggaggtttagctcgggatgtagtgacccctctg

SEQ ID NO: 14078 - DNA, 2300 bp, Homo sapien
gagacaccagatccttcacctgtcatgattgcctaacccagcggttcccagcttttttggcaccagggacaggtttcatggaagaaagtttttccatggggtgtggggttggggctgatgggtatggtttcaggatgaaactgttccacctcagatcatcaggcattagttagattatcataaggagcaagcaacctagatccctcacatgcgcagttcacaatagggttcgagctcctatgagcatctaaggtcatgactgatctgacaggaggtggagctcaggcaataatgctccctcacctgccactcacctcctgctgtgtggcccagttcctaactagtccatggcccaggggttgggacccccggcctaaccaaccacctgcttcctgttgaacaattcttcttccttatccctccctatttcctgtttccccacacatagttacatttcttccttgctatataaacccctaattttagttagctgaggaaatggacttgagactgaactcccgtttccctggctgcagcacctgaaaaagctttgttttcccccggcgatactcattgtcttggtgactggctttctgtgtggcgagcaatgggatctaggctaaacccttggtgtttcagtaacatatgtacagtttaaagaaaaattatgtacagtttaaataaaagtgggcactcataaccaccactgactgcgtcttttacatttttctctttatattttttctctcatgttcttggagtagtggtgacccccaccgtgggaacctccagtactatcttaatagagtacatctgtccactataactgcagtttcagtgtcaaacgctctgggtcctaggatattctggtctcttggagtcttgggttttgtgagtagccccagaagctttacttatttagccccactattttcttgctaggtatggataccattattgccttttcctcctattaaataattattacctcaatatatttattttgaggtatgtatatgtttactcagtaagtttattacctcaatatgtttgtcctgatggcttgtcagttcaagtctgtgagctctcttctttattccacctgcaagaaaagacagggccattttgtatatggggcatattgccccagtgctgaaggtataaagcctacaagctttcaaagattgtgtgtgtgtgtgtgtgtgtgtgtgtgtgtatgtatgtatcccaaaatataaaaattacaaaactgataaatgtttaagtaacttcaaattaacatatcaatttcattacacgttaaactaggattttatacacattttacattttgtagcaatttgagattaggtttcttatttcacaagaatgtctgatcatttacagatgctgagaaatcataggtaattgtaaattataatagttacttttggattaaaatttttcaagcacgaaatttttaaaaaacactttatcttttatagcaaaagaaaggtaatataaggtctggatgtaacttcatgtctttggtacggtgtggagctagaattccagaagcaatagattttaaaacatctttagggaaatgggtgaattgaaatgagacataagggagatggcaagagagtgaaaagaagcgcgttctaaagggggaaaggagaaagggaaaggaaaggagaaaggcatctctaaagggaaaggagatgcctgctgagcgtctactgtgtgccctgcgctgttccagaagttgaggatccaaaactaagtctaggctccccaaagaagtcccactctggtaaggaatctgacaagtagttaaatgatacaaagtgttaactgttgttaaagaagtgtgcacactgaggggcaagatggtaagggcgagaactcccatgggacgggaactaggaaggcttctgggaggtgacgcttgatctgagggtaagcaaaggaaaaaaaggaaagagagacagaaaggaaaaacaaggaagagacaagaaaagggagaggaagaagggctcgatgcgatcggcgctcgggtagtcaggcgtcgactgctagggtctgaccgcggtccccacccccgtcccgccccctgcccttccctccgccccgcgccgcggctggcagggtgtgcgtgagtttggtggcggccggctgtgcagagacgccatgtaccggctcatgtcagcagtgactgcccgggctgccgcccccgggggcttggcctcaagctgcggacgacgcggggtccatcagcgcgccgggctgccgcctctcggccacggctgggtcggggg

SEQ ID NO: 14079 - DNA, 2300 bp, Homo sapien
gtgtatacaattgtattattctatatacttatatacattaaatatttaatattcaccaatttttattaatttttaagtatcaaatatttaaaaacccaaacctaatgcccaatttagtgtatggctgaagtgaaaatatatatagtcacaggacaaatgctatatgcccattaagaagcataatgtagaatattccagcctgggcaacatggcgaaaccccatctctacaaacattacaaaaattagccaggcgtggtggcttgtacctgcagtcccaactactcaggaggctgaggggggacaattgcttgagcccaggaggtcgaggctgcagtgagccaagattgtgccactgcactccagcctgggcaacacagtgagaccttatttaaaaaaaaaaaagaatatgtagtgacatggagtgatgctcattttatagtaagtgggaggaaaattcaagtctacaaaagattatgcacaagatgatcccaattaggttaagtcaaaacccaaaataaacctatatccaagagagtaaaaaatattgggaaggatataggtcaaaagttaaaaatgtttatttacagatggtaaattttcttctatttttctgcatttcccaaaatgtatattatacatgtatcctttttgcaaagacaaataaggtgattaagaacatcaagtcagggcgggacgcggtggctcacgcctgtaatcccaacactttgggaggccaaggcgggcagatcacttgaggtcaggagttcgagaccagcttggccaacatagtgaaccccccccccaccatcccccgtctctactaaaaacacaaaaagtagccggacatggtgatggacacctgtaatctcaggtacttgggaggattgaggcaggagaatcgcgtgaacccaggaggcggaggttgcagtgagccaagatcgcgccactgtactccagcctgggtgacagagcaagactctgccaaaaaaaaaaaaaaaaaaaaaaaaaatccagttagaccaattttctggtaaagtgtctttctggtttcttgccttttggtcgcccatgacacccatttttcaagcatagagtttcctcctcaaaaatagagcatgctgtcacgcgccggtagtcccaactacttgggaggctgaggtggaaggacttcttgagcctaggaattggagacaagcctgggcaatatagcaggaccctgtctccaaggaaaaaaaaaaaaaaaaaaagaataatggcgtgttcctgtggtcccagctactcgggaggctgaggcgggagaatcgcttgagcccaggaggtcgaggctgcagtgagctgtgatggcaccattgcattccagcctgggcaaaaaagcgagaccttgtctcaaataataataatgataaagactcatgttcggtcatcggtgacattcgcctttctcaggccccctagttgtccactctgcaaaggacgagtaatcctcggaaggggtggggcctcttagtgaatgaggcacagcagcgaatccgtgctgttttaaaaactttttttcagaacaaagcaaacctaaggcacagccataccccgcagaaaacttcgaaatctgcgccttgaaaagggaagccaaaaggatacgagcctctttcataatctctctggcacgtattaatggttaataatactgtattttttaatacacaaaagaagagaatagtggcattgccccgtgtgcccacccccagagctaaccgagagcggccgggccagggggccgggggctgagcggcccgccgggttccggggtggcgccggccccggtggccgcgggcgctccctcgccatggcctaagcccgaggccgctccccagccagattctggcctcaggcactgcagagcccgcggcgctcgccaacaagcccgttagacccacgggacttggcaccctggaacgctcaccatccccgggtcttccctgcgccctggacccgagtaccctgctgcggcgtccccctaccaccgagaggagggcctagagcagacaagcccgccccgccgctcctcccagcagcttctatcccggaagttgatgccgagcgcagatcgcttgcagcttgctagctgtgtgggctgggaggtctggtagggctgagcttgcaagaggatcaacatgcctgtgagttgtttacatcgggctccgggtttgttttgggcttctttaccgagagtcatatgggacggatgagtccggctgcctctcgggcctgtagtgtccgagagtggcgaggcggctcaggt

SEQ ID NO: 14080 - DNA, 2300 bp, Homo sapien
acttttagtagagacggggtttcaccgtgttagccaggatggtctcgatctcctgacctcgtgatctgcccgcctgggcctcccaaagtgctgggattacaggcgtgagccaccgcgcctggccataaatatacatttttaaaaagaaataaattccactggtctttgcggaattttttccccttcttttccaggaatgaggaggaagatatagaacaatccacactgttcagatcatggctgaagccacgttcagaggcttgctcaaggactggcttgggcaagagggctcagcctgtgccagagggcagaatccttcttcattaggggcagacactgtgactttgaactcattagagctttgttcctatctagtggactctaggaatgagacattccgtaagcagcagcagcagcagcagcagccctctggctactgtatgatcaatcagttaatgatgacacatttcatcttttacccgcatagaaaatgaaggccaattctagggccaactaagtcttctgccacaatgcaactgagaatggattatcagtggcactgttcctaaagtcacaaggcacacagtatgtgtccttagaaaagcctgctggtttgttcaactaactgtccacggtttttcccccccccccttttcttattccactaatggtggagtccactggttcccttaataacctctagccttccagaaggtgtttccttatagctaaggtaaatgtctggaccagtggttctcaaatactttggtttcaagaccccttcatcctcttaaaacttattgaagactccaagaagctttttttcatgtgggttttacctgtcggtatttgacatattagaaattaaaacttcgaagggagaacaacagatgagagacacagagccctggcagggtggactcctagtcccacaccttcttagccttttgcttccacattacctgaaccagtcaacacccctttcacaacagctaatccggttgggtttctgccactagcaaatgaaaggggactgaacaatacatccacaaaacagagaattagcctaagacaataaataataaaggattaacttgagtataacagaatgctgtttcctccctatattcgtcatcaattaagtgagagcctactgaagagtaatgaatattaccatcactgctaacagtgccttatgggtttcaaagaactttcacatttagtatttaagtttcactggaaccctatgaagtatcttgtttcatatccattttacagatgagaaaactgaaatgtccagtgcctgtgtgacttgtcacagcggttttgcagcagagccaagactaaattcaaatcttactctctaaattcccgtggcccgcctcacaggatgcttgcagtttcatggggcacagacctgtagcacaagacttcccagatttaaaaatccatcctcctgcgaggagaggggagcgatcagcgtagcagattctctaaatactcattgtatttggctctggtctgtgtggcgtgaagaagggggcacgagtgaggttcgagttagcatggtaaccattctttctcagctctgtgactgaggggctgcgggagggggttatagtggtgctgggcatggcctcggggagaagctggataatgccctctgcagataacccgtaggctgcgccacagcagcgccaaggaaagaaagcatctctgctccaggtctcggcggaagagatgcgggaactacggggctctgattctgaggtcctggatttggaaggcgtctgcacacaaagaaataacaaagttaagttcccgcggctcgaccagcagagtacgaaacggggcctcccttcccagctcgggtggaaacgcctccaccctgtcaccccgcccatagcaggtcttttatccgctggagccgcctggacagtcctcgcggggcacgcccgaggctccccggaggaactacaagtcccatgaagtcccggggcgcgggcggtgatgacgaagccctcgccgattggccgcacggggcggggcgcgcaggccttctccgagaggaggggcggggcgtggggcggggcgagcagcggcggattggcgggcacgccccctcgcccgcggccccctccccgcctctctccaccgcctcctctggctccccggtcagagggccggagcgagaagatggcgaagacgtacgattatctcttcaagctcctgctgatcggcgactcgggggtaggcaagacctgcctcctgttccgcttctcagaggacgccttcaacac

SEQ ID NO: 14081 - DNA, 2300 bp, Homo sapien
tctcagtctcaaggcatccaaaatgaaggccaggcacggtggctcatgcctgtaatcccagcactttgggaggccgaggtgggcaagtcacttgaggccaggagttcgagactggcctggccaacattgttcacactgtctctactaaaatacgaaaataacccaggcatggtggcgcgtgcctatagtcccagctactctggaggctgaggcaggataattgcttgaactcgggaggcagaggttgcagtgagctgagatcacaccactgcactccagcctgggcgacagagtgagactatgtctccaaaacagtaacaacaaaataacaaaatggtactcattatcgtgtctactttgccatattctctcctcctcctgtctccacagcatccacttaagcccgaaccctctagaagccctcatccttgactcttcccccatctcactctatgtagctcattagtcactaaattctgtttgtacaattcctaaacttctattaaatttgtctgcttccctccagagtcctgctaattccctgaatcaggccactgccatctcatgcctgcgttgcactgaggacctccagtctggaagctcattttccatatctttacaaagcagatctatcactctgaactgttgtctcgacccgagttttgataggtattgtgctgggatctgaccattcaaaatacaatcactggaatctgaagaagtattctgtgggagtgaatggaaatatatatgacttttaaatgggcaaaggtaatgtttttctgtaagaattaaatacctgcagttgtattatttgaaggtgcattttcaggggcgagctgcaaaacatctgtcaggtcccaacatttgtctactggtgtttttttaaatgtggattgccaaaatctttattcatgatggacattatgtaggagtggttaatacttacatagcacttacctgtgtcaggcacactgatcaaaataaccgacgaagtattattcaacataaagaaaaatctaacttggatgtgaatgatcagagaacttaagttttaatttttaaacctttcagaaattgttaatatagatgtttataacttccaccttttaaattatttcacttattgaacagatattagtgaacttctaggtgctgaggaaacaacaaagagcaaagcaaagtccctgtcccccaggagttcgcgttttaacggggaagaaaaataagcaagtgaaatggacgactgtgagaagacggagcagggagatgttactattgcttgtagggtggtcacagaatgcctgcaaaaacaacccttttgaagaattgggaaaaaaataaaaaccatttggctgaaacagccctgagaagggcagcttcttccaccactctttcatcattttaccatctgtgggttatccccggggtcactgctatcccagcctaggttttatacaggatggagtacgaagttcccgcaactatccaaacggtaaaatgtgcttaaaaaaaaaaaaaaacctatttaaaaaggaatcctgcttgttcctgcgctacatttttgtttagtctctttggttgacttggaatctctgcctgttctcggtgcatgcggctcgaaggtgggctagggagcttcccttctcttaaccacctcgcggccggcactggaacccgatcggagtgtatctgtggggctgcggcgatggctggggccctaacgtcgccgaggacgcccgcctcgggagcaggagctgcggcgtggccctggcgcttccggacacccggtagggcggagggcccaacggtggggtccgcgctcaccgccttgagcccgcccctgcgcccggcgccctcagcccacgccccgcccagtcccccaggccctagcgtttacccccacgccccgcctcgccccgcgacccacgtaccccgcctccgagccccgcccccgcccccacgtgccccgcccccgagccccgcccccgtccccgtgcctgcccatgagccgcgccccgccccccgcgtcccgcttagccccccaccccgagccccacccaccgaaccccgcccgcgccgggagcatctcgcgtccccaacgggcccccgggtcggtttccgcggtggccatgactgcggccgtgttcttcggctgcgccttcattgccttcgggcctgcgctcgccctttatgtcttcaccatcgccaccgagccgttgcgtatcatcttcctcatcgccgggtgaggcggtcgcgtcgggaaacccggacgccggggctcccctcccccgctgggg

SEQ ID NO: 14082 - DNA, 2300 bp, Homo sapien
ctcagtaaataatgtaagtccctttcttctgctgccaccccaaaagagggaccctctctcccagcttcctagtgaggatggaatgatgtattgaaccagcatgagtcccatctacttacccgttactaaggggaattgtgataagctcttcatgtgtaccccactgtgctgttctcctattctcagttcatctctttgcatctcaacttggaaggtaagaacttaatcaggatgcactgaacaattggcagaaactcatgtgaatgtaactatcttgtccagttccttaacctgtgctaagtccaggcaggcacctgaagaaaaaaaaaaaaaagcatgaaggaggcttttgcccaaatggcactatacttgggggattctgagtagggctgaaacagcctttgcaaaaattataactgaggaaattatggcagtgacaaagatcagacctaaatgactcagtctttcttctaactttcatgctgtccttattcattcctgggcataggccaaactaaccttagaaaggaattcagtttatggtttgactcagaaacaaaatcaataatagccctttcccgaaaagacccccttcttgcctgggtgccagtctgcctttgtacgattaatctattagttacaacattagaaattatggtttaggggtcctgcggcgtcaggctgcaagagtctgaaccttcccaagttgctgctggggataacatcgctattgtaaaatctaacatcctattttgcagaccctgcactggatggatcagctgacaccactcagaccgtgtgtgatctggctcaaccagttctgcgatcccacccaggaacagaagactgcaagaaaacgttacttcaacccccctgtgatcccatctgcaacctgaccaatcagcactccccaagtcccaagcccctatctgccaaattatctttaaaaactcccagaggcagggtgcagtggttcaacgcctgtaatcccagcactttaggtggatcacgagatcaagagatcaagaccagcctggccaacatggtgaaaccccgtctctactaaaaatacaaaaattagctgggtgtggcggcgcgtgcctgtaatcccagctacccaggaggctgaggcaggagaatcgcttgaacccgtgaggcagaggttgcagtgagccaagaccatgccactgcatttcagcctgggcgacagagggagactccgtctgaacaaacaaacaaacaaacaactcccggaatgcttggggagactgatttgagtactggaatcccagtactttaggaggccaaggtaggtggatcatttgaggtcaggagttccagaccagcctggccaacatggtgaaaccccgtctctactaaaattagaaaaattagccgggtgtggtggtgggcgcctgtaatcccagcactttgggaagccaaggcaggtgaattatctgaggtcgggagtttaaggccagccttaaactggcgaaaccccgcctctactaaaaatacaaaaattatctgggcatggtggcatgtgcctgtaatcccagctactcgggaggctgaggcaggagaatcgcttgaacccgggaggcggaggttgcagtgagccgagatcacgctattgcactccggcctgggcaacagagcgagactccgtctcaaacaaacaaacaaaggaacgaaaacctccggtctccggcacggcaagctctgcgtgaattactttctccattgcaactcccctgtcttgataaatgggctctgtctaagcagcgggcaaggtgaactcgttgggctgttacaggaccagtgacagaccaagggcatgccactgaaggaatccctagacgcacccttctggatgtgagacaggcggatctcacccacgcctgccagcagctcctcggagaactgtgttcctgggtcagccctggcccagaggagcgccggggacccgcagagtgctgctgaagtcaaggctacaactcacctaggatctggggcgccagccctccggtgggcagggcgttctcctcccccaccccctccccgcacgatgacatcaagtgtttggcgttgagttgctccataaaagctgcccggggaagccaggagagcgaagggcggacgtactcgccacggcacccaggctgcgcgcacgcggtcccggtgtgcagctggagagcgagcggccaccgggagcccccggcacagcccgcgcccgccccgcaggagcccgcgaagatgccccggcgcagcctgcacgcggcggccgtgctcctgctggt

SEQ ID NO: 14083 - DNA, 2300 bp, Homo sapien
aggtaccctgcgggtgggaaagggtcgggaaagactccctcaggaagtgatgtttaaactgaagtctaggggattaggaaacggagtctctgagagggtgaagaaatattacataccagtatgaagcatggcctgagtgaggtcatgctccagggccgaacaaggggttatggatgctaagtgggggtgggtgtccggaggaaacagaaggttggtggagcaaggccttaaagacaaataggttgacatggagagatgggtggaagaacttgagccaagggcagatattattgtttctcctcctcccgcttcccagggaagcagctctcatctagtgtcagtaaaaacaaatacaaagttataatttattggccacctagtatgtggtggcaattttcatgaattctcacatgttccttgcgagacaagtattcttcttccagttttacagatctagaaaaggcttggaacggctagagacgcttgctaagcctggccgtcaagtaggcagcagagctaagatttgaaagcatgccggcctgccttcctaggcagacgcactttccacaacgcatcactgccataaaaatcccaggccgaggcttgctctaacagcaaataccacttggaaaaggacagatctttgaggacccagaaatacttctggggaaaggatgagcagaggtgcccccggtgggtggataccattaggcagaggtctatgcggaagaggccgacttgtggcgtgggaggtagggaggagtaagaagtgattgacggggcgtccctggctgctctaggactgcattgcggggaggtgcccggctctaaccactgcccggcccggttaatcatttcctgaccttccttcctcctctcgctctggccgcaggattgccacatcagtcttccccctcctcctgctcgccttctggccccgaggctccttcgccgggttttacaaggagccccaacttggaagcaatatttgtaatagccccggacgtcctcaagtgccccagtgagatcgcaggctcgatccagggtatgccggcccaagcggccccttgaggcttgccctcttctctaatccctcactaaaaagaggtcagagggtcagggatccaatctccatacagatcaacaagttacagactcggtttccccctgcggtaaaaaggggatggtaacagctggtagggtgttgcgaggcttaaatgcggtatgggaagtgcctggctgggagaccttaggtatctaacaaatgctagatcccttcccttcttatcgcctggtaatggggagtttagcttgcccagcaatcccaggctacgtttatctcacttgaacttcctggcttgaaagtcctacgatgtgctggaggtaacgcagatggtgagtcacagtgacaggatttgaacgtgggttcatgggcgcccctgcgggcccacccacgcagcatctaggtggctggctaacgccacgtgttcagaacctagaaagggctacggatcgcacctgccgcaaggagcctaacgctaagtcgggcgggactgccctggcacccatgaaacccgctgcccgcctcccccggggccaggcccttggcctccccagcttgtttcttcgtgtataaaatgagggccacggtgcctgtctgcccgagaggttttaaagttcttctttacactttgcggagcggccggatttttaccacgaagccaccgagtagtccgcaccacataggttcagtatcctccgcccaccgcaggaaacgccgcggacggcccggggtgccctgctcggcgccccacccttcccggggccggggaagcggcgtgactaggaaagtcacttcggaacacagccggactctgcgccaccagctggagctcgccgggaccccaccccgcgggctgggcgggggcggacccgggggcggggcggggaggggccggcctggaaaggcggaagcctccagtctaggggtggctgcagaacccggatctcggagttacacgttctacggagcggggcgccgggagacggcgggcgagaaaacccggcgtccggaagcccgtgctttctttgacgcaagggctcgagacgcagccgccgtcggccgagcgcccggctagaagcgacaccagacggagcctccggagttcctccgcccccacctcgccgggtcctggagccgcagtcctcccagctgccctcctcgtggccatggagtgtccacacctgagctccagcgtctgcattgctccggactcagccaagttccccaacggctcccc

SEQ ID NO: 14084 - DNA, 2300 bp, Homo sapien
agtctcactctgtcacccaggctgcagtggagtggggtgatctcggctcactgcaacctctgcctcctgggttcaagtgattctcatgcctcagcctcccaagtagtgggattacaggcatgtgccaccaaccatggctaattgttgtatttttagtagagatggggtttcaccatgttggccaggcaagtttcaaactcctgacctcaagtgatctgcctgccttagcctcccaaagtgttgagattacaggcgtgagccactgcacccagccttacattttattaaatagcgtttcttgacctatacagttacatgttatcttgaaatatgtgctaaatgtgcccaccttctaagcaattgttgtttggattctgaatgagtagtagttaagcacagaaagaagaatgctaataaaatgattgctaacattcatttgttatgaactatggattatgtaatcacctaacaacccatgagacacaaagtactattacgtccattttacaaatgagaaaacaagtacagagaggttaaataattcatccaagctctcatggccaggatgtgataaagcctaattttgaatccaggcagtctagtttttgagcttatcctcttaatcattatttgactctaaaattcattttagtacagttttatgaacagaggactcaggtatatgcaaaagtgtaaagtacagggaaaaaatggagaaagaacgtgatcacattccaagttgaggttaatagtgccttgaatgtgcccagttttcctgggtagaggggctaggtttgaagttgatccttcccagttacggtaactctcctacttcctccaaggtaagtgtttttcctggtgcagttaaggtgcctcatgatgaaaatgtcatctaactctctgcatctgtttattttggtaccatttaaccaacatttgttttgactgagttttcaagtaggccttgccttccacacattggctgctttctaggaactgggaaatgttgcttcttaagggtcttcacgttggtggttagtgacagaattgtgcagtctctagacgaaggtgtagatggatttgggtgtacaccatgtgcatatggagccttatttcagtttcattgtgcctgctgtaatactaaatctgagttggaatgtgttacacaatttttatgaacataatcaacttttgattatctttgtccatgtagagaaatagcagtttttgtaagcttaaggtgatttgtgttttgtttggattatttctaaacaaacatgtttccatatgagaggagctgattattcaggcattcaaataaaagactggaagctatattggtgagagatggaacattgtcctgtttctctgactctcacactttatgttaagcagcaacttgagcagagtctatggccctgtgggaagtggctgagtaatttacttaacagagcttgtctttgataatagcccaagttgggggttagtggtctgagagaaaaaaaaaaaaagctatagtgaaagcagcagcaaaggagtttataaataatatctatggtactgaaaccaatttgcatagattatgcctttccttgcctgagcctactcttgtatataattaaaagttgactatagtatttggttgcaaaaaaggagcataggcgggtggatcatgaggtcaggagatcaagaccatcctggctaacatgatgaaatcccatctctattaaaaatacaaaaaaaaaaaattagctgggtgtgatggtgggcgcctgtagtcccagctactcgggaggctgaggcaggagaatggtgtgaacctaggaggtggagcttgcagtgagccaagatcgtgccactgcactccagcctgggcaacagagcgagactccgtctcaaaaaaaaaaaagagcatattttaagtattcagtataataaatcactacatgattgactgctgttataggatttctttattttgatttgattaatatttaatttcatcatttcctactcctttaatttccaaagcaatatttaaagtaaattttcatttggtttttgtaaggtatgtgaatggccatgcaaaaaaacattatgaagatgcacaagtacctttaaccaaccataagaaatcagaaaagcaagataaagttcagcacacagtatgtatggattgcagtagctacagtacatactggtaagttaacattttctggaaatgagatttcttactgtgtgcaagtgtgctctcctcccctcccttccctcagtctctaagccagttactactgctgtta

SEQ ID NO: 14085 - DNA, 2300 bp, Homo sapien
gtcatctcctggctgtgcctcagaccctctgcagcatgcaggagcacattccccctggccctggtagtctaggatgcttcctgcagcctacctggaggaacagcagaggggcaatgctctaaatgttctccctgccaatcttttgccattccagctgggctgcagtagtgcaacttggaagccatgctgaagcacagtgacacttactcagtggaaggcacaagtaccactctggccttgcaagaagtggaaagaaccacctattcctaagggtcaaaccctctgaaaagcattggtttgaggaggattggggagggaaagtggagataatgtggctttctaataacaccacctgtggttttgcagcatccattttaagtggagaagtacacctagacagagcctaaattagggtgtcagctataattcagaactacattgatgagcttgaaatagcagcagtatcttgctccccttccttgggaaatgcttcctttcgacctccttggtttgtttttaagagaaccccctactgtacttcatcttggcatggtggagtaatggaggcacaggggcaccagctgaggctggcttctcaggaaagccactgacaatggctacttccttctttgcttgactgccttctgctttaaaggcaaagctgcaccagccctgaccaaaccttagttccagaagtgggttcagcataggctgcttcatttgtgtctatgggaaaacacaaggattcccattccctcttattccaaatgggagaacaaacagaagtaaccactgaggtggtggtccctgggctggcagaggaaaaaccattctcttctcactattgcctaggcagaacgtggcctatacagctgcaccatatcagcatcccccaagcaaaccaaaaaacaacgactgggattcaaagcaggagagttaaggttgggtcctgggtttgggagtgaagcagcatgaggaaacgggtctgccatatcgtgaagcctcgggtactcaggaagggggagcttcacggatagtacctccaggcaccttgcctagagttgagtcagagagggcaggggtggcccactggcttctccaagagggaacggagggcactcatagaatggatggtgtgtggtcaacttaaaggcaaagatggactaaaatactgaacttaaaattgtttcaagcagtttcacattaagagctacctcatccatcctgacattttgggaagtacaggttatacatagtacaaggccttatcagtgagaaaatgtaaagccaagtaaatttaaatttaaaacacagaaagtactgcttgaccaaaactacaaaaacaacaacaacaacaacaaagcaccaataaaacataaaacacagacacacaactttggaaagcagctacttcagtaaaattcttttatgaaacaactcagggtaaaaatctagctgttggggaggcccaggaaaatccccctgcctagtggcaggcagcagggcttgaaggccaaccagcctagcctggagacaattactctatggcacaaaaataacaggaatgaggcagcagccatggactctgctcacaactcacaaccgtcacccttagctctccacacgcaacaggtttcttcctagtaagggtggagcaaaagattcacactgatgtactagaaaatcaaaacagttaacatttacaattacactccttccccctaagtacagactgcaaagccagacagagctggcctggccgccaccactgccaatgaaaacgccttgggaaaagccaaaagtgctcactgctaaacaccattgtcagctaaagggaaaaaaaaaatcccttttaaggaaagtaacttcaataggctccttttctgccaggacctccaatccctctgaacataagccgaaccacagactgccgcacatgtgtctgggtcctggcttttcttccctcacccctccgcagagcttcagcaccagttgttagccaaaaataaacaccattcctcaaccatatatgtccaccggcccagagtcggggaggaggagaggaggcaggtcagccgtcccccggctgcagctgcactcacatgtggccactgctcaccatgcacataacccagctcaaccgggagtgcctgctgcacctcttctccttcctagacaaggacagcaggaagagccttgccaggacctgctcccagctccacgacgtgtttgaggaccccgcactctggtccctgctgcacttccgttccctcactgaactccagaaggacaacttcctc

SEQ ID NO: 14086 - DNA, 2300 bp, Homo sapien
ggagtctattttaaggctaaggagaaaggattttgagtttcctcaaggttatatcttgaaactcaagagaatgggaaaaaagtttaaaagcatgttgaagttaagctgcgggctgcattgcttctcagatacctgctactcagcttccctcctcattcactctgctccagccactctgatctccttgcacatgagccatgcctgtagtccgcggcctctgcactgactgttcctctgccaggagtatctatgccccctgcctcacttcatgcctcagatgtcatcttctcagtgaggcttacattggtcaaccctttctcagaggcttcaccccccaatctcttgccagcaatccctaatagcccttgttacagcctgcacttttttccaaatactttctaccatttttttttttttttttttttttttgagacaagagtctctctgtcgcccaggctggagtgcagtggcacgatcttggctcactgcaagctccgcctcccgggttcacgccattctcctgcctcagcctcctgagtagctgggactacaggtgcccgccaccacgcccggctaattttttgtatttttttttagtacagacgggggtttcaccttgttagccaggatggtctcgatctcctgacctcgtgaatcgcccatcttggcctcctaaagtgctgggattacaggcattgagccaccgcacctggcccttctaccctcttatataccagttacctgttgtctcttcccccactagaaggtaagcttcatgagaacagaatttgtctttttccttgccgtttccctatttgagcaatgaattaaggaacctgtgagtagggatcaagctcctctttcacacagaagaaacacctggcctgggaggggtaaagggctttgtcgcagctggcgctgggtggagccggagtgtgaacagcgcccatcacagtgctcctcgcctcttccacccacccagaattctccccagtgacccaggaccaggcggctgccggggggccgagagccttcactaaatgtgacacatcagtgactacagccctgaaattcaaattggaagcctaggcttgtgctcatgtccagcaaatccaacaggtgaaaaatctagcttgtcagcttataatggttccattatcaaaagcttagccagggctgctggttttgtttttgtttagtttgaggctttttttttcttccaaatcatttctttttcccttatgagaacagtagaaaatatgggtaactatgcagtttatgtaagcattcaacaattgggagcgaattttctacaatcgcgagtgcggtcactgcgggaacgcatccgccccaggaaaggtgggcgggcagacgcgcgtgcgggcaaaaccgcaaggaggagcggctcggtggctccttctgcccgtgcgcccctgcttcccctcctcctgcttcaccgagatcaccaccggggctcctggaggtggcggtccccaggacactccgggagccggcggggtctcgctgggtcgctccgcccggaggctccccagacccctgcgcgcggcagccctggcccccgtcacccccgagcgcaagtcggcgaactccgagtggtcaggtcctccccaccgaggtgatttcggtccaacggcgatcggagtccccgaggacggtgcaggcgcctcccgcctccgtggggagcgcacagcagaaagcctggggcggaagcaagaggggaaaggcggtggtgttgagtgagaaccagccgagtgttttccaaatatccatttaatcttgcgtttatcctatgtataaaatcgtaacgtgaggtaggctttcttatccccactgtgcagacggggaaaatgaggctcagaatatgcggtggtggtctgaaggtggaagagctgggttcgaagccaggacggtctggggctgcgctccttccccgggggcagcggcggggcggcgtctagcgctgcagcagcttgccgagggccgcggcgggcgcgcgcgggcgcgggggctggtcgggcagcatggcggcgctgtgctctgcccgcagggccaggcgcgggcacgcggcgcgcaggcggcgcaggccggccgcgctcacgttgcggcagaagtccacgtgcaatgtctgcagcgcgcgcccgtccgccgccacggcagccaacgtgcggttggtgacgcgcgcgcagttctccaggcgcagtgcgcgcaggcgtgggcagcagcgcagcaggcgcgccaggcagtcgtcggtaacgtggccgcagcccgagagcgtgacg

SEQ ID NO: 14087 - DNA, 2300 bp, Homo sapien
gcagcggcggcccaggcagatcgaggccttacaaggagaagaagtggtgcaggtcaggcaggaaatggataagtttgcctttcattgtaaatatactagttgttgaataggtttcttaaaattaggtaacagaaaatatagtaaaaatatattacacagtaattataagagatccattggttttggatgttcagattcattcttgagcttgtcagaagtttgaataggctttggtgttagtattggtcttgttagtattggttagaatggtctttttcgtgagccagctggttggcccagactagggtgctgcacgcccttggaaggaatattgtgtggtttaacttctgccacacagttcttaatacacagataaaaggaaaactttgcttttaacctatcatttatgttacaaaagctaagttaacatgcattttctggaaaatagtgttctaaaatcatattgtaagattgtatagcaccttatagtttacaaacaatttccccatttattatctcatttagtctaggtcatgtgtacacagctgaagagtagcagtagttactccagggtatgctgttcagcttgggcttcctgaggctgttgagacagatcagacttgggagagcaggagagcaacttgggcagataaatgtaccagttggccagatgcagtggcttatgcctgtaatcctaacactttgggaggccaaggcaagaggattgcttgaggccaggagtttgagaccagcctagacaacatagcaagaccctgtctctacaaaaaatagaaataaatagccaggtgtggtagcacatgcctgtagtcccagctacttgggaggctgaggtgggaggattgcttgagcccaggagtttggggctgcagtgagctgtgatcacaccactgcactccagcctaggtgacagagcaagacactgtctctttaaaatttaaaaaaaaattaaaaaaaaaaatttttaaaagcattggtctttgaagatccagttttcagtgaagtttatgtaaagtttattgctatattaataccaaaaatggcagatttacttttttcttagtttcccttcttaaaaattttctttctccttggttctgtcttagatgtcttgtggcttcaagcactcagcagtggtcacttcagatggcaaactgttcacctttgggaatggtgactatggtcgtctgggtcttggaaatacctctaacaaaaaacttccagagagagtgactgcactggagggatatcagattggacaggcatggaataaatcaataagatattctagctgatcattgtttctcatttcttctgtgttcgcttagacaccctcaggaagatcaggatcaccagttgtacctaacctcatgtacattttgctatggtctaattgataattttaactgtttcccaatgtgaaattcatattttaagtcaatttaagtttgtttatgtgacaaaccaacaaatgtaacccttatttcaggacgtgaatatttttaaagccccctccataacatactaataccacttgctattaaacccttaaaaaatacagatactagtagctcctgtctggtatccttgagttgtatggctgaattgcaacatcactggtagctactgctcctaagtagtaattatctctgtcttgtatacatcaagagtgtcctttaacaaggaaatatttttggctttttctatatcattccttagatactttttgatatgaatgaatatttttgggtcatgtatacttttcctctatctttcatactgattatggtttagccacagacatttgaaggatttcactttgaagaaaaaagttatatatggacattaagaattatttcttgttgacttactttggttaacatttgtagtatgctctgaaaccattgtagatatttggaaacatagccaagtttttcactgaagtagagaaaaagggtcccagaaacgggggagtgtgttttaggtcttgtgatttgccttacggaatgctgttatttctttaggtggcctgtggattaaaccacactttggcagtgtcagcagatggttccatggtgtgggcttttggagatggagactatggaaaactaggcttaggaaattccactgcaaaatcttcacctcaggtcagtactgccttgagtctaggttttcagacaacataaatagttttcatctatgtcagtagttattattagttggaaataatttacctttagtacttttggtagttcataatgaagtttagaagcttctgttgt

SEQ ID NO: 14088 - DNA, 2300 bp, Homo sapien
gtcagggctcacttgctgacactaacagtatttgctaattgtatgcaactgaacacagttgtattcaattctcttttacacacagctctgagggtggaagctaaggagatggtaaaagagggagtctcttgattggtctttaaagtaagcagtccttttcttgaaatagaatgggcaaaaccaggctgggcacggtggctcacccctgtaatcccagcactttgggaggccaaggcggtcggatcacaaggtcaggagttcgagaccagcctggccaatatggtggaaccccatctctactaaaaatacaaaaattagccaggcatggtggcacacacctgtaatcccacctacttgggaggctgaggcaggagaatcgcttaaacctgggaggcggaggttgcagtgagccaagatggtgccattgcactctagcctgggcaacaagagcaaaactccatctcaaaaaaaagaaaaagaaaaagtgggcaaaaccagtacaattttacaaattcaagaaagacagaatatcatatttgtgagtgacgtagatgacatcaacaagttaaaaggaggagcttttgcttgttgtttttgagtatgcttcacacacaatacccagatcataaagcactagcaacaatgacatcactcctcatgtagctactcccttacatcatttaccagaaatacacattttatacatagaaacttaaaagctacacacctaagacccatcatttaatgagtacttaatatgtgccgtatgtgagctttacatatattttactcctcagaggaaccttgtgataacaagaactggcattataaattgacacataaggaactgaggttcagagaggtcaagcaacttgcccaaggtcacacacctggggtaagtgggattccagaattcccaccagtgtctgacagtgaagcacatggctcctaactcttggactaaactgcctcatgtgacacacaaacatgtatctaatttaaccatgggaaagcactccctcgtctgtctataccgtaatttcttacattagtgacacattcatggcttgtatgtttgtgtgcttctcctacgcctccaattggattgcaaacttctggaacgcagaggccaactctattttttgtccccaagtcatcggtcagtttaattgatgctcgttagaatatctggaaggaaagacaccatgaaggtggctggaaaggagtaaaaccaggtacagaaggaggaagatggagatggggtattcactcaacaatttaatgtccacttggacctatgttaggcgctggagatatggtgaggactgagccagtctgtgtccttcccctcatggggtttcacgtggaggtcgaggtcatgatcaaggatgtaagtcacccaaaggacactactgtgttcccaagcagaaaagaaaaccgaggagccaggccctggcatctgcagggttctggcagtcccataaggcgcaaagacatgaacaaggtggaagagtaggtcaagtgaaacgcttttatgtgattgaacttagccggccggagggccggggccgctgcgatgagagataaagagcgtggggcgccgggtgcgaggcggagataaaggggtgaggccctggccctgccgccggccgtaacacgtgtcccttcgcctggcggcggggtcttccctgcccaccacgaggaaaagggggcgcactgcatggccccccactcctcaccaccctttgtgaaacgcccccaattgtgcttcatctgtggagtcaggtccccgcaggcggtcggggctgcccggattccgcgacggctgaagggtgagggccgcgcggtagcaaagtgtccccagcacctagcttggctcccctcgctcccaaatccctttccccttttcgctcaacccccaactccacctcagccgccttcctctcggttcccctttcacctcccgcgctgggcctgttgggcggggcgagggctcccggctgcgcgagagttccgcccaaatctcgtgagactcgcctgacgccgccgctgctgccgccgcctcttacgtctttccctttgacaagtcgctgctgctgcagcaaaaataaaggacgcgaccgccgcagcctctgcggagccgggctcgggtcgccggagccgcgccccaccccgccagctccagagccacgtacggtaacgcatcatctaccgtcctcctggtcctgtgtgtgtgtgtgtgtgtgtgtgtgtgtgtgtgtgtgcgcgcgcgcgtgtgtgctttgccggccgcgcagggc

SEQ ID NO: 14089 - DNA, 2300 bp, Homo sapien
catgactgctgcagggagctggaaggctcccagcaacacagcctgccccctctgggcagccaaccagcagcctgttcagctaagtccaattcaatacatgttcatggagctcctcctaagcacccgacagagagaaattgtgtcttcaacggactcaaaagcggaggggagagaaacacagagacatgtctctttgtgatccccagcaagacaagcagaatataatggaaggccagccaaaggataggggagcacaggaaagagggaggcccagtgcagcttcacggtggcacagatatttgcatcatttgtgtcttgaagaataaagaggttgtcagcagtcagagaaggagacggaaaggccttctgggttacaggagcaacttgagcagagcccacaaagtttggaaatagatgggccattagggacaagaagggtctgtgtggttccccaacagggtttgtcaaggatgtcatacaaataatgactcctacatctactatctcctgactcagatttcagttgttcatgggatgccttggtagaggtatgatccagcagtgtctggatcagatgtgccattgtcccaaactcattgtgtccaaacccattccaagcactcccttgatgaatcacattacttcacaaatgtacccgagctagaagcacaggagtcaccttggactcttctttctattcccttgccacatctgactggccaaaagcttccttgttggttccatttactaaatatctcttgaaagtcatccccatttccacagccactttcttagcatggtggcagcaaggtgcactgtacaaattttggtgttgcaatcctgggtttgaatcccagctcagccactcattagctgtgtgaagctagaaccccttgtgtagtttcctcatctgcaaaatgaagaaaataaaattcccacctcatgtgattgctgtgaagaatacatgcatacaaaagccttcatgcaatcctggcccacactaagggctctggaattaatggccattattattgtcattgtgagaacacaaaagccctctatgacttcccatcttctacaggatcacatctaaactcttgagcaaggcatcaagagttggtccttaccccacgcttggtacacttcagccacacttaaggtttaccgttccttttctcatgccatttcctcagccagcacagcccttccctcctccacccacagaattaacttcgttccctacatcccagttcaaattgatccatcaatcatgtgctgtctctatttctctctcaataaaccttcagcagtccagcaaaccagtggctccccatctgtgtctcaaagaggcatgttcattcctccagcctaaccttggttccactgggtgtgagttaggtgtatggtgtgtctcccacagacagggagccccagcaagcagggaagaccctccttcatgtcagtatcctagtgcctggtacagtgcctgccatggagcagacctcaacaaagctgttaaattcaaatgagccacaagaagactatgtgctcagtagacactgggattccatttttttttttttttgagacagggtcttgctctgttgcccaggacggagtgcagtggtgctactacagctcactgcaacttctgggctcaagcgatcctccagcgatcctcctgcctcagcctcccaagtagctgggactacagatgtgtgccaccacacctagctagttttttgttttgttttttgtagagatggggttttgtcatgttgcccaggctggtcttgaactcctggacttaagcatctgcccacctcagccttccaaaatgctgggattacatgggatcccttcatagttcaaatcagagtcctgaagaaatcaaagtttcaagagccaacatcagaccgttctggctctgatctgaaactatagatccatggttctcagccttctctttgcatcaaattcagctggagttttaaaagatacagatactaagtccctacccctagcaattgtgatataatagatctggggtggggcctgggccatggtgggtattaaaagctctgctgtgcagccagggttgagatcttcagctgcagctcagggggatccaccacgtcacacagggctcctagtccaagagctgctgggagaatcagggacctggctcatagggatcattgagagaataatcctctcagctgctgagcactggtgccccctgccccatctggttgactcttactccagggtgctataaaaatagcattttccatgtgtgc

SEQ ID NO: 14090 - DNA, 2300 bp, Homo sapien
ggtagcttcctagatagttgcattctggcaggtacagtggaaggggcaccagactgaatctggaggaggcctggttctaatcctagctctgtctctcaccagctatgtgatgttgggcaagtcacctcccttctccgagcctcagtttcctcatctgaaaagtggccagggtcaattgacaatgacccttccagctgcaatggactctgactaacttgtcaattgctaaacccaagaatgtctcttttgactcatgtaaggggctgctgctgctgacaatgaggtattaagcatgaggctcaagggaaagagatggagaggccacatgtaggtgatcagcagggtcagctgagcccagccttggattcatcacagcccaggtactgggtatgagaatggagaaatctccagatgatttcagcccccagctattcaggtgttcccagttgaaatcccagacactgcagagcagaaataagccatacacactgtgctgtctgaacttctgtccctcagaatgcatgaacatagtgaaactgttgtcctgtgccaccaaggctggtaatggtttgtcaccagtgataggtaaatggaaatggaggaagaggtgtttagggatagtttggtgggggacttctcatgttggtgaaacttcaccagtgggtgtcattcccttaggtccgttgacatcagaaaccacctctagtcttggatattactctatatatcatgctgctcttaggagaggaggctcgctggctgcactgttctgaattattgtgaagtttataaacaaggaactctttgccgaggatgtcctggacccggaggcactgctcagctggggggtggggtccatctgtatttgtcccaatgtccaaaaggctgaagggtgtgtgtgtgctcacactggtagaggtcctctaggtgcatcttacacactccatctcatctcagccccaccatagcttcattaggagctaccggaaggtgcgtttctcccactttactgatgaagaaagagccatgcccaagaacacacatgcggagtggcagggcagggctttgaacctggtggtaggactctgaatctaaggcccttttgaggagccccatgggtgacttagggatggaaattccaggggttggaggggtcctcatttgcttcctctaaacagcctcttgttttgaaataagacaaatgaacttggcttaagttctgttttcccttccttcctcccttcaccccctcactctcattccttttttcctcagggattttttggcagagggcagagagaggaacccattcccaagtcctctattagagaaggcgtgatggtgagaggggggcttcactcagcaaccgtgccaggacaaagggcaaacgagggcaggccgctctcaggctgggtcgggggcagtgaggagcagagcggcccttctcatcgcagcccccaccttgctgtacgctgtgggcttgaggtttccaggagagtctgcggtgtagggagcgctctggctgggagggaggagacggcctattcctcagtggggcttcctcgctcacggtgtgtatggtggggagaggagcacacaagtaccattttctgaggattgtgccagaccatgtcatacgtataagctcattcaaatcgatttccagataaggccgggggagggtagccgacttgcccaaggccacgcagcatgtgcgcggtagagccggtagggacgcgcagagggtcttgctaccgactctccccgctctcccgggagtctgggagccctgaggtgtcccctacccggccgggaagctgggctctcgccccgggactgtccggagggggctccagcagggggcgccccgagccccgtcccgggcagccgggcgcgcctccagccggcgcctgggacggggctggccgctccgccccctcggctcctaggctgctcggcgggcgggtgccgggcgctctgggaggagaggactgcagggccgagcccagcgcaccccgccgcgtcccccgttcccgccgcgcccgccgcgcccgccgcgcccgccgcgcccgccgctcccgccgcgcctgccgcggccgcgaccgcggcagctcagcctcccgccgtgagtagcacccgtctgcgggctcgatgggcgggacggggcgcgcggcctgacggcagcagcgcccgggtctggggctggcggggcgaagagatccggggcactcgctcgcagatcccgggcccgccgccccaatgcctgacgccgtggcccggggcattgtggccggcacccg

SEQ ID NO: 14091 - DNA, 2300 bp, Homo sapien
gatcccccggccgccccctcggactccggctccaggccggggaagggcggaggcagtctctccgaagcgctacagccaccaccacccgacgccatcttcttccacccgcggcggaagccgcaacaacaactttatcgagagatagcgccgtgagcaaagcgatccaacggtgcgaggagtgggagggccgcaagggaccccgtgggatccgaggggcggagacctaggggcggggcttaggcgctgggggcggggcggcacccggccagctgaggctgcgcagcaaatccgaggcctggttcgcgatgctgagatattaacgagtggggccaaaggggcagaaaagtaggagttaggggctgctcaggtttctagggccctttgtgctctggatagctttatccaacaggcttctaagagttcgtctgaatgaaggagtgtcactaaaatgtttgaaaacctctacatgccatctacccatgccaagcacaatgccctcacagagagtcaataaatatttcgattgaggtatctgaacaagactagaagaaagcttcaccacttattccttgagcaacattcagttaattcattaagaaatacagatactgagcatctactgtatgcctggcaccttgctgtgagtttcagatacagaaatcaggtatttaatcgacagttcgacatgttcaatgctatggtgccctgtgggagcacagggaaagagataatcaattctgcttggagaagtagggaggcctcacagatgaagtgaggcctcagtgtcctagatttggctggaaaaatgttaggattatcctctcaattgctgtggagtaagtggagtggaatagacggcagggaaattattgaaccctgaccaaaatttccttgggacctaagcaattcattgtctggtgatcctaaggcctacattaactagacaaacaagactggagtttaaagataaatgggcatgttagcatgggacaattctgcaagataatcctatcttctcaatagaaatggcatttgtcaccaactttgacaagaggtttagttagtttggttgtaactgcaaattcagggatggactccctcacaggtcatgtgagctgtttgaaggcgggggcagcgttttatctttgtatcttccatgcctatggatcacctatggcaaattagtacctacaaatttgatcggagggatggatggataaaataaaatcgattttgttactggcatccatcacacccacgaacaccagagggcttaagatacacttttttttttttttttttttttgagggaagtctcgctcttctcccccaggcttgagtgcaatggctcgatcttggttcactgcaacctctgcctcctgagttcaaacgattctcctgcctctgcctcccaagtagctgggattaaggcccctgccaccacgcccagctaatttttgtattttttagtagagacggggtttgcccatgttggccaggctggtctcgaactcctgacctcaggtgatccgcccgcctcggcctcccaaagtgctgggattataggcgtgagccatcgcgcccggccaagatacacttttaaggatggcgatctccattatgtcaccactgtacacattagacacgggaaaacttatgttctaagttgtctttggaggccattagcagaaatattcgttcaaaggtgggaagctgtgctggactgagtcccttaggagacgagaaagccaaaaagccctccccatgccatacctgactacctcactggcttcccatgacatcccttttcacagcaactgaaacctacttcctgtccgatcaggaagtaagaaagacgttggctgtcagcggatcccgcggagaaataattgtaaagagtctccgtgctggagaactcaagatctcctttcccctaccccttcaggattcatctttaacttatcacggatactgagtgagtcagtcgcggttaacagaccgttacatccacttctaccaggcggacactacaagtcccagaatacaattcgctgccttccgaagaaaatagctcacgcatcccagcatgcaatgtgctgacgagccgcgaagattgtttttgtcccgccgaaatcgagcaaagcacgctggaacttgtagtccttgaggccccttccctaggtccttcgagctactccgtctggccccgccttttctctgctctcctgaacctttaggcttgtctcggcccatttgaagaccaggaagttgatcaatcccgaggctgctgagagacggtg

SEQ ID NO: 14092 - DNA, 2300 bp, Homo sapien
gagaaaaggcggggccagacggagtagctcgaaggacctagggaaggggcctcaaggactacaagttccagcgtgctttgctcgatttcggcgggacaaaaacaatcttcgcggctcgtcagcacattgcatgctgggatgcgtgagctattttcttcggaaggcagcgaattgtattctgggacttgtagtgtccgcctggtagaagtggatgtaacggtctgttaaccgcgactgactcactcagtatccgtgataagttaaagatgaatcctgaaggggtaggggaaaggagatcttgagttctccagcacggagactctttacaattatttctccgcgggatccgctgacagccaacgtctttcttacttcctgatcggacaggaagtaggtttcagttgctgtgaaaagggatgtcatgggaagccagtgaggtagtcaggtatggcatggggagggctttttggctttctcgtctcctaagggactcagtccagcacagcttcccacctttgaacgaatatttctgctaatggcctccaaagacaacttagaacataagttttcccgtgtctaatgtgtacagtggtgacataatggagatcgccatccttaaaagtgtatcttggccgggcgcgatggctcacgcctataatcccagcactttgggaggccgaggcgggcggatcacctgaggtcaggagttcgagaccagcctggccaacatgggcaaaccccgtctctactaaaaaatacaaaaattagctgggcgtggtggcaggggccttaatcccagctacttgggaggcagaggcaggagaatcgtttgaactcaggaggcagaggttgcagtgaaccaagatcgagccattgcactcaagcctgggggagaagagcgagacttccctcaaaaaaaaaaaaaaaaaaaaaagtgtatcttaagccctctggtgttcgtgggtgtgatggatgccagtaacaaaatcgattttattttatccatccatccctccgatcaaatttgtaggtactaatttgccataggtgatccataggcatggaagatacaaagataaaacgctgcccccgccttcaaacagctcacatgacctgtgagggagtccatccctgaatttgcagttacaaccaaactaactaaacctcttgtcaaagttggtgacaaatgccatttctattgagaagataggattatcttgcagaattgtcccatgctaacatgcccatttatctttaaactccagtcttgtttgtctagttaatgtaggccttaggatcaccagacaatgaattgcttaggtcccaaggaaattttggtcagggttcaataatttccctgccgtctattccactccacttactccacagcaattgagaggataatcctaacatttttccagccaaatctaggacactgaggcctcacttcatctgtgaggcctccctacttctccaagcagaattgattatctctttccctgtgctcccacagggcaccatagcattgaacatgtcgaactgtcgattaaatacctgatttctgtatctgaaactcacagcaaggtgccaggcatacagtagatgctcagtatctgtatttcttaatgaattaactgaatgttgctcaaggaataagtggtgaagctttcttctagtcttgttcagatacctcaatcgaaatatttattgactctctgtgagggcattgtgcttggcatgggtagatggcatgtagaggttttcaaacattttagtgacactccttcattcagacgaactcttagaagcctgttggataaagctatccagagcacaaagggccctagaaacctgagcagcccctaactcctacttttctgcccctttggccccactcgttaatatctcagcatcgcgaaccaggcctcggatttgctgcgcagcctcagctggccgggtgccgccccgcccccagcgcctaagccccgcccctaggtctccgcccctcggatcccacggggtcccttgcggccctcccactcctcgcaccgttggatcgctttgctcacggcgctatctctcgataaagttgttgttgcggcttccgccgcgggtggaagaagatggcgtcgggtggtggtggctgtagcgcttcggagagactgcctccgcccttccccggcctggagccggagtccgagggggcggccgggggatcagaacccgaggctggggacagcgacaccgagggggaggacattttcaccggcgccgcggtggtcgtgagtttgcacccctcg

SEQ ID NO: 14093 - DNA, 2300 bp, Homo sapien
aggcaggaaagagcttgtcaggttggaagagcctagtgcatgatggggagaggagaggaaatgaggtggaagatggaggctgggctgggttgtttacagctttgtggattgcatagagagagtgggttttattctaagtgcagtgggaaacattggaaggttttaagcacatgccttgataacagtttgtgctgcagggtagagaatggacgttctattggggatgaaggcaggaaaaaatggagactcacagacagaggggcagacagtcattaggatgaggaccaagaagtctgaggatcccaggagaggcctccctggacagtgggagttggggaggccctgtaggccagggaaagctgggtccctgaatgatggggccgtagggaggaaatgaaagcacagcacttctcctcactctgggctgcttttcttctaggggaccccactagaatctgggaagtttcagcttcctgattctgtggtccttgtgtgatgcaatttggaaaaagagaatgtgggacatgatattggtgagacctgtttgccccattttggggtcgtcatctcagcccttctctgggggcagggctggggatggaggttttttgctccagctcagaggcgtctctgcagaagcaggggaggggtgagtcccctcaaccccagccccgaagacaggcactctgcttcctcctgcccaccccaagacctcccactacgtatgagctttggaaggcagggcctcgcctctctgcatgtcacggggcctttgtgggggaagtcagtggagtagaggacctgccatggtgctgctgatagcagctctccgacagctgaagggtgcagggctgagaggtgggagcagaggtcctttccagcacatggcctgagagagttctggatcaaaatcctgccacatatccaggaagaacctgcccggaggggtggacaagagcaacccggtgccaccccccaaagtctctcttcccatccactgccctgtgcccacttatcctagtcatccaggagaagcccacagtcaagctgctgctcaatgcttctgttaagggcctaacatgaatcatctcacttttttttttttttaagacagagtcttgctgttgcccagtctggagtgcaatggtttgatctcggctcactgcaacctccgcctctcaggttcaagtgattctcccgcctcagcctcctgagtagctgggattacaggcatgtgccaccacacctggttgatttttgtatttttagtaggtacggggtttcaccatgttggtcaggctggtctcgaactcctgacctcaggtgatccgcctacctcggcctcccaaagtgctgggattacaggcgtgagccaccgcgcccggccaaatcatctcactttatacacttgcctgaaggagccacgttatccctattttgcagatgagcaaaggtctacggagctcctgaaatccaggcagtctgacgtccaaatcggagtctaggtccctaaactgcctcttccccacaaacagcctggagccccttagggttggaagatatgagtgaatggatggatgaaaacaatgaatgaatgggggggcctgtggatgctggggaaaggggcatcaaagctggactgggtccaagccttgctcaggtgtggcctcagccggggaatccagatcacaatttcagggaccaggctgaaaggagggaaaggctcgggaagggactgaggaacccaagacaggtccctggttggccccaggaccggcgctgaggcccgggccccgcctccgtccgcgcctggagccacaggccgtccttggtaggcgcttaactcaggttgggtgacattttcgctcgccagttcctggcatcagtgagtgctccgtcaatgtttgacaaacggttgactccactgccccgcgctgtgggcgcactagacttcgggggcggcgtccaggtcccgcctaatcttctaggctcaggacccgcggcgcaagggaacgcccggggcggggtcgcctgggggcggggcctggggtggggcctgcggaccgagggggcggagccggccgccccggggtcctcagtccgctccgggagagttagggctccgagccgagcgcgcggagcagctggggccggggcgcggatgctggaagttcacatcccgtcggtggggcccgaggccgaggggcccaggcagagcccggagaaaagccacatggtgagcgcggcccctggatggggaggggcgccgggacccgcaggatttccccgcgctgcgctca

SEQ ID NO: 14094 - DNA, 2300 bp, Homo sapien
tgagccaagatcgcaccactgtactccagcatggacgtcagagcaagactccgtctcaaataaataaatattcctggaagaatttggacattatcactcatacgttagttcctgggtccctgttgttctcaggtggtagaacacaggaaatcaggatctgctctgtggaacaactttagtagctttataattctcctctacaaatgcggaatatgtgtccagacagaagatagaactatgatgagcaatgtaaaaccatactgcatatgtagccaacagaacaactgtcaatctgggcatgattgactccttccagtttgttactactctttaattactttttcacaggcaggtagcagtggaagaatcatgagagaaaagtttcacattgagagcattttatccatcaacctgatttcttttgaaagtgggagtgggagaaaggctgctgtgatgccattttagccttagctcctcatgtgcaggaggctacttgggttttttgagtgtttctttgtttttgagacagggtggagtgcagtttcacgatcacagtacactgcagccttgaccttctgggctcaggtgattcccccacctcagcctctggggtagctgcgactacagatgcgcaccaccacgccctgctaatttttgtattttttgtagagacaggtttcaccatgttgcccaggctcaaactcctggactcaagtcatctgcctgccacagcctctcaaagtgctgggattacaggtatgagctactgtgcccagctggaggctactttgaaaacatgatttagtaaacatttttctctggctatggcagcctgagaccagtgagtgaagaaagaggcttaacaaaataggagaaaaaaaaaaaaaagggatgagagatggatctggaagatcatctttgtcagtataacaatgtttaaaacttcctcctgattggggttgtctgaattgaggtgcaaggatgggaaataagagaactgtcttgaagctctacaacctgtgtaaggccgctgtaatgaacaacaaagttaatgccagtggccttgcataacttcagtctcaggtcagcgcctcatgaagactacattgcataatttatgtaaatggagccctgcctataatctgtgctgtgacgacctggaatttctacgaagttaatcgttgaaaattagttttaaagacgttttaacgccataggtccaaattttggaagtttgtgttttggtttgttttggtgtgtaagactcccagtaccaaagtatctatgttgtagattgggacaacactaagtgtgtgaagacctaaaatagccctgtggggacatctagtaactattcctgacctccggaaaaaggcattgtatcctcaggccgtggcataaattatttctcatgtcagtgcggatgtgaagctatcccaaccaggacttgttgggcactcagtactgccgcgctgtgagggagctgtggacagagtaaatgcaacacagtcccttccgcagaaaaaaaaaaaaatgtagtctattgggggaaaaggtaaaggaagttaagaacagcgtatacaataagatgtccattgatatacacaacagtaagcacagcaagattacagaagggagagaaaaatgggtagtaacttgacggcctcagtaaaaaaggaagtgggttgtgcagcaagttttgcaagacaagtggaggagccgtacaaggccacgctcggtaaggataaatgtccctgaagtgtttggaagccacaacgtttagagccaatttggcggtgacaaacacttgactggcccaaaacagtgacaagcttcccgtgccccttgtccaggcccacgtatttgctaacctcaagcgccagctaccgcaggccagtggaacagcgctccgggcggggcgggccgcggagcatgccggggcttgtggtcttctcggagcccgggcccgtgctctgcgaggccgccttccgccggtggccttcctgtgggcgggagagggcggccgggagcccaatgagggagcaataacgtggcaaccacccacgagcccgcgtcggtgcccgccccgcagggggacctactatccggcgccgagccggaggggggaaacggcgcccgccgcccgcccggagcccgcgagcaaccccagtcccccccacccgcgcgtggcggcgccggctccctagccaccgcggccccaccctcttccggcctcagctgtccgggctgctttcgcctccgcctgtggatgctgcgcctctccgaacgcaacatgaagg

SEQ ID NO: 14095 - DNA, 2300 bp, Homo sapien
taggccgggcatggtagctctcgcctgtaatcccagcattttgggaggctgaggtggatggatcacttgaagtcgggagttcgagagcagcctggccaacatggcaaaaccctgtctctccaaaaaatgcaaaaaaaaattggtggacaccatgcctgtaatctcagctacttgggaggctgaggcgcaagaattgcttgaacccaggaggcggaggttacagtgggccaagattgcgccactatactccagcctgggtgacagaatgagactctgtctaaaaaaaaaaaaaagttgtttaggatttaatgaatcaagatagactaatacaatatatgaaatagttattaattccaaatatgtgagacctaccctcgagagaagtatgtgttagatgtacatctgtctatatcccacccatagaaataaaaagggaatggggctggacacagtagctcatgcctgtattcccagcactttgggaggccaaggagggaggattgcttgagcttgggagttgttcaggaccagcctgagtaacatagtgagaccccatctctataaaaaatcaaaaatttagtctggtgtggtagagcgagcctacagtcccagctgctacttgggaggctgagctgggaagatcgcgttagtccgggaggcagagattgcgagccgagatcttaccactgcactccagcctgggtaacactgagaccttgtctcaagttaaaacacttagaggcagaagcaaacaataatctacaacatatgcaactgtagaccactatatacataaatatataagatgggaatgtttctgctctgtgaaaccagataattttttaagtgttctataatcttttttttttttttttgagatggagtctcgctctgtcacccaggctggagtgcagtggcgccatctcagctcactgcaacctccgcctcctgagttcaaacgattctcctgtctcagcctcctgagtagctgggactataggtgcgtgccaccatgcccagctaatttttgtattttcagtagagacagtttcaccatgttggccaggctggtctcaaactcttgaccttgtgatccactcacctcagcctcccaaagtgctggacttacaggcatgagccactgcgcctggcgtctgtaatcctatttaatatctactattctcatggtaccagttatatatttagtgaatgcctcatatttacaatgcactttataaaggaaattcattcacaatttgccacttaggtgagaaagtctggattttggcttcttaatagttatgaatttcaaatctggggaaaacccagccttgtgttttttcccccttttcctttcatcagcacttatcagcaaccaaacactaagtgtctgttgacttttctccagctgataaaaaacaaaaaactatagagactccctgtgaaaagagggccagttgtgctggcctggggccaggctgcacgctctgtgaccttgcctcttcagtctgagttgtccatagggcaacagttccaaatagcccatgtggctatggcagtaagcatagagagtgctcatgaaccagataatgtaacaagttatgttagcctggcctttgagctcagtgagccatcctttgagccttttatgatactgcactttcaggcatccttttgggaagatccaatggatcagggaccattctctatcttatagcagtggaaatgtttttggcactgtggtattaaataactactcatttgaacgtattgtgcaatgacttagcctttcccatcattattagttcccattgaagctgttgtgctcagtttgagtttccagtagggactatgaaagaaaatggaaatctcacaaattgtacttttaaaaatattttattcagtgctaatactgttatctcatattttggcttttgtgtctcccactgtatacccccatttcccctctgctttcaggtgaaggtctcccacaggtgtattactttggaccatgtgggaaatataatgccatggtgctggagctccttggccctagcttggaggacttgtttgacctctgtgaccgaacatttactttgaagacggtgttaatgatagccatccagctggtaagttggaattgctcttctagaagagaataagctggttcctcagccacatccttgtgggccttttggtgatttactagccgtagcaacacatcaagaattagtactcacaggcttgatggcattctgggaagctggctggggcaaaaagggtaaattcagagaagtcac

SEQ ID NO: 14096 - DNA, 2300 bp, Homo sapien
gaaggaagtatagttgacagtctcacgtatagacatactcccaacaattatgatatttttttctctttctttctaatatcatttgagggatttaggcaaaagacaaggataaccgggatagtggatatacttgaaaataggagaaacaatgaggaaatatgaattcttaatgttgttcatgtaggaagttcagtagttgctgacctcctttgatcgctttgatttttttttcctttacagaatatacattataaatgtaaatctattgtaaagcaaagaaaacaaaaatgaaaagcagtttatttaaactataataaagcaatcagaggccaggcatggtggctcacgcctgtaatcccagcactttgggaggctgaggtggttggatcacctgaagtcaggagttcgagaccagcctggccaacatggtgaaaccccgtctctactaaaaatacaaaaaattagctgggtgtggtagcaggcacctgtaattccagctacttgggaggctgaggcaggagaatcgcgtgaacctgggaggcagaggttgcagctagccgagatctcgccattgcactccagcctaggcaacgagcgaaattccatctcaaaaataaataaataaataaataaagcaaacagattgtattattggattatgtgcccacttgtacagtcagctgacagctttttacctgttactttagtagggaattacaggtcctcaggaagtttagagtataggtgtctttgctttgttgtataattggtgataataaccaaacatttgacatttgttctaattctcttaagttttctttctttctttctttttttttttgagacggagtctcactctgtcactcaggtgggagtgcagtagcacgagctcggctcactgccacctccacctcctaggttcaagctattctcctgcctcagcctcccgagtagctgggattacaggtgcctgccaccacgtccagctaatttttatatttttagtagagacagggttttgccatgttggccaggtggtctcaaactcttgacctcaggtgatctgcctgccttggcctcccaaagtgctgggattacaggcgtgagccaccacacctggccttcttttcacttaagttttaaggaaaacatttatgaaagtgaaatataagtgtgtgtttagtatgtgattggtgatagcagtatttttttttttgttaagaatactcacatggataatcaaatatagcatcaaaattatctcattgcaaacatttgtgttgggctcagtcctgaatttggacactgcagaattctggtagagatgaatgttacgcttaagattttttttttttttttgctttattttcactttggggttctgcaaaggatctctttttggcactctgtcattgcatactcagcatacagcaaaaaccaccaaaagtttagcttttcagaactttaggactacttaataccaatagagttttggaagttccttcatagaggttgtctgtgttgattggtaactgaagattacataattcttgctagtgcttggtaaatgcttggataggggaatgggggagtgaatagtctaatttcttataagttttggcgaaattaaaaggaagagcttaaaattaaatcatcctcagtttctttaacttgattttagcactgctctgtatttctgttagccagtgatgaaaaacaattgtctttctttttggtcatagatacattactagaagaaagcattctatattaaaggcttgtgtgtttctgtagcttctatggtttgcagcctactgagcttatgatactatgtgaataactaatccagatggttaaactattggaggatagaaaaccaaaacccatttcagaagctatgcattttgctcacctttggataggattcattctaattggtagtgactttctgaatttgtttcaaaatttaatttttaactacatgttttcttgatttttacctaggttacaagatgttcacctaagattgagacctagtgactacatttcctacgggaacaaataaatggtttttcatctcccggagatacattacaaacaaatatggtgctaaaagaactccttacctttctctgactacaatttatttggacatacttttgtattgaagagaggtatacatactgaagctacttgctgtactataggagactctgtcctgtaggatcatggaccatcctagtagggaaaaggatgaaagacaacggacaactaaacccatggcacaaaggagtgcacac

SEQ ID NO: 14097 - DNA, 2300 bp, Homo sapien
tttctgaaacggagtctcgctctgttgcccaggctggagtgcaatggcgcaatctcggctcactgcaacgtctgccttctgggttcaaatgattctcatgcctcagcctcccgagtaggtgggatcacaggtgcccaccaccacgcccagctaatttttctatttttaatagagacagggtttcaccagtttggccaggctggtctcgaactccttacctcaggtgatcctcaggcctcggcttcccaaagtgctgagattacaggcgtgagccaccgcacccagcctccagatacgagttgtttttttcgagtattactttgttaacttttaccccaaccattcattttcccaatattttcaaaccccaaatcacccagacacaataaatgaggtctcttttcttatccatagtgtcggtatgaaagtttattttgaaggtttttttttttttttttagacggagtctagctctgtctccatgctgcagggcagtggcgcggtctcggctcactgcaacctccgcctcccgggttcccgcgattctcctgcctcagtctcccgagtagctgggactacaggcacacgccaccacgcccagctaatttttgtttgtttgtttatttatttattattatttttgagacggagtctcgctctgtcatcaggctggagtgccattggagtgcaatggcacgatctcggctcactgcaatctccgcctcccgggttcaagcaattcccctgcttcagcctcccgtgtaactgggactacaggcacgtgccaccacccccagccaattttttgtattttagtagagacggggtttcaccatgttggccaggatggtctccatctcctgacctcgtgatctgcccgcctcggcctcccaaagtgcttacaggaggactacaggcgcgagccaccgcgcccggccaatttttgtatttttagtagagacggagtttcaccatgttggccaggatggtctccatctcctgacctcgtgatccgccagtctcggcttcccaaagtgttgggattacaggtgtgagccaccgcacccggcatattttgagttttgagtggaggattagacagtcttcttccttcccaaatttgattatgggctccctttagcctttttctttgttttctgtcttttttccaccaccaccccgcccccgaggcgcagtctcaagaggtcctgagaacatgtgccctgctctctgttttaaggattaaaataactgtcgagttacattgaatcttttttgcctattccatttggctaggttaattccagaccttacacaaacatgtgcagctcttacaaaatgtaggtgaagacaacatttttctaaccattcggcttcatgggctgtcacaggagaactaagtgcatgaaaaacctttcacaacattgaaagaaattttaaaaatctggttgaaacacaattaaaaatccacaagagggagatgcttgctaaaccgtcagaaaataattccctcgagggacctgagagaggagcctggagccttaggaacagccactgggtcagccacgggattaagggtgggagggagcaggagtatatagagacgggggcttggtggaggagtacagttgaagggaaaagcgggatgggtttcgtgcctctggcagcgaagcgtgtacttggtctaagatcttgagcagaaggtaagagcgtgttgccaaagcagagctcagtgctcccgatatatcttctggtagtcccagaagaaatgggggtgggttgctttgaaggcacttccgcttagcaaccccacgcggttgctaaggagggggcagccgtggggataacccggaagtgatggtgtcagtttaacgctgcctgcccaaagtttgtcctattaggcccgccagggtactctgcgactccgggacgagggcggggccgcgctagtggttccggttcggctccagccgcccctcggctcctcgccttccccctcccgtccgccttctcccctccctcccgctcctgggaaagagagaaaccaccgctgcgggtgggtagagaagcacttggcgcctcggggaggggaccgcgcccgcctcatttgcgccttgcagcactgctggaccaggtatctgcccggcttcgtcggggttctgtaggctgaagtctgagggggtgtgtgtgtgtctgagggggttggtggggggccctttcctgggcgtgggtgggggacgccgtgatcccgggtggggcgcaggctggcgtttgtgtctgtggagggttgcgggggcgga

SEQ ID NO: 14098 - DNA, 2300 bp, Homo sapien
tctttttcctttaggcttttcttacaaggcaatttccttgttggcttatataacttgaattccattaatcctgtcccttaaaaaactaccagttcaacttgcacaagaaatatataaccaggctgtgtgcggtggctcatgcctgtaatcctagcactttgggaggctacagtgggcagatcgcttgagctcaggagttccagaccagcctgggcaacatggtgaaaccccttctctaccaaaagggtggcggcgccgcctataatcccagccactagggaggctgaggtgggagaattgcttgaccctgggagatgaaggttgcagtgagccgagatcccgccactgtactccagcatgggtggcagagtgaggacctgtctcaaaaataggcctggcacagtggctcacctctgtaatcccagcactttgagagtccaaggcaggcagatcacaagatcaagagatcgagaccatcctgcaacatggtgaaaccccgtctctactaaaaatacaaaaaattagccgggcgtggtggcacgtgcctgtaatctcagctactcgggaggctgaagcaggagaattgcttgaacctgaaaggtgttggttgcagtgagctgagatcgcaccactgcactccagcctgggggacagagcgagactccatctcaaaaaaaatcaagtaaaataaaaataaaaatatgaccaatatggaaaagttggaaaatatagaaatccccatcacctagaaccaactaggaataataccatggtgtattgtctttacaacttctctgtaagtacgtaagaatagtgaaaaacaaaaagtagggataaaactacacacaccaaacttggtgtgcaacctttaaaaaaaagtttccgagtttcatccgttgtatttcatgaatatctcattccttttttcctttttttctttctttcttcctttttttttttttttttgatatgggggtctcactctgtcacccaggctgtaatgcagtggcccaatgttcgctcacttcaacctctgcctcctgggttcgattgattctcccacctcagccttccaagtagctggaattacaggcatgtgccatggagttcagctaattttttgtgtttttggtagagatgaggttttgccacgttgcctaggccggtctcaaactccggagctcaagtaatccacttgccttggcctcccactgtgctgggattacaggcataagctgccacacctggccagtgtgcaaactttttttttttttgagacggagtttcgctctgttgcccaggctggagtgcagtggtgcaatctcggctcactgcaacctccacctcccgggttcacaccagtctcctccctcaccctcccaagtagctgggactacaggcgcccgccaccacgcctggctaattttgttgtatttttagtagagatgggatttcaccgtgttagccaggattgtctcaatctgacctcatgatctgcccgcctcggcctcccaaagtgctgggattacaggcgagtgcaaccacacccggccacaaactttttaagaagttaatgaaaccataccttttacatttttaatgacaggaaaatgctcacaataattgttaacccaaaattctggatacaaaagtacaatctttactgtgtaaatacatgtatatgtactatatgaaaatataccaaatatcaataatacttatctctgggtaaaaacctcttctcataccctgtgctaacaacttttaacaaaaaatttgcatcacttttaagaatcaagaaaaatttctgaaggtcatatgggacagaaaaaaaaaccaagggaaaaatcacgccacttgggaaaaaaagattcgaaatctgcctttttatagatttgtaattaataaggtccaggctttctaagcaacttaaatgttttgtttcgaaacaaagtacttgtctggatgtaggaggaaagggagtgatgtcactgccattatgatgccccttgaatataagaccctacttgctatctcccctgcaccagccaggagccacccatcctccagcacactgagcagcaagctggacacacggcacactgatccaaatgggtaaggggatggtggcgatgctcattctgggtctgctacttctggcgctgctcctacccgtgcaggtttcttcatttgttcctttaaccagtatgccggaagctactgcagccgaaaccacaaagccctccaacagtgccctacagcctacagccggtctccttgtggtcttgcttgcccttcta

SEQ ID NO: 14099 - DNA, 2300 bp, Homo sapien
gtgtgcagtggcggcgcaatcttggctcactgcaacctccgactcgctggttcaagtgattctcctgcctcagcctcccaagtagctgggaatacaggcacgtgccgccacacccagctaatttttgtatttttagtagagacgggggtttcaccatgttgtccaggttggtctcgaactcctgaccttgtgatccaccctcctcagcctcccaaagtgctgggattacaggcgtgagccactggacccggcaagagtatttgaatagctctgcttgtggacaaaatataaaaatatttttcagttgtaaaaattctgttactactgttattgctaagataaccatcacactgagtttattggtggaatacagctttattgtgtcacattttctaattctttaagttgtatatcttaaataaagattatttaatacctttgagaatttgatgttaaagaaggaattaagttgtttaaggaatagagattgtattattagcacttatctagttccatctgtttatattttacagctgaaaataaatatgcaggagggaaccccgtttgcgtgcgcccaactcccaagtggcaaaaaggaattggagaattctttaggttgtcccctaaagattctgaaaaagagaatcagattcctgaagaggcaggaagcagtggcttaggaaaagcaaagagaaagtaagtttttatattctggaatataaagaaaatatttatctcacgcctgtaatcccagcactttgggaggccgaggcgggaggatcacttgaggccaggagttcaaaaccagcctgtccaacatggtggaaccctgtctctactaaaaatacaaaattagctcggcgtgctggtgcacacctgttgtcctagctatttgggaggctcaaacaaaagaattgcttggtgcagcaaaccaccatgcacacatatacctatataacaaacttgcatgtaatgcacatgtatctcattttcacgccactgccctccagtctgggggacagagtgagactctgtctcaaataaaaaattaattaattaattaataaagaaaatatcttgaaaataaaggacaaataggatattgagtcaagtttctcttcaagctcataagaaaatgcaaaaaaagtttttaaaaacttcttctaatttcttattataactcactcccaaatttcttttcttttttttttcctgagacggagtcttgctctgttgcccaggctagagggcagtggcgctatctcagctcactgcaacctccgcctcccaggttcaagcaattttcctgcctcagcctcccaagtagctgggattacaggcacacgccaccacgcccagctaatttttgtatttttagtagagacagggttttgccttgttggccaggctggtcttgaactcttgactttgtgatctacccaccttagcctcccaaagtactgggattacaggcgtgagccactgcatccagccagcaaatttcaaacattagtaaaaagtattctttttactcttcccaatctctcaaagaggatcagttcccattcacataagtgctatgtcattaaccatgaacttagtgtattgagtctttaattcttactgtctttttcctttaggcttttcttacaaggcaatttccttgttggcttatataacttgaattccattaatcctgtcccttaaaaaactaccagttcaacttgcacaagaaatatataaccaggctgtgtgcggtggctcatgcctgtaatcctagcactttgggaggctacagtgggcagatcgcttgagctcaggagttccagaccagcctgggcaacatggtgaaaccccttctctaccaaaagggtggcggcgccgcctataatcccagccactagggaggctgaggtgggagaattgcttgaccctgggagatgaaggttgcagtgagccgagatcccgccactgtactccagcatgggtggcagagtgaggacctgtctcaaaaataggcctggcacagtggctcacctctgtaatcccagcactttgagagtccaaggcaggcagatcacaagatcaagagatcgagaccatcctgcaacatggtgaaaccccgtctctactaaaaatacaaaaaattagccgggcgtggtggcacgtgcctgtaatctcagctactcgggaggctgaagcaggagaattgcttgaacctgaaaggtgttggttgcagtgagctgagatcgcaccactgcactccagcctgggggacagagcgagactccatctcaaaa

SEQ ID NO: 14100 - DNA, 2300 bp, Homo sapien
aaaatacaaaaattagccgagtgttttggcacgtgtctgtaatcccagctacgtgggaggctgaggcaggagaattgcttgaacccgggaggcggagattgcagtgagccgagaacacgccactgcattccaacctgggcgaagaagtgagactccatctcaaaaaaaaaaaaacacacacacaaaaaaaccactgtgcaatgagatgggccatgaggacaaaaaacaaaggaatgccctgggtcttgtggatttttccggttgatttggctgtaaccttagataccaaggttaagacaaaactacaggtaattgccaatacattttctattattgtgttaatttaacctgttgcctagattccttaaatctgtgttacagagtgcagttgttgattctgttaaagtactgagtagcctaattctaagttcgagcaattcattggagagaattaatgctgtgtttacacttctagagtagcctttcaagtgagcatttaacagaatacatcccaaagcaagttcatctgatcctgttttttgttgttgtttttagagacggagactcgccctgtcgcccaggctggagtgcagtagcgtgatctcggctcactgcaacctccgcctcccgggttcaaggaattctcctgcctcagcctccagagtagctgggactacaggcacatgccgccactcccagctaattttttattttttatttttatttttattttagtagagactgggtttcaccatgttgcccacgctggtctcgaactcctgagctcaggcaatctgcctgcctcggcctcccaaagtgctaggattacaggtgtgagccaccatgcctgaccgattctgttttatgtatggtatttagagagtgaaaatcactccccaggggtgttgtgagtaattagaaggtaagcataaagatagaaaaaaattatgaccctttatcctagagttatgctcactgtgtgacagcgatgtggtcttaccacatttggcagggtcttttcgtttcgtttcgtttcatttcatttccttgccttgccttgcctttcttttcttttttcttttcttttctttctttcttttcttttctttctttctttcttttttttttttgagacaggatctcgctctgtcgcccaggctggagtgcatggtgtgattatggctcactgcaacctctccctcctaggcacaagcaatctcccgtctcctgaactcaagccatcctcccacctcagcctcccgagtagttgggattacaggaacatgccactgcacccggctaatttttgtatattttttgtagagacgggtttcaccgtgttggtcaggctggtctcgacctcctggggtcaagcgatctgcccgcctcggcctctcaaagtgctgggattacagccatgagtccccgctcctggcagatttggcagattatttaggagctctgacaccattcggttctcaagaagacgttttattagtttctttttatgtgtgtatgtatatacaatccccctagtttttgtttagtctcacatcatcctaaagacatttaaaaaaacccttgtaaacaagttgtattagcttccttttccccattccatagaattgttttagtatggatgctgtacaaagagttcatgcctgggggactaaaggaaagttctcaagttcttttaattttgatttgcatcaaaaagtccgcttaatttcaggtttcacctccaggagtcaatcattatggacttaaagctatagtaacttttgaagatcgtttgtaattcgctgtctttgctaggttttcttttctaagcaggctcatttctgtagttcagaaacttagcacccactagtcgggtacccctggagagtcctggtaccgcccacctggggcgcctacgaatcctaggcctttgcgtgttgatggacggattcgcgctgcaagaagcctcgccgctgtcaccactgggcattggcaattggttcagggggaacggcgcggaaccaatgggagcggtggctcgggagagaccttggagcgcgcgggaaagagaccaatataaactgtggcgggatagttttcgggtccttgtccagtgaaacaccctcggctgggaagtcagttcgttctctcctctcctctcttcttgtttgaacatggtgcggactaaagcagacagtgttccaggcacttacagaaaaggtgaggcgatcgagtgtggtactggagggcgggggggtcctcccggcagcctggccacgggcgacagacgccagaggtcc

SEQ ID NO: 14101 - DNA, 2300 bp, Homo sapien
gagactggcatgtgagtcagtggactgagtggggcagatctgctctcaatgtgagcgggcaccatccaattaaccaaggacccagaacaaaaaaggtgagaaaaaatatttcttccttctggagctgagacactcttctcagacttctgctcccagacatcagaactccaggccctccaccttgagacttgaagatttcacaacttggactgagccagctaccagcattccagggtctcctgcttgcagatggcctgtcatgggtcttttcagtctccataatttcctgagccaattccctaataaatctcctcatagatctgtatctatatctatctgttatctatcctattggttctgtctctggagaaccctaacacagggactgaataaataaacaggtaaatgactttgataccttacaattattattaaatgtagtggagttttacaaagaaacaaaacttgtacccacaattaataaacattcacagagtattttgactttttcttaaaaaaaaaaaccctggaaaatcatctgctttccaaattaatgatatctacgacaatctaaatggaatgtaaatcaatacacttatgaggttttgttttgtttttgtaaaaaggccttgctctgtcgcccaggctggagtgcagtagtgcaatcagggctcacttcaagcttgaccttccaggcccaagtgatcctcccacctcagcctttcaagtagctgagactacaggcatgtgccaccatgccaggctaatttttttcatttttgtagagatgaggattctccttatgctgcccagactggtccggaactcctgggctcaagtgatcctcttgcctctgattcccaaagtgctggcattacaggcatgagccaccacgcccagtgtgtgtgtgtgtgtgtgtgtgtgtgtttgtgtgtgtgtctccgtgtgcgctcgggtgatcctcccgcctcggcctcccaaagcgctgggattacaggcatgagacactgcgcccggccaatacactcatgattttaattataatatttatgccaatgaaaacactagcaaaaaggtaaaacagctgccaatttaatgtgaccacttagtctaaacaggctagtagaaatgaagaacttttaacctgcaaatgcaacaaaaagccagaaatgaatgggaagacattatgatctccagaaaagtttggctaaattttccccagcccattgtcttagcggggtagggaattgcagacagcccttaaatactgtcatttttggttgagaactcatgtggaaagtcctcaaagccaaattccaactcctgttttactgttttttaccctcgagcttgctgagttgtcttggctctcctggaaaatacatggctcaaaaaataaaatagaagttttagcggtgtgaatctagtagtcgactacagggggtattaaaaataaacactccatcccggttaacacgtgaaaccgcgtcgctactaaaaatacaaaaaaaattagccgggcgtggtggcgggtgcctgtagtcccagctacttgggaggctgaggcaggagaatggcatgaacccgggaggcggagcttgcagtgagccgagatcatgccactgcactcaagcctgggcgacagtgcgagactccgtctcaaaataaataaataaattaattaattaattaaaaaattaaaaccaccaccagagcaaaaacttacagcgcttacaataccttccacgtgctgttttattttacataaaaccatgacgattaaaaagctggcctctcagctttccgggtattggtttgttttccccctaaactgtcgtttttataggcacttgcactgtcttcttagcagaattgccaatggccttcctcgagtcctacgtttagcgattggcaagaatcatgcactgacagagctcgactccggagggcacaaggaagtagacaacaaagcaggaagaagcaggaggcgcacagatgggcgggatctgcactggaggcggtgcgaccttgcggggcggtgcaagctggcggaacccgcgtgagagaggttggtgttgcgaagggaactagtccggtgcaggacgtggggcttttgcagctcagctggttccggctggggaagatggcggtggctggggcggtgtccggggagccgctggtgcactggtgcacccagcagttgcggaagactttcggcctggatgtcagcgaggagatcattcagtgagaacagttcgggtccaagcggggaaggagctctgggatgtgcactgcctgag

SEQ ID NO: 14102 - DNA, 2300 bp, Homo sapien
cattgcactccagcctgggtaacagggtaagactccatctcaaaaaaaaaaaaaaaagatgagaactgcgaattgaccgtttgatttagcagcatggaagtcaacagtgacctttacaagaatgattttgatggaatgatgagagtgaaagcctacttatagtgaattcaagaaaaaagtaggagaggaattaaaggcagggagtacagataatcttttgatgaattttgttgtaatgggaatctgagaaatgagtagtagctggaggaggatgtgggatctggataagagattttgtttcatgccagacattacagaatgtttgtgtgttaataggattgatccagtagagaggcaaaaactattgacatggaagaaggaggagagattggctgaaatggtttatggtgttggaaaagcagagctgttgattgtcctttgcctcaatggtctctaagccacagggaaggaaaaacaggaaaattaaagagatagtaattatgaatgctgctgctctggtctctgtagaattaggtttggagatcttgatggcagcctctggttttatttgtgccaaagcacctcagcatggatcttgtgcagagcttatttccttctaatacccagcaataacagctgggccctgtttttctttggcttctgaagataaaagggataagaaagaagagggtttacctttgtatctgtagccttacttttctaccgtgaacatttgaccctgcctattaatatgattgtggctgatagttaatattaagtttgttttattggctgggtgcggtggctctctcctataatcccagaactttgggaggttgaggcaggagaatcatttgggtccaggagtttgagatcagcctgggcaacatagagagaccccatctttaaaaaaaaacaaaacaaaaacaaagtacatgtcccacctcttccacactgaaagccatggtgtatgggcagggccagatgctagtaaaaatcccttctgttttctccacagcatcacttatcatgtaggacaagagtggtcaataaagaagtttaactattcatgcttctagttacagagaaatttgaatttccttactttttaaaatgaaacttttagtggcttagactttagaaggcttatcttagcagtcaaataagggtggaaaatacaggtaatttcatactttttacggtagttactaggagaaagtcttctctggtaatgaagtctgacccagaagcctatgagtcatatttgttgaatgtgctaaacataagacatagtaagataggaaataatgaaattccagctcagccattgctaacccccaattgttcttaaattgtgattgtgtagccagcatagtcttactctaggttctgtgtctgtttttacaaaaaaagtaaaagtcctaactattcacacagatttgtttttatgataagagatccaaaggaggtttctaaataattttcagaattgctctaaccagttaccttttcacccgaagtagatctggaaagcatccagcaaaacagcttttgcatgttcatacctttcagaatgaatcatcttccttccctttagctagagaagggctatgtgtactgtttctggcagaatttccacagatgttttatttttcttaagtcttccagtgcttcacttgagttgaacctagggggtacctgatgttccccaaggagatctctgaatctcctgactcttggttgtttgtgataaaagagcattccgttctgattcttctgggaggatttcaggtatccttttttttttttttttttttaatgaagttgttcccactataggaaatcagagatggcaggcaatagactgtataatgctgtactaaggattgtagaaaggtgaaggtttgttcttgcttgttgagcataatcctctttacctgtgaaatggaaagtagtatcatcagaatgttgaggtgaaatctgggacatcttctgttctccttaaattcaaagcttgtcccaactatcctgaactttttatttttatatttcacagtttccagacatcagtcaagagtctgattctccatttgttttcatctgcaaaaatcctcaggaaatggttgtgaagtttcctattaaaggaaatccaaaaatctgtaagtcatgattttttttctttaagactagtcaagtgcagtagtaaggaatggggaaaaaagtagaacaaggagttcaatctataactgactgtgaacaatcagttgaggtaacccactacctttggatcagcctgtaag

SEQ ID NO: 14103 - DNA, 2300 bp, Homo sapien
aggcagaggttgcagtgagccgagatcacgccactgcacttgagcctgggcaacagaacaaggctctgactcaaaaaaaaaaaattttttttttaatggatagagaaaggtggtggacagaggaataagcaagaacagaactctttggctttatcataaaataatactggatggtatatgttgactgccaggttttctagatggcacactcctcaagtcttgttagtcaggagatagtggagacagagtcttactctgtcacccaggctggagtgcagtggtgtgatttcagctcactacaacctctgcctcccaggttcaaatgattcttctgcctcagcctcccgagtagctgggattacaggtgcctgacaccacatctggctaatttttgtatttttagtagagacggggtttcaccacattggccaggctgatcttgaactcctgacctcaggtgattagcctgcctctgcctcccaaagtgctgggattacatatgtgagccactgcacctggccataaattgcacttttaataccccatcaccaccacccccttttgtagccaatctctgtttcctatggtgtgaggcctggtgtttgtcaatacagtgccatcagtattacatgagaaagtgaagagttattctacatcctggtgttaggatttttagtagtgtccagtttttcatagagtaaacatttttctttatttgtgtgtcgtcctattttagtgggaagtgggaaaggccactttgaatcctgctattgagataataatttgaaacctggagttttagaaggctgtttcagcttctctgaacttaagctgattggttgagtcccctctgagattgtctcctctagttcaagtcttagccccctgtcctgaagttgcattttccccagttctgcttgtttttctctttcattcttaaccataagacttttccttcccaatagtaggaggaatctatactatttgtactagagatagaccctgttagagagtttttaaagcttttgctagatcatgttctgcgtctctgataatgtaagaaaaagcaaggagaaatgggggtataagtaaagttgtgctagagcttgcatctgtgatatgccaggacctgtattgattgaggaagggttgccagctgacagtggtagtagaaataggtctcttaggagtgggaaattaactctagaggactcctagttaagacttaccatggaatctctgggcaattggaaatactgtactttcccctagggagatggagtgggaattgatttttccttaggtccaatgtaacttggttagaaatacaattgaacctgtttgtcatgtctgttgtgatatgatagccccataggaagggtctgtttttgtgtgggagtttatttcaggcgtctcttgcctgtattgtttcttttaacagctttttaaattttctttttccagcaatgatgttgtccactgggcatgtactgaccaatgtggcaggtctgagaacatagctgaagctgaaaataggaaagctgggggcaaggaagagccttgaatcttgaggtgggacgttgactctaagatgtccttgagcagtggagcctccggagggaaaggagtggatgcaaacccggttgagacatacgacagtggggatgaatgggacattggagtagggaatctcatcattgacctggacgccgatctggaaaaggaccagcagaaactggaaatgtcaggctcaaaggaggtggggataccggctcccaatgctgtggccacactaccagacaacatcaagtttgtgaccccagtgccaggtcctcaagggaaggaaggcaaatcaaaatccaaaaggagtaagagtggcaaagacactagcaaacccactccagggacttccctgttcactccaagtgagggggcagctagcaagaaagaggtgcaggggcgctcaggagatggtgccaatgctggaggcctggttgctgctattgctcccaagggctcagagaaggcggctaaggcatcccgcagtgtagccggttccaaaaaggagaaggagaacagctcatctaagagcaagaaggagagaagcgaaggagtggggacttgttcagaaaaggatcctggggtcctccagccagttcccttgggaggacggggtggtcagtatgatggaagtgcaggggtggatacaggagctgtggagccacttgggagtatagctattgagcctggggcagcgctcaatcctttgggaactaaaccggagccagaggaaggggaga

SEQ ID NO: 14104 - DNA, 2300 bp, Homo sapien
taaggctggatttaaactgaggcccaaaagatgagaaggagccatccatgtgaagagccaagggataagcactataggcagagggaacagcatatgcaaactcctaaggcaagaaagagcttggcatagagcacggtggctcacgcctgtaatctcagcactttgggaggctgagttggccagatcacaaggtcaggagtttgagactagcctggacaatatggtgaaaccccatctctgctaaaaatacaaaaaaattagccgggcatggtggtgcatgcctgtaatcccagctactctggagactgagtcaggagaagtgcttgaacctgagaggcagagggtgcagtgagctgagatcgcgccgctgcactttagcctggggcaacagagcgagactccatctccaaaagaaaaaaagaaagagcttggcatatatttatatatttgaggtccatatttcatttcatattactagacacaccatggaaaaacaagtctgctgattctagaagctcaagaggctgagggaatgggcaacattaaaacagctagccaaatgttatccagtgatttcacaaataatttatttattaagctaccaatcatgaagatactatggacagcccacttatccaaagtctgagaaaaataagagctatgatggtggggtcagttttctgtcaatagcagtcactgtcattccaaatgacacttactatgagagcaggactgatttccattacttaaatggcatcctcaaacccatttaagactttgccccaaacctccttaaagtgatttacacattggagtaattatcttacaaaggaggtgggaaggggccaggttttagtcccagttttttaccatttatctgtataaccttaagtaagtcacttcacttctccaaacttcaagacatgaggtagttggatgttatgacccctaaggatattgtattagggcttgttcagctagaaatgatagaaaaaccactgccaacctgacttaaaaagagaatttagtggctctcgtgtaactgaaaaagtctatatcacacatgacctgatgtacgggctcaaatgatgtcttcgggcccaatttcaaaccctccctctcttggtgttttctctggcacagctgcattgtcagccaggatctcctcctaggtggcaaggtggctgtagcacttcgatttttttttttttttttttgagacggaatcttcctctgtcgcccaggctggagtgcagtggcatgatctcagcttactgcaacctctgcctcccgggttcaagtgattctcctgcctcagcctcccaagtagctggcatttcagatgcccaccaccacgcccggctaatttttggtatttttagtagagacggggtttcaccatgttggccagggtggtctcaaactcctgacctcaggtgatccacctgtcttagcctcccaaagtactgagattacaggcacgagccaccgcgcccggcccaaattttataaactcacagctccaaacccagtagaaagagacacattcttttcttttttctttttttttttttttgagacggagcctcgctctgttgcccaggccggactgtaagctccacttcccgggttcacgccattctcctgcctcagcctcccgagtagctgggactacaggcacccgccactgcgcccggctaattttttgtatttttagtagagacgaggtttcaccttgttagccaggatggtctcgatctcctgacctcatgatccacccgccttggcctcccaaagtgctgggattacaggcgtgagccaccgcgcccggccgagacacattcttttctaatcacactaacaaaaatccttacgttcattctgattggaccagcttctggagtttaaaatcaatggccctcaaaatctttacattttgtgaccaggtgcagtggctcatgcctgtaatcccagcactttgggaggctgaggcaggcagactgcttgagctcaggagttagagaccaggctgggcaacatggtgaaacccggtctttaccaacaatacaaaaaaaaaattagccagatgtggtgttaagagcctgtagtcccagctactgaggtggctgaggtgagaggatcacctgagctcaggaggtggaggttgcagtgagctgagatcacaccactgcactccagcctgggtgacagagtgagaccccgtgtcaaaaaaaaaaaaaaattttgagcattctccaagtcttcgccttttctggttttaatttaaaacaaacaaacaa

SEQ ID NO: 14105 - DNA, 2300 bp, Homo sapien
tttgggagtgggagtttttaaaatcccagtccccagatctcacccaattaaattggatcagaataactgtgggtgggagccaggtgtcagtatttttttaagggtctccagaggctttgaacatttttacagactatcccaaattgcttattggatcatctgagatatttatacttagaatattaataaagaactcctggatagtgtatagattctctttggaagtatcctctctaaaggaacagtaaccacatttctgcctttaggtttctggttttggaagactcgtacgtaatttgacccttccttacagtcagatccatgaattgaggatgaatggtttgccaggataagtaggataaaaacctagagatgttgctgttaatctgattggaggttctgcctacatgaaatttggtagggcatgagtatttatagcatggcaaaagcattctctctaataatttgcattgcagcaacaaatttggagctaaaatacaggtttttggtttgtttttgtttttatttttttgaaacagagtctcgttctgtcacccaggttggagtgcagtggtgcaatcatggctcactgcggcctccaactcctgggctcaagcaaccctctcacctcaacttctcaagtagctggaaccacaggcgtgtaccaccatgtctggctaactttttttttcttttgtagagactaggtctcgctgtgttgaccagactggtttcaagctcctgtcctcaagtgatcctcctgccttggtctcccaaagtgctgagattacaggtgtgagccaccacgcccagccagtatgacagtttaaaaaaaaaagtttgaccagacacagtgactcacacttgtcatcctagcaatttgggaggccaaggtgggaggattacttgagcccaggagttcgagaccagcctctgcaacactatgagacctcttctctaccaaaaatcaaaaaaattagccaggcaagtggcacactcccgtagtcccagctacttaggaggctgaagcaggaggatctctcgaatctgggagatcgaggctgcagtgagccctgactgtgccactgcactctagcctgggtgacagagcaagaccctgtctcaaaaaataattattattataatggttttcattttctgtaaatctaaaatttttttaaatggttttcagataacaactatgcaccaatttaagaagaaaatcttagctagtacgtaaccacacatggtctaattctttctagtttcttcatttctggaggcaactcactcttggaagtttctgaatatatttaccctttctctacatctctggtttgaactttcatcctggaggaaatagcgctcataaatgcacatactctctaatcacatgtcaaagttaattattagacagtaacataccagagatcagctgtgggaaggaaacaatttctacattctcccatctgaggcttctgcagaggtagtagcatgtagagttccataccagccttcctcacaggcatcctcttgcaactctccctcagctctcagtcctaccaatttcctgcaacattccttgctgcaggcgtgagccaccacacctggccagaaactataatttatttactttcatacgatctgtttctccacctcaacctctaaagagaactagaaaactggagtgggaaaactttagaaaactactagtactgactgggagttgaggtattggttgtagctgcatcttcctccttgcccttactccgaacatcagtaaacaaatatgtctgtcattctcctttagaaataaaaataggaactacatagacaccattaacaggtttttgatcatttagtggtggttaaaaggacctttggccattataagaggtctagagagagtaaagaggactttactaggaaagcaaagagaagaccataactgaaggcatattcaacttctagagaataggaccaaattgaacaacaatttggcaccagtgtaaagtgtgtcagcaacaattattaatatttattgttaactattcatactagcactggacattaggcttaacacttactatttttctgaccaagctaaggaaatacaactttcaagggaacaaggtaacaaagtaggccaggtgtggtggctcatgcctgtaatccctgcactttgggaggctgaggcaagaggatcacttgaacccaggagttttagaccaacctgggcaacatagcaagaccccttctctatcaaaaaaaaaatttttttttaattagctggacatggt

SEQ ID NO: 14106 - DNA, 2300 bp, Homo sapien
ctctctcctctcccccaaccctcctaccatagagtgaccttgaaggcacatcattggaaaactggctctccctaccaccccatgcccaacaagccatattgtcaataaataaggaataactgaaaccagaccctttaggaagagacagaaattccattacccaggaaaccactcagtgaagatgctgatagttctgatatgttcttatgccctgcccccttcccccaaaaaaccacctgcagaaccaaatgtttctcctcaaagcccatcagcacagattgataataatatcactatcaagccagggctagtgcttctctacatactgtactgtcacaggtacaaagcaagccctggacagatactgtctccctgcccccacaaatccagggagaaaaagaccaggaagcttgatttccttggatttaaacctcatgttcaaaaaggataataaaggtgctcgtacttgtatcttcttccctcccccaccatcaggaattctgacattttggaagtaccaatcagaataacactggaaaggaagagccttgttttcaaaacatagtgccagctcctctgcaactatttcttccaggaaaccaagcctccacctcctgagtttttcactggagccagggaagctgaaaatcccatcccccacccaatgggagctaaattcccagccagctccccactctatggatatgaaacactcgagaacactgactgggaagaacatccggctcttatcagaatccctagttaggactctaccaggattccttttagaaagttaggggcaggcccaaggaatctaggaaacacgctatggaaatgggattgccatcactcaaagaaaccagacaccctgcacacaacaccccacccccaggccaagtggaggagcctgatccaaggcctagctcctacccaggccctggcaggccagttggctcctctctccacctgcctctcatacagccaggcccctcaaattaccaacacgctaagcaagggccctggagacaagcaagcctgttttgccacttaggaagctggaaagaattttcgagtcaagttaacccaaccccctcttcttttcacatgtaagcacactggctcagccagaactcaggtctttcaacctcacagttggtgaagactcttacatgttggttccaagttgctcaactctcagggctcagcctacaaaagactcggcatttcgaccagctcagtccagaggactccagagaatgactgctgagaccaccccactttccaacccccactacagacacacaaaaagaacagaaaaaaaagtctatctcacataccccttgagtgggttttgttgtaggtctctctgctcccctccacccctgtgcttcatcctgccctctctcatacctgccatctatcctcagcacacacggcgcctttgccacaagtaacacctttgcatccagcactctccgtgtctatatccgcctccacctcctcagctcccgaggggctgggttacagaagatggagtgaaaggggggaatgcagaggggatggacatggagagtcttggaaaaggaaactctaacagctgatgggttgtagggtaaagagaacatgggaggcagggataacaggtcaaataagaccataacaaattatcaaacggcgagtgaattttcttcctgcatgcaaagaagaaatgagggggagggcaccagttaagagtctgagacttgggggaagaaaatggccaatggctgagaactgagtacagacaggaacttcagaagctgttgcaggtattgtatcttgggcacttctggacagcacctgagagagaaagactaagaaatccctgaagaaattgagcccaggaggcagaggttgcagtgagcccagatcgcaccactgcactccagcctgcgccacagagtgagaccctgtctcaaaaaaaaaaaaaaaaaaaaatattcctcgaagaaaattaggcctttgtcagtagaaaagggctgacacccactacaggaataggatgggaaaagctgcaggaaggaagctgtggtttttaaccccagctttgcattataaagaattacctggggagctttaaaactatatgctaataatcaggacactctaggccaatgagaccaatctttgaaggtaaggcccaagtgactgatttctcaaatgtgaagccagggtaagaaacactgaaatacaagaaaagctgaaaacccagttggaatatttaaggctggtgctgttaacaagtgggaaaggaaagttga

SEQ ID NO: 14107 - DNA, 2300 bp, Homo sapien
taaatctctctgaggtttaattctcttcatccttaaaacgagggtggagagctgttctaaaatttagtactttacccatgatgctcaataaatggtcgctattattgacatagtgagttctcaatatttgttgattcatgggtcaaaaactgtccttcaggttaaagggttacttggccaggaatgggctggcagaagtgagacattccagctccctctgagggtccaggaggattgcccaggtctctgggactatgcgatggggtagatcagggctgggtttaaatgtccaattttgctaagtactaatgtaagaacatacctgacttgaacctggaggagtaggtagggatagctgagggacaaagtggaggatcttaaagtgaaccagagtatgagaccagccttgcctgaatatctagtgataatccgggcagtttcggtatcatttaccactttaatttgtgttgaaaaagccttagcttggtagctccagccttccttctgtgcctccatccccatcatccaaaacccaaaagcatgctgtttgtgaaggagagtaaccatatcctgagatgactccaatgtgagatgtttgtgaactgaaagtcatagtgaccgccgatctggagtgtcaccctttctctgagttatcactctttctgcaaagctgtccctaattccctaaattactttctctgtggcattcctcagattgagcacttacttacctggtattgtgatgacctgtgtctctccccttgaccggattgtgacatccaaggcaggaaccttgcctggttgattatggcgtattcttggactctagcacatgcctggagcatacagtaagtagctattcaataattatttgttggccgggtgcggtggctcatgcctgtaatcccagtacttttggaggccgaggcaggtggatcacctgaagtcaggagttcaagaccagcttgggcaacatggtgaaacctcgtctctactaaaaatacaaaaattagccgggcatggtggtacatgtctgtaatcccagctactcaggaggctgaggcaggagaatcgcttgaacccgggaggtggaggttgcagtgagctgagattgtgccactgcactccagcctgggccacagagagagactccatctcaaaaataagtaaataaataaaataattatttgttgaataactgaatggatgtaatctgaggtgacagagtgacccactgtgatctgagataatgtgacctctcttgattgcaatctgggttgactgtgaacagagtcggggcttttgatgattgtgttgaagtgtctgtgattgtaacctacaaggactgtgatctgaggggtctgcgcaccggtgactgtggccttcaggcactaatctgtcataaggaccagtagggataatgaatggaggtgactgaactagtaaccttgcatgatcgattgaagtaacttgcactgattgtgatctgaagtgaccgtgaacaagttagtgacgacgctttccacgactgtcttgttgtgactgtgctcatgatctacagagttctggcttcagatgacctaagccagtgcttggagcagccttgacgattgacatgagatgtgtgcgagatgctgagattgttgatctaccctgacagctgaggttattgatctgcattatgagctgagataacagatctgtgggcctggactcagactaggaatggtgctaatatgtgtgtagttctcttaagatttctgattttgttttaatatcctcccaaatggcacagccctgttcggccccacgccaacaaggaatagggatgaggaccaggttgagtcaatcctcacagaaaactaccggaaacacaacgcatcttctgggccgcgctgccgcagctgcgggcagacccaccgccttggtcatggcctcctgcacagcctgcccttcgttcggaccccctagccctacccccacgatcggtccgtggtgcgcctgcgcggaggcggggcggtgctttgccctttgttgtgggccccagtttcccaggacaccgcgcggcgctggggtggggctatgcagatgaggcactcgggggcggggcggcggcggcggcggcggcggtggcggccggggagggtcagttggaggcaggcgctcgctgaggcaaaaggaggcgctcggcccgcggcctgacagggacttagcccgcagagatcgaccccgcgcgcgtgaccccacacccacccactcatccatctatccactccctgcgccgcctcctcccaccctga

SEQ ID NO: 14108 - DNA, 2300 bp, Homo sapien
ttgtggagtgtgtggatctaggttcacatccactgtctggctgtgtgctgcttgctgtcttcccctgtgtccttattcagagccttataagtcctgggtctgcaggccatgtcgccacattccatccacctcacgtcaagtggccatactcagagggccttctttcctatgggaggcgtaagagcaacctgctggtgccaagcctaagcgcggggcccaggcaggacccaatcccccaaaacactcccacccccaccccctacccactacggcgaccaagaccacaccaagggtatgactgccctgacgtttctgttcggcagccctaacgttggctctgcagagacccccctcaagttcccaggcccaggtcggtctagggcccagagctggctggcccctgacttccatcttgtccccttctcttctctgttcacaccacttctttgccaccttgtgtgcagaaggagtcactgaagctctgagcagatggaggatggtggctgagtcttatctgagactcagtcgcattctactgccctttaaaacgcctggtgtcatagagtgtcagtgtgtgacgggacctgaggcgagtctactctactgtagctgaggctgacaagcgaaggccacaaagccacctgctatggctggtgacagggctggggcttcaccctgggcttcctgacgttgttttgaggttctttgtcttttgtttggaatctcgtcagtgggtatcttctgagctggaccctgagtgcagtgtcctggttctcagtggggtctctttcccttggggaagccagatcagatctgggtgcgatgatgatggcagcaaattctgaaaacgtgctcagtgtctttataacaggaaagccgtaaacttagaaatgtaggctgcagctcgtgtgctctgtggtctgggctggtagggatggctgggcctgctccagcacccatccccaacctccccatagctagtggggcacaaggccactcacactcagctgtggggagttgacagtctgtcagtcagtctcgtcgttggcctgtaaccatgtaggattcaccgtggcatcatccagtgggaccaccccccacccccctgccatcgccaccatcaccatcatacctaccccaaccttttgcaagatactgtgtctgtcctctttgttcatgagctgaagaccaggccaggcgtgagtcactttgggattgcaggaggatggcttgagtccaggaattcgagatgagcttgggcaacatggtgagaccccacctctacacaaaattaaaaaattagccgggagttgggcacagtggctcatgcttgtaatcccagcactttgggatgctgaggcggatggatcacttgaggtcaggagtttttgagaccagcctggccaacatggtggaaccccatctctactaaaaatacaaaaattgtcgggcatggtggtgggtgcctataatcccagctatttgggaggctgaggcaggagaatcacttgaacccaggaggcggaggtggaggttgcagtgagccaagatcatgccattgcattgcagcctgggcgacagagtgagactccgtctcaaaaaaaaaaaaaaaaaaaaaaaagctgggctttgtggtgtgcacctgtggtcccagttactcaggagatggaggcaagaggatcgcttgagtccaggaggctgcagtgagccatgtttgcgccactgcactccagcctgagcaacagagcaagaccctgtctcaaaaaagccgaaggccagttgttcctgggtaccttgggctggccccactgggtctgagtgggttggtgtgagatcaaggtctgcaaaagagcattgactcgtgagctgggcacttgggaacaggctgtttctgacatgctcggtaactgcgagcaactcgctcgacccctaggccctggtttcctcctctaaaaataaggtttcttccagctcagatgttctgtatttgggttgctactgagggctgggagttggggaaggatgtgggaggggcttataagaggctcgtttttccctttttggatttctctcctcttctcacccccttcccaaagtagtgttttccatcgggatgacaccgggagagctcgctcgaagcagtgggtaggggactgctgaagcacgtgcattcgttacttgaacattgtgagtggacagttgaaacaattcttcctttccagattgaattctaacttttagagatgctaaagggttgctgcaaaagtctttttttttttttttttaaggatatttctatt

SEQ ID NO: 14109 - DNA, 2300 bp, Homo sapien
tttgggccttagctctcccatctatggagaaaacagagaccagaatggagaagaagggtgaccagaattacaagatgagaggctcttctttgaaaaattcaaattaaccatataatggctgagttcagaaatctggccaggctccttctcctggaaaaagcatgggaaaggcaggatcttgagggaagggaagattttggattgattagggggagcgggggaggaagaggaagaggaagagtattcctgggccaaagttagagacaaacctgataggaagacctattctaggggaggggatggtgatcaagcccacagccagattggactgaggcctgtggaggatggtaggggtatctgagggttcccaaggttggttctatctggagatgcctgaggctggaggcatcttaaaaactctgggtaaaggtctggctcctacaggcagcagctccctcttcatagggcctgagccaagtgttggcaacagggctgatgggaaaccagggtgctcttggccttgccaccagcagaaaatggtccccagcccacagtaggtgctcaataattatttactaaaggaatgagtatatcattggaaagacattgcccatctctaggcctcaatttatctgtgagatggcaggtcaggatggagattataatttactgggaagactaagccacagcacagtgatcctgtggtgctagtcctacctaattcaggaggtcgacacacagaggttctgggggctcaggcacttgtccacggtctgggatcctaaccagtccgtgactgcaaatccagcttttcttttttcttttctttttttgagacggagtttcgctcttgttgccctggctggagtgcaatggcaagatctcgggtcaccgcaacctccgccccgtccaggagaaggggcactgaggagggacccagttctcccgcggctctgccggattcaggctgcagcgcttccagcgctccccgaggtgggtgcgggtttctactgtggcagcagggcgggcccccatcggctgggttttcaaatagaagagaaaaccgacccagaggccgcgccctactgacctgcgcgggggtgcggggggagtcacgacgacctcccccacctcccccagcctctaggctattacatccgtccccagccttcgggctcagaataggaggcagggaaaggtgtgaggggcactgaggtcgggggaggagcgagaagacccgaaagccaggcgtgttgagggcaaggtgggcaacagaaccttcttggtcattcgaggcagccctcgctaatgaccattggggtcccaacactcgaatccccacctaagtcctattcagatagtgactgggagtgggaagggagtttgagatcctaagtcccaccctctgggctgggagcctgaggccagagaggggaagtgatttcctcaaggtcactcagcaaaacagcgcccagcccgggccaaagctcaggtgtctcccaaccccctccccccggccatcacccccagaactcggtcccccggagctgaggtctgcgcgactggatttaggggcagaatgagtgcgtcgggaaccccaaaaccctagatcaagatacaaggggagtcgacggcccggaaacctcgctgcgggtgccctaagcgcgaggccgcccgggcagggccgcccagggaccggggcgctgggtgcggggcacggggctccacctcccgcgggctggggcgcgcagcgcgcggcccctttaagaaagttcgccgggcgagttcatcaaagtttaaaaactcgccgtggagaagggcgcgggggaagaggagagagggagagcgctgacccaggcgagagagaggggaaaggcccggccggaggccggcgccccgcggccggggccggggcgagcccacggtgggcggtggggattggctgcgcgttcccccggagaccgcgcggcgggcgggggagggggctggccgggccccagctgaggccggttccggccccgccccccgccgccggcgcccgccccctcccccggcgcccgccccccgccgccgctgccgccgccgccgccgccgcggcgcactcgccggtcgcagtgaaaaggcggaggcggcggcccctccggctcccactgcctcccccgccgcaccccctccccaccttccgcacccgccaaacttgatgtgaccctggcccgacgcggaggctgcccctctcactgccccgtgggtcccccgccacccgctccgcacccgcgagcgcaccgctccccgcgcccctt

SEQ ID NO: 14110 - DNA, 2300 bp, Homo sapien
gaattgtgcctgtggttgttatagtgtaatccctgagatggagtaaatcaaaacaggaaatgggacctggctacattaaaagagaaagcagaggccgggcatggtggctcacgcctgtaatcccagcactttgggaggctaaagtggatcacctgaggttaggagttctgaggccagcctggccaacatggtgaaacctcgtatctactaaaaatacaaaaattagccaggcgcggtggcgggcgcctgtaatcccagctacttgggaggctgaggcaggagaatagcttgaacccgggaggcagaggttgcagtgagcctagatcgcgccactgcactccagcctgggtgacagagcgagactcttcctcaaaaaaaaaaaagagagagcgagagagaaagaagagaaggaggcttgcaaaggactacagaaagaatgctgggagagggtaataggcccagagtagaggagcttatggagagaatgaagtggtcattcgtgtcctgggcagccaacagttgaagcagatgaggggaaaaaagtctggtgggtttgacaattttcatgggctggggcaggtgaatcatagcccaccagggtttgacactaagctggcgagaggacagagacaggataagaaggggccctggctagacagggttttgcttgggtattttgaggtgagaaacaggtttgtgataggaagagaaacttaggtgacaggaaggaaactttagtgacaggatgagaagggttagggaacccaggggaaggagctaagggagggtgtagaccacactggtgtggtctgcccaggactggacaatgggggtcttcagggcacaaggagagatcgggaccccaatagttgctggcaagctctccaggcaaacccaagagctccatggaatgaaggcagtagaggacaaagggttaccaggcccagcattgcacatgggccaagaagggtgggggcaatgcctagcgggtgggaggatgctctgagatagctctgttccccccaggaagccccaaggtggcccctgcctgtgaagaggctgagcttgccctccaccaagccacagctttctgaggaacaggctgctgtgctgagggccgtcctgaaaggccagagcatcttcttcactgggagtgcaggtagtgggggcagagaggaggtagggggacagtggtggggtgggatagaggaacagggagacctgtctaactttgcccctgtccaggaacagggaagtcatatctgctaaagcgaatcctgggctcactgccccccacaggcactgtggccactgccagcactggggtggcagcctgccacatcgggggcaccaccctccatgcctttgcaggtaagtaggaacccctagggcttgagctaagagcaagcccagcttctgggaagggagagaggggaggtctgcataaagagggagttttgggggctgggcgccgtggctcactcttgtaatcccaaaactttaggaggccaaggtgggaggatcgcttgagcccaggagtttgagaccagcctggccaacacagtaaaccctgtctccacaaaatttaaaaattagcggccgggcgcagtggctcacgcctgtaatcccagcactttgggaggccgaggcaggcggatcacaaggtcaggagatcaagactatcctggctaacacggtaaaaccctgtctctactaaaaatacaaaaaaattagccaggcatggtggcaagcgcctgtagtcccagctactctggaggctgaggcaggagaatggcgtgaacccaggaggcagagcttgcagtgagccgagatcacgccactgcacttgagcctgggcgacacagcgagactccatctcaaaacaaaacaaaacaaaattagctgagcatggtggtgtgtgcctgtagtcccagctactatggaggttgaggtgggaggatcgcttgagcccatgaggcccaggttacagtgagccaagatcgtgccactgcacttcagcctgggtgacagaaagagaccttctctcaaaaaaaaaaaaaaaaaaaaaaaagagaggctttgggtattagcccaggctgaatagtgtcactcacaggcatcggctcaggccaggctcctctagcccagtgtgtggccctggcccaaaggccaggcgtgcggcagggctggctgaactgccagcggttggtcattgacgagatctcaatggtggaggcagacctgtttgacaaactggaggccgtggccaggtcagtatgttcagagggcagcaggtgaga

SEQ ID NO: 14111 - DNA, 2300 bp, Homo sapien
caacaaatcataggagtgtgggtccagtcttcgtttgcaactttgtaacttcactccagcctctgaatggtggctgaatggttgctgtctgcaaccaatcagactgattatcgctaccacttcagttacatgaagtaagcgtaaagttcccaatgggaaacttctagggggtatttgaacccaagaaaattctgtatctcgggtcccctcccacactgtggagtgtactttcgtttttgttttttgttgttgttgtttgttttgagacaagttctcgttctgtcgctcaggctggagtgcagcggcacgatccaggctcactgtatcttctgcctcctggattcaagtgattctcatgcctcagcctcccaagcagctgggattacagatgtccacgacgacacccggcaatttttgtatttttagtagagacagggtttcaccatgttggtcagggtggtctggaactgctgacctcaagtgatccccccacctcggcctcccaaagtgctgggattacaggcgtgagccaccgcgcctagccgtactttcgttttcaaaaaattcctgcttttgttcttttgttgcttcattctttctttgctttgatgggcattttgtccaattctttgttcaaaacgccaagaacctggacaactttcagtcatcaccctctaccgctaacagactgggagcagtgtggtgtagtagctaagccccatggagtgattaagcgagcaggtaatctgggttcaatgtttggttttgctctccatatcagctatgtgaccttcagtaaaatctctggaagccttgcttttttctcatttgaaaaataaggtccgggctcatgcctgtaatcctaggacttcgggaggccacggtgggtggatcgtttgacctccggagttcgagacaagcctgggaaacatggtgacatcccgtctatacgaaaaaaaaattatatatatatatgtgtgtgtatatatatatatgtgtgtgtatatatatatgtgtgtgtatatatatgtgtgtgtatatatgtgtgtgtgtgtgtatatatatatatatatatatatatatatatatatatatataaattagctgggtgtgcatctgtagttccagctacctggggggctgaggcgggaggatcaccagagcccaggaggcggaggttgcagtgagccacgatcgcgccacggcagaggttgcagtgagcagagattgtgccactgcactccactacagcctgggcgacagagtgagccctaagaaggaaaaaggaaaggaaagggcaatttaatccatggtagttatcattatctgtaaaatgaggtagccagactcacctgtaagatcctttccagctatgtaattccaagcttcaatgagataataaagatgattaaaagtaaattctttcagcatcctgtgcaagaagagggatacaatttccctgaagacagagactctactcgcttccgctgtaccctctggcacgtggcacaggtctcagagtttctcactcatgggcctcaggtgggtgagagagccaaagcgtaaagtcccttacaaaggcagagaaggatgtagagttgggggcgggggagggattgggcaggccttggggtggtctgcccagaactggacaatggtactgtgagtgtaaacaggggtgtgagagtccaaaggcagatcttccccaaggctaagcccagcctctgtgtgcgggctagaggggagagggagtgtgctggaaggatggttctgaaaataaatcttcggagtcgcgtagggttttcagacccgacaccacgcgccgccgggtggctgccgcagcggcggcctcctcccaccacgcccagccgtccactggatttggtatgctcagccaccaccataaacctccttcctctagcaggcaattggtacagcccaagctcctggagtagagacgcaaagaaagacacgcccattgttacgcccctacctctgagtggctggagaatttaaagatccagtcggtgattgggtgattttctgcctctagcatttgaaaaatttctagtttcggagcttagccacaggccggctacgatctgcttgttcatctgagtgtcggcacaagtgagtgtctgcccgaacccagaggtggggagcaaagagcctgatttatctaggggtttccggcgggagggtgcaaacaaatgggtcagcctgagggagcacggcttctagggtcccagggtcccccgcgatttccctagccgaatattttccacctcgtccccaccttg

SEQ ID NO: 14112 - DNA, 2300 bp, Homo sapien
ttccccaaaatgacagaactatttggatgtcaaaccaacctgtcctcactgctctctccctacaaagggctgcttctgtgtaacaaaatgaatttccccagggtctctggtctgctgcaggtggagcatgagtttccagatacaagatcttctgagtccttgatcattggagtagaatgctgcacagctctgcagattgagggagtaaaaccatgtggtggccgaaagaggttgctacatatacagactatctcagatcctcagcctcaattttccttcatctttccttccttcctttctttctctctttttctttcctttctttctttctctttctttctcttttccctccttgcgtccctccctccctcccttctctctctctccctttttttttttgacagagtttcactcctgttgcccagactggagtgcaatggcgtgatctcagctcactgcaacctccgcctttcgggctcaagcgattctcctgcctcagccgctcaagtagctgggattacagggatgcaccacctcgcctggctaattttctatttttagtagagacggggtttctccacgttggtcaggttggtctgaactcccgacctcaggtgatcagcctgcctcagcctcccaaagtgctgggattacaggtgtgagccaccgctcccagctctttcttttctttccttccttccctccgtccttccttcctctctccttccttgtttcttttctttctttccttccttcatttctctttcttttctttttctttctttccttttttccttccttccctccctccttcctctctctctccttcctctctctttcttttctattctttctttttcttgaccagtgtgataatatcagcctcaattttcttcattcctttagctaaaggatcccaggcctaggcatgagggagaagtgtacctgcatctccttcccccttggcctgggagccccaggctgcccttttccgtacagggctggaagtagcctgggagcctgagggctggcagaaggccgtgaaaggggagcttggtcgctggcacagccgctgctatggcagccagagccgaagaaggtcaccattgatctcacatgcacttaattttcccttccttggcatgggacggggttgaccaggagagctaagggggagtatgcgtgtgtgtgtgagaggggagcggtgctgcaggctgcgatgcagccagttactttctctctctgggcctcagtttctccaatgtaaaatgagggcgcatggtataactaaaatcattactctctgctggtccccacactcccactctccagtaaggctgtcagggctgcaagctcaccgcgggatcggggggatggtcgaccctcagatacgggagggattgagcgatgcccaaggagagcaggagaacactgcgcttggagacccctgagagccaggggcgggccgccccctaaagggaccccggagtcccgactctcagctccagctcttcctgtgacaccaccctccggacagagacccaagctccaggcccggccccgcccagaggttccagggagaagaccaggccaccgcccactgcccggcgtcggggaggaaagaggaggagcctctgtgtgcccacatctctggccgcccagggcagctcggctcggtctcgcaaccccagcccactggttcgggagacctcaaaggctccaccgccagcgcccccagcgctcactgtgtgcgccccaccccagccctgcctgcgcgccgctcccgccaccctcgcctcagtctctgggccggaagccccctctcctcccccgccgcagccccctcctagtccctctccctccgccgatgcgggaaaccttctccgccccgtcccgccctcttcctccagttgcatctccgcccggctcctccgtccagtctccaacccaggccccgcccctccccacccatttcccgccctgggccgggcccccggccccaccgccccctccccggccccgccccggcccccggaagcctcaccccgcccccggccccgcccccccgaagtttcttgggcccccggcagccggcgggacagaacgcggagagtcgccgcctggccgggcgtagacgcggtggcagagcccgcgcggcgctggaagcgagtggcggagcggcgggacctcggcggactcgccatggaggaggaggtgagggcggggcccggcggggcgttgggctggggtcctcgagcccctcacggggattgcggtcctgggctcaggccctcgttcct

SEQ ID NO: 14113 - DNA, 2300 bp, Homo sapien
tcagcaggctcagcagctgggaagaaaagctggatgtggagtgaaggagagtgacagcaggctggaagccagtggtgccctcttcatccatcaccacagctgactatgacaaccttcagagacttaactttgaaacatgtaaatactttacataattgtaaagcaaaattaacatttaaaaatatcaaaaaacaaaagcaaaacaaaataaataaaccatgcatgttgagttggtggcataaccacataaagaactattccaagtgactaaaacagtaacgtgacactatgcccctagtgggatgtacatgtgacaaaagctttacaaaaaacatttaaactgttttcaggaataatatctttggctaggcgtggtggccaagcactttgggagacctaggtgggtagatcacctgaggtcaggagttcgaggccagcctggccaacatggtgaaacccccgtctctactaaaaatacaaaaatcagccgcgtgtggtggcacacacctgtagtcccagctacttgggaggtttaggcatgagaatcgcttgaacctgggaggcagaggttgcagtgagctgagattacgctactgcactccagcttgggcaacacagtgagactctgtcttaaaaaaaaaacaaaaacaaaaaggggggggtgcggcgcagtggctcacacctgtaatcccaacactttgggaggccaaggtaggtggatcacctgaggtcaggagttcaacaccagcctgaccaacatagtgaaaccccatctctactaaaaatacaaaattatccaggtgtgggggcgagtgcctgtaatcctagctacatgggaggctgaggcaggagaactgcttgaacccaggaggcagaggttgcagtgagccgagatcataccactgtactccagcctgggcgaaagagtgagactctgtctcagaaaaaaaaaaatcatatctttgattattatgttggaattgttattttgagaccattttgaggggttggctcagggctcattaattgttagctgttatcattatgttatttttcaaaggccattccaaatacctccttcttcaggaagccttcttgaactatattctaaggactaatgactgaaagatgctcttcctcctttgatccccaaagtagtagtaactacacctatcatggctttgctggcttcttgccttgggatagagatgcctgagaccccattatccctaaattcaaagaagctgtaaatgcctttaaggcaaaaaggacatggacatcccccaagggtctgaagtgcaacccattctggtgtatttaatgtgtatctttttgtttctatgtgtctttgcaagtctgtgttgtttgatgtaaatgcatttgtaatatttttattgatattgtttcctaggtcttatttggtttggttatttactttttctgcctagcactaggtgtttaaatccatattgccacgaatacagcgggtcccttgctttgagtgctgcacagtttatccatctgctcttacaagaaagggcgcttagattgtctccaactcccagcaaccacagcaacacagcaaccaacatcctcctacatgtccctttatgggcctgataaatctttctgaacactgataaatccgaccatctcttcatatgcttgcagacctgctgaggttgtggtcccttaaacgccagctcacatctttggggtttgactttctgcgcctgaggcggcgggcccaaggctcagccctcctccccgagtcccgagaggcgcgaggaggatgagcctgccagatgccttgtgcgcatctatctccagggccggggaggctgggcgaactcccggggaggagactgggtcagggacacctgcggaactcggcgtggccccgacccgccggcctcgggcgcggaggggtgggcaggttaagagagcaggaggagggacctgcgtcctggtccgggactggggtggccggggcagctgcgctcctagcaggcggggcgtggagtctggaggagcgaccgccccgtcctctcggctccccgggccccgccccggcggacgcgcgcctcgcgcccgggcaccagcgcgcgcaggggctgcggagcggcaggatgcaggaggagctggcgtgggagaccgacggccgtgagtctgcctggaggagggaggggggcgggccgaggccgagaggacccccgcatccgtttggggagtgccaggggtgaggttggcgccctccgaacggccacctccgtgtggggcgtctgtgtggctccgagcgg

SEQ ID NO: 14114 - DNA, 2300 bp, Homo sapien
actcgtcacctgtccctggatacacaaaggggctgggttcagacattcatactggaccaaacatgcaggctatggggtcacttgccctgcagtgactatggaaagggccagcaaatatttgtctctgtgctagtatgtgtgagcactttgggagaggggacaggcatctattcgtctggggattgttggtgtcactcatacaagcagagatttttttgtttctgttttctttttttttttttgagatggagtctcgctctgtcactaggctggagtgcactggcatgatctcggctcactgcaacctccagctcccaggttgaagcaattctcctgcctcagccttccgagtagctgggactacaggtgtgtgccaccatgcccaattaatttttgtatctttagtagagacggggtttcaccatgttggcgaggatggtcttgatctcctgacctcgtgatccatccacctcggcctcccaaagagctgggattacaggtgtgagccactgcacccagcctgtttttgttttctttttagagacagggtctcactctgttgcccaggctggagtgcagaggtgcaattatagctcattggcagcctcaaactcctgggctcaagcaagcctcttgccttagcttcttgagtagccgggactacaggcatgtgccaccacacctggctaatttttaaaaaaacttttttgtagagatggaggttttgctttttagcccaggctggtcttgaactcctggcttcaagccatcctcctgccttggcctcccaaagtgctgggattgcacgcatgagccaccatgcctggctcaaaagcagagttttgtgggttcctcctgtgcccacctttgggcctgctgtgagctgtgggtggatcaggaagggtcaagtgtggccagggcctccaaaatacttgaagtctagccatggagactagacatcctcacaatcaagagccgtcaggatgatggcagcatggggctccggtggggatcatctggacctgtgtcctcctggctcagagactaatgcagtctgaccctgagcccacaggtgtgcgtgacaggggttggcagggggagctctgaggttccctttaatctgagactctgtgctaaaggtgcagcgatgggggtgagaggagcacagagaagagagaccacagagaaggaaaatcagggtagcctcagcgtgggcaggtggaagctggttaggatttgggcaagagtgattggaagaggctgggcgctgtggctcacgcccgtaatcccagcactttgggaggccgaggcaggcagatcacttgaggtcaggagttggggaccagcctggccaacctggtgaaaccctgtctctaccaaatatacaaaaattaaccaggtgtggtgacacacacttgtaatcccagctaccgaggaggctgaggtgggagaatcgcttgaacctgggaggcagaggttgcagtgagacaagatcacgccactgcactccagcctgggcaacagaggggttggaagaaggggtggaggaacaaggagacggaatgtgcaggagtggggtaaacatgcctctggcctcacccggcgctggcacgcagtaggtggctcagtaaatcctggctgtgtagactgagccgtggaaaagatggttactgactccagagggagttaatttcatttccttccccaagagcagctcttgggagggtacatgaaacttggataatggggcacacatttaggctgctgaaaatggcttcgccctgctcttccatcttcagggtttcaccacgtcctggttgcgtggctgtggggtgagttaatgaggaagagcagcctgtctggggaggaccctgaccttgagagggaggagggctgtgccgctctgcccctgttcctagctgaaagacccctgctccagaaatgttcaggagtggaaatgggttgtttacctctcctgtctgcagtgtggggcatcctccccctcatcctgcaccccattttctccccacagtgcttcctctggagaggcagctccacgaggccgcccgccagaacaatgtcggcaggatgcaggagctgattgggaggagggttaacaccagggccagaaaccacgtgcgtaatgagcttctctgaatccaggcacctgggatagtgtcacgataatgccagtacacagggggaatagtttatctgagctagaggcaggcacatttgcatgtgtaaacttggagggaggctcgggctctgtcctcatggcctgcattgtctcgaggaat

SEQ ID NO: 14115 - DNA, 2300 bp, Homo sapien
tcctctccttgccttggccccagcctctgcttccctcctctctccagtgctgtccttgtctgcaccacccgcctcctgcctccaaattcccgcctgtttctaaagcaaagcagtgcaactctctttggatgctcgggagcctgctgatcagtgagttccctctgagtttcaccttttgcctcaaccctttgtcaaggcttttacccaaacacagttccctccctaagaggaattctggtgccaaccgctaagaccccttttcttggtacccctcacaaaggctcctggtggagccaacacacccaaggaggcactgcaaaaaaccattcccaggatctggctggctcttgatgtatccccggagctgagtttggaggcctggggttgctcttcacagagaagaaaagactccggggaggtgggggaagtgcagaaccctactgcagtggaggtcagtgaagggactctggggaccctggagcacggtgcagatgtggaggaagagcaccctgcaaacaggtgtggggctgccctgagtggaggcatagacatattttcagttgctccagagagttggtgggatggaaattgcaggagtacagatttcaatagagctcgaggaggcatttctaacagaagccagtgtttgactgcgcagggatgtctcgtgaggtgatgtggtgctgcagacttaagctatctgccttgaagatattctatgggatatttatttatttatttttgagagaggctctcactccattgcccaggctggagtgcagtggtgcaattttggctcaccataagctttgcctcctgtgttcaaatgatcctctcatctcagtctctcaagtagctgggactacaggcacgtaccaccatgcccagccaattaatttttttatagagacaggtctcattatattgcccaggctggtcttgaactcctgggctcaagcgatcctcccaccttggtccctcccaaagtgttgagattacaggcatgagccaccattcccagcctctatgggagatttaaacagtccattcttaaacaccagtccaggataaggtcttcaccagtcatagcaaatcagaaaacagggacaacgtatttttcatgaagctacatttgtttttttgtctttgtttgtttgtttttgagacagggtttcgctctgtcaccaaggctggagtgcagtggtgcgatcacagctcactgtagcctctacctcctgggctcaagtgatcctcccacctcagcctcctgagtagctgggaccacaggagtgtgcctccacgcctggcttatttttacgaaaatgtctgtagagatgggggtccccctattttgcccagtctggtttcaaactcctgggctcaagtgattcacatctcagagtgttgggattacaggtgtgaaccaccacacccagttatgaagctttatttgtcaagtatatattctaagattggttccttacaaattttttcttttaaaatggtctttctttatgaaatggtgatgagagtaaatggcagctggtttttttgtttgtttgttttgagacgaagtctcactctgtcactcaggctggagtgcagtggcatgatttcacctcactgcaacctccgtctcctgggttcaagcgattctcctgcctcaacctcccaagtagctgggattacaggtgcccaccaccacgctcggctaatttttctatttttagtagagacggggtttcaccatattggccaggctggtcttgaactcctgacctcatgtgatcctcctgcctcagcctcccaaagtgctgggattacaggcgtgagccaccaagcctggccggcagctgtcttatttttaagtttcatttagcaaaaataaattttaaaagtttgcaatagtacatcagcctctatttaaaaaaaaaaaaatcttggtctttaaactcctaaagcttggagctccctggattaagtggcacttatagttccttctggttgtatggtttagtcataaggcacagggcctggctggcacagccacgccttcccacattcttctcacctcctctatgtcctctcccctagtttgggatgaatgcgcttctcctgtctgcctggttcggccacttacgaatcctccagatcttggtaaactcaggggccaagatccactgtgagagcaaggtaaggcctcagctggtagacccctgtcccctcggctcccctggcctggatgcacaggtctcccccgacctctgtcccccacccctgcttgcccctccagcccccaa

SEQ ID NO: 14116 - DNA, 2300 bp, Homo sapien
tgggaagtcctagagcatggtaccagcatcttgtaagggccttcctgctgtgttgtgacatgatgggaggcatcacacggtaagacagagcaactgtgctagctctgtgtaactatacaattacatgtctacaaataattttttgttcaaatcttcttttctaatattgataacactccatacccactggcctaaactaataatgtcaataatgggcatttttgttgtatgtgtgtgtatattctgttctgtaacccttttatagctcaatacatgaggatgttttctactataagtattagtttctagtatcaattttattggccttgtactattccacaggatgtgtgtcactatatcacctagagaggggggagtatcccctctttgtcatttactcagggggccacaggagactattggggatggtgtcttccactgttgaaggagagttggacttggagtgaggtatcttttctggtcccagctggctctttcattcattcatttttctacacaaatagttatcaggtactaggtacctaggtactgggggtggggacgtggtgggagtagaaagtccaataagacatcgttcctattagctaagtatccttgggtaagtcatttaagttttctgaacttcagtgtttctgtttgtaagatgaagatactaataagaacaccatccctatatacttcctaggttgatgtgtggattaaatgagatgtcagagaatcttaaggtattgttgctaggagggaccatggcaaacatcacttgccagatgaagagtagcagagaagggaaatgacttgcccgaggtcacatagtgagttcctgacatagcaggtctcacccttgggtcttcagaccctcacccatctagaggatcagtttggggctccaggaattcaagctttgggaccataattgcctaaggccacccatgtcatccaagaagctaaaagggccaaacccagaagcactatactcttccctcctcctgtccccagcaccagcctgcagctgggcagtcctgggagggactggtcgattgatccgtgtatctcctcccacagcagggtgcctctcctctgcacctcgctgtgaggcacaacttccctgccttggtccggctcctcatcaactccgacagtgacgtgaatgccgtggacaatgtaagtggctacagagaccttccgggccccagggagcttctggaaaccctcccaggctggcaggcttggctgtggtctcctagcatggcccagagttgaggaatcactttttttttttttttttagcttttagaaagtaatctaaatagttgctgaagggaatatcattttgttcatcattcccctcttttgacatttgggtgttcccaagttttggccacggtctataacattacagtgaacatctttttacattcaaccttttcctttcattgctttttttccttagggaacattcccagggcaggggtgactgaggcagtcttgtgtaacaagaggcctctgagtcctgaagctgtgatcagtaaagcccttttaaatcctgtccccacaatctacccaccaaccatataattctcagtaccagcaagggcatggctcacagagccactgggagctgaaagcaatttggcagaatatgtcatatacctttaaatgatatgtgtgagcactgctgggaactcagccttgagaaacatattaaaagctcatgcacagagatatttactgcagtattatttatcagtcttcaatttgaaaatggcctaaatatttaataatagggaagtggttaggtaaattatggcacagacaaaaataggctagtatggagttatcaaaaatggcgtttatcagagtttatagtacacaaaaagtgtcatgttggggtaaaaaaaataagatgtaaaatgtacatataagatgatctcatgtatgtaaaaccaacaaactgaaaacattctgcattaaagaaaagactagaagaaatatactaggatcattgtgggggctgacttagggtagtgggccacccctacatgcttttcacttacctattcccttggcttctcccctagaggcagcagacgccccttcacctggctgcagagcacgcctggcaggacatagcagatatgctcctcattgctggggttgacttaaacctgagagataaggtacctctgcttacaacccacctcgcttcaggctttcatggctccccctttgccagagaccctgctacgaatgccccctccctccctccttctcagggtgtt

SEQ ID NO: 14117 - DNA, 2300 bp, Homo sapien
atgaaattgaattatttaggtttaaagatgatagaattttggaaaactgaaaataatttttgtaatttcaaggtaaaataatctttactttcagaaaacacattgtaactgtgataagccatagcatttattcatgtgtataagataaaaacacagaaagtattctactcttattatttaaggtggaaaaaggaataattgtgaaattatgtttcaattttccagcctggccatcatggccaaaccccatctctactaaaaatacaaaaattagccagctgtgatggcatgcacctgtaatcccagctactcgggaggctgaggcacgagaatcatttgaacccgggaggcggaggttgccgtgagctgagatctcgccattgtactccagcctgggtgagagagcaagactgtctcaaaaaacaaaacaaaacaattttcacccttaaagtgtagctcagaaagatttagagtaagagcatacatttagctcgcaacatatatgttaggaaacaaaagaatgctgattaaatataacttagtggtaggtaaagttgtctattttttccctatcatatatcataacgtaatagatcacaaatatgttttagaatttttcttaagttttaagaatccaaagatggctgggctccgtggctcatgcctgtagtcccagcactttgggaggctgaggtggatgggtcaccttaggtcaggagttcaagaccagcctcaccaacatggtgaaacctgtctactaaaaatacaaaaattagccgggcatgatggtgtgtgcttgtaatcccagctactccggagactgaggcaggagaattgcttgaacccaagagacggaggttgcagtgagccaagatcacaccactgcattccagacagggcaacaagcgtgaaactctgtctctttttttgtttgttttgagacagagtcttgctctgtcgcccaggctggagtgcagtggcacaatctcggctcactgcaagctctgtctcccgggttcatgccattctcctacctcagcctcccaggtagctgcgactgactacaggtgcccgccaccatgcctggctaattttttgtatttttagtagagacagggtttcactgcgttagccaggatggtctcgatctcctgacctcgtgatctgcccgccttgccctcccaaagtgctgggattacaggcatgagccactgcgcccggccaagctaaactgtttcaaaaaaaaaaaaaaaaggaatccaaagaaaaaaatacatcacctgcaaaaggtgaagagagaaaggaagctttttctctaaaaatggtgcagctatcctctgaaccaatttccttcggtttaatgtacctgtatcttggggtttttttccacttaatttatcctggagctctttccataacaacacttggaaagcactctcatccttttttcactgctgaacagaattccactgtgtggatggaacatactctatttcaccagtcccctgtagccagtcacttggtttgtttccaatcttttgctttttcagagtaataaccttgtatgtctatcattttgtatgcatacaggtttatatgtaggaaaaattcctagagtaggattgctggaccaatggataaaagtatattgtggacagacaatgccaaattgcctttcagagactgtggccctgtgcaccccatcaggcatgtgtgactaccaaagctcctgtcagctgttttattttatctcctttccagtctcaggctcaatgcagaactttgaggtaagcttttctaaaatgtaggctcctaaacgccacagccagctctgccacatgaaggagagctcaaatgagacagaaacagcctctgggcaggatttctatcctgcacagatatattttccacattctgggaaaccgtgaagcttccagagccacaattccccagaaacacatccccctgctggtacagccaagccccagaacaagctgtgcttgcctggcacctcaaagccaagcaccatggatgccacttgccatgggtgcctgcaatttcaaataatgagaaataagaaatttcagcttctcagtccctctagccaacatttcaggtgcatgacagcctcaggtggcaagcagctactctgccggacagggcagaagatggaacaccccatccctggggaagatcacgaggtcaggagatcaagaccatcctggctaacacagtgaaaccccgtctctactgaaaatacaaaacattagctgggtgtggtggcaggcacctgtagtccc

SEQ ID NO: 14118 - DNA, 2300 bp, Homo sapien
ccaatgcccaatgtcatgtacccaccatcacagtgtcatacagaacctttcactgccctaacatcccctgcactccacctcctcatccctcccttcctctcactgcccttgcagctcctggaaatcactgatctttttactgtctttgtagttttgcctgttccagcatgtcatatcctttcagttttcagtaagtaacactctcacacatttcaaaagttaaaactgtatagaaaggaaccactgagaactctttctcccacccggtcccagccccactgttccccattatcctactaccccagggaaaccacctgattagtttcttagcctttgtctagcttttatttatgcaaatatgttttctaatttcctttctttcttacacaattaacagcatactattagtaatatactatatgcactgatctgtatcgtgtttttttaattataattattcttttaataaaatgcttcactgagagcagggaagccaccttactttcccaaaagttacacaatacatggtagtaccaaagaaatatctgctgagagaaatactattttgggaagtagttaataattttacaatatgcaatagaagcagacacatgaacagctacaatgtggatacaagttttgtcaaataatcaggagaaaaaagaataaaaattacaatggcaaatggctgtccaaattttccaagtccaactttatagtgctgtgaagaaaagcatgaatatgagactctcaataaacatttgtgcatccatgaaattgaattatttaggtttaaagatgatagaattttggaaaactgaaaataatttttgtaatttcaaggtaaaataatctttactttcagaaaacacattgtaactgtgataagccatagcatttattcatgtgtataagataaaaacacagaaagtattctactcttattatttaaggtggaaaaaggaataattgtgaaattatgtttcaattttccagcctggccatcatggccaaaccccatctctactaaaaatacaaaaattagccagctgtgatggcatgcacctgtaatcccagctactcgggaggctgaggcacgagaatcatttgaacccgggaggcggaggttgccgtgagctgagatctcgccattgtactccagcctgggtgagagagcaagactgtctcaaaaaacaaaacaaaacaattttcacccttaaagtgtagctcagaaagatttagagtaagagcatacatttagctcgcaacatatatgttaggaaacaaaagaatgctgattaaatataacttagtggtaggtaaagttgtctattttttccctatcatatatcataacgtaatagatcacaaatatgttttagaatttttcttaagttttaagaatccaaagatggctgggctccgtggctcatgcctgtagtcccagcactttgggaggctgaggtggatgggtcaccttaggtcaggagttcaagaccagcctcaccaacatggtgaaacctgtctactaaaaatacaaaaattagccgggcatgatggtgtgtgcttgtaatcccagctactccggagactgaggcaggagaattgcttgaacccaagagacggaggttgcagtgagccaagatcacaccactgcattccagacagggcaacaagcgtgaaactctgtctctttttttgtttgttttgagacagagtcttgctctgtcgcccaggctggagtgcagtggcacaatctcggctcactgcaagctctgtctcccgggttcatgccattctcctacctcagcctcccaggtagctgcgactgactacaggtgcccgccaccatgcctggctaattttttgtatttttagtagagacagggtttcactgcgttagccaggatggtctcgatctcctgacctcgtgatctgcccgccttgccctcccaaagtgctgggattacaggcatgagccactgcgcccggccaagctaaactgtttcaaaaaaaaaaaaaaaaggaatccaaagaaaaaaatacatcacctgcaaaaggtgaagagagaaaggaagctttttctctaaaaatggtgcagctatcctctgaaccaatttccttcggtttaatgtacctgtatcttggggtttttttccacttaatttatcctggagctctttccataacaacacttggaaagcactctcatccttttttcactgctgaacagaattccactgtgtggatggaacatactctatttcaccagtcccctgtagccagtcacttggtttgtt

SEQ ID NO: 14119 - DNA, 2300 bp, Homo sapien
atatactgacaaaatagccagtttccttggctttcttctttaaaatattgttggtatagctagatgagactctacatttagttctgatgtaaacatgaattcttgacgtgaaatatcacatgcttttatttcaggattaacctccatttcagctaatcatgggagagattaaagtctctcctgattataactggtttagaggtacagttccccttaaaaaggtatgtatggttttactatacctcttatttgcaaaatcttgtattgtttttgtgtgtgatttagatgtcatgtcttagtagtgtttgagagtaaaggttactgccgagtatcatgactgtgggttgcagaggattaagttcactccttccctgtcatgtacagtcaacttttgagactcattttagagtgaaagcaagtgtaactgtactcatttttatttatttatttatttatatttatttttgagatggagtctcgctctgccgtccaggctggagtgcagtgcactgcatgatctcggctcactgcaacctctgcttcccaggttcaagagattctcctgcctcaacctgccaagtagctaggattacaggcatgcgctaccacactcagctaatttttgtatttttagtagaggcagagtttcaccatgttggccaggctggtctcgaactcctgaccacaagtgatccgcccaccttggcctcccaaagtgctgggattacaggcgtgagccaccgcacccagcctgtactcattttttataattgcttttacatatacaagcaagcaggtatgtatgtactcttctgtatagtttagtggaaagtttacagcaactgtatagtgagtacagtcagattatattcctgttcctcagatttaagaatggggtcacattatagagcttctgtttgcaatgacatactcattctgccacagtcatcttctagaagctttattttcctgggatgtttgaaaacccaaaacacttatattgcagttgagtattgactctgcttcccaaattaatcccagatgtttggggatcacactagacaaaggcagttcaagtcactgagtagagtaaaacctttgctgattcccttgcaggagtgttagaatccagtgatcttaagatcttttgcagctgtttgtgatggctcatgcctgtaatcctagcactttagagacctaggaggatcatttgaggccaggagtttgagaccagcctgggcaacatagcgaaactctgtctctataaaaaaatgaaaaaattagccaggcatggtgctgtgcacctgtaatcccagcactttggaaggccgaggcaggaagattgcttgagcctaggaatttgagatcagcctgggcaatatgatgagaccctttctctacaaaaactagaaaaaattaactgggcgtgttggtgcacgcctgtagtcccggacactcaggaggctgagatgggaggattgcttaagcccaggaagacaagcttgcagtaagctgtgatcgtgccactgcactccagcctgggtgacagagccagaccttgtctcaaaaaaaaaaaaaaaaaaaagaaaagaaaagaaaaaatgtgagtggcaagatacacaggacaaaaacatgagcgtgagatacattatcaccatctgtgacctgtggaagtccaaagggaactgttaggcctctctggactttgccttgctccatttatctgctcctagtgatgccagtgaccctggttagtgtgctgccacccacagagtgacactgtggagtccatagccctgctagtgaggagctctcagaaaaaagagcctggaggccttgagttttttaatatgaaagtagaataaatactgatttgcattgtcaaatgtttaagcagttaatgtacttttctaaataccaccaaaagtgaaagcaaaaattaaactaggatgccgtgaataataataatagctaatatttctaggacacttaacatctgccagactctgctgagcacttgtcttacctcagcttgccttttttttttttaagagacaggatctctccctctgttgctcaggctggagtgttgttgtatttttatttatttatttatgtattttaaagagacaggatccaggccgggcgcagtggctcacgcctgtaatcccagcactttgggaggccaaggcgggtggatcatgagctcaggagttcgagaccagcctgaccaatatggtgaaaccccgtctctactaaaaatacaaaaaattagctgggcatgagggtgtgtgcctata

SEQ ID NO: 14120 - DNA, 2300 bp, Homo sapien
ctaacagaacaatgacttttaacatacgggtatatccatagattaggtctcattaaagctgttactaaatggggtctagggatggggtctaaggaatacagctttaggaacaaatgtggaaatggggatagatttatttattccactcattaattcattcaatatagttttttgttgggagcagacaaggtctctcgctttgtcacctaggatgtggtgcagtggattcgacatctgggcttaacagattctcccatctcagcctcctgagtagcggggattacaggcatgcgccaccacgcccggctaatttttgtatttttttgtacagacagggtctcccaggttgcccaggctagtctcgaactcctgggctcaatcaagcgatccgtccaccttggcctcccaaagtgctgggattacaatcaatatacatttagtacctattatttatgggctaatcatgtgctaatggactggtggaatcactctattccctttgctctagattgaagcttcgagaccacctgggaaaatagacaactaatgtaatgaatatccataaccagtttcagagacaaccagtagtttgcaagttattccacccattaaacgattccaaatgttggagaaaaggcccccaacttaaaatactccacggaaacgtgctctatacatctatgtggtgcttacaataaaagatgaattcctgcgactgagttgcaaccccgaaagaaatgatttagagaaaaaaagaaagaaagaaaaaggtaagtatgtcaccgtgcttttggaaaatgcttttgggatttgtccaagttctagagtggaacccaaggctcctgggccaggggacagaagtgataactaagtaggatgcaatttagttggaatcttccctgaccttaatcccataaacagttgcctaggtaaaggcaaagtctacaggccctaaaacagggtacaagctttccctaaaacatattagagagaggcactttcaacaggaccttgttgcaggatccctaaaaaaaaaattcaaaacaaggagatttacatgttattcaccttatcataatttcagaaatattttactaataaaaaaggagtcgtgaagtctggaacaccttaagacgtgacgtctgcaacaccttaagaacaatgattacaaatgtattaatattctctctgattttaagggaaaagtgatgaaggaacaggaagatgggtgggcgtatgttcccagaaatccccagaacgtcaaaaaggaagcggaggctttgagtggaggactacggagagcgtctacggttgtgccaaaggaaaaaaaatgttcctaagaaaagagtatacaaagttgtgttcatcaaagtctggaacccaaaggtgtccctccaaagctgtacacgacagagaaaacgcgaactgaaagaagaagcaggtcccaaggggccaggcgcctcctccacctcctcctcctcctaggtacgtagggcagaactaaggctgacccagacgtaactcagccctctcctcacgccagccgcagccaagcatcccacggagcctccccccgcgcccgtcgccgtggcgaccgccggggccacgcagcaccgccccttcctcgcgacgtggccccgccctctgagaacccggaagcgggagtctcgcgccagctgagcggcggtcgggcggggggagcgcggcggcccaagctcgctcggccacgcgccccgccccctcagaggccggcctcccgcacgcaccgcgcagcctgctgtgcccgtgggtcccgagtgctccgccgcccgccccgacccgggcccagccgcctccacggcccgcgctcgtactggagcgaagagcggcctcctgaaggaggggaagggacgtgggggcggccacggcaggtgagggtgggcgaagccctgggaagcggctgggtgtgcggtatgcggggttgtaggtgtgtgtgtgtggcgcgtggctgccttggttggtgtgactttgtgagtgtgttctgagtgggccggtccatgtgaccacgcacgtgatcacgtgcccttgtgagtgtgtgtctggggccgaatctgggctgtggggtggtcggtgtgcttgtgaccctgcctttgtgtggctgtcaccggtgggactggcggggagctgtgtgtgagtctccagcgggaggtgggggcggcacagggcttaaccggggcatcctcctgtaaacccatcctggggctacacgactgcagcccaggaacatttctttctttctttctttctttttttttttctca

SEQ ID NO: 14121 - DNA, 2300 bp, Homo sapien
ttactttgcttggtgttcacagcatattttgtgaacattccagtttttctgtgagattctcacagatgaattggtgctgtgggaaccatctggcagaccccagccacaacagctgcaaatccttacagccatgtctaccaggtcagcctgcactgggacctgcctgaatcaaaagtttgctgcctgaatttgtgcattacaattcagctggaattcacagatattaaatgttctttgttgggattaggaaagggacaatgtgcttgccatgtgttatggaacaactgaggacacaaacatgaccatggtttcccttcctgaaagaagtaaaacatttattatttttggattggtctacattgtaataaaagttgatatgtaacaaaacatatctacatagtgatttttttttattgtcaattgtcaaagtttactaccacactaacagaacaatgacttttaacatacgggtatatccatagattaggtctcattaaagctgttactaaatggggtctagggatggggtctaaggaatacagctttaggaacaaatgtggaaatggggatagatttatttattccactcattaattcattcaatatagttttttgttgggagcagacaaggtctctcgctttgtcacctaggatgtggtgcagtggattcgacatctgggcttaacagattctcccatctcagcctcctgagtagcggggattacaggcatgcgccaccacgcccggctaatttttgtatttttttgtacagacagggtctcccaggttgcccaggctagtctcgaactcctgggctcaatcaagcgatccgtccaccttggcctcccaaagtgctgggattacaatcaatatacatttagtacctattatttatgggctaatcatgtgctaatggactggtggaatcactctattccctttgctctagattgaagcttcgagaccacctgggaaaatagacaactaatgtaatgaatatccataaccagtttcagagacaaccagtagtttgcaagttattccacccattaaacgattccaaatgttggagaaaaggcccccaacttaaaatactccacggaaacgtgctctatacatctatgtggtgcttacaataaaagatgaattcctgcgactgagttgcaaccccgaaagaaatgatttagagaaaaaaagaaagaaagaaaaaggtaagtatgtcaccgtgcttttggaaaatgcttttgggatttgtccaagttctagagtggaacccaaggctcctgggccaggggacagaagtgataactaagtaggatgcaatttagttggaatcttccctgaccttaatcccataaacagttgcctaggtaaaggcaaagtctacaggccctaaaacagggtacaagctttccctaaaacatattagagagaggcactttcaacaggaccttgttgcaggatccctaaaaaaaaaattcaaaacaaggagatttacatgttattcaccttatcataatttcagaaatattttactaataaaaaaggagtcgtgaagtctggaacaccttaagacgtgacgtctgcaacaccttaagaacaatgattacaaatgtattaatattctctctgattttaagggaaaagtgatgaaggaacaggaagatgggtgggcgtatgttcccagaaatccccagaacgtcaaaaaggaagcggaggctttgagtggaggactacggagagcgtctacggttgtgccaaaggaaaaaaaatgttcctaagaaaagagtatacaaagttgtgttcatcaaagtctggaacccaaaggtgtccctccaaagctgtacacgacagagaaaacgcgaactgaaagaagaagcaggtcccaaggggccaggcgcctcctccacctcctcctcctcctaggtacgtagggcagaactaaggctgacccagacgtaactcagccctctcctcacgccagccgcagccaagcatcccacggagcctccccccgcgcccgtcgccgtggcgaccgccggggccacgcagcaccgccccttcctcgcgacgtggccccgccctctgagaacccggaagcgggagtctcgcgccagctgagcggcggtcgggcggggggagcgcggcggcccaagctcgctcggccacgcgccccgccccctcagaggccggcctcccgcacgcaccgcgcagcctgctgtgcccgtgggtcccgagtgctccgccgcccgccccgacccgggcccagccgcctccacggcccgcgctcgtactggagc

SEQ ID NO: 14122 - DNA, 2300 bp, Homo sapien
acattagacaaccttcctcagtaataccaaactacatgagaaatgggggtccctacagagtattaagggggcacatgggctaagcacggtggctcatgcctgtaatcccagcactttgggaggccaaagcaggtggatcacctgaggtcaggagttcgagaccagcctgcccaacacggcaaaaccccatctctactaaaaatacaaaaaattagccagacgtggtggcaggcgcctgtaatcacagctactcaggaggctgaggcagcagaatcgcttgcacaggggaggtggagggtgcagtgagccaagatcacaccactgcactccagcctgggtgacagagtgagactctgtctcaaaaacaaaaacaaaaacaacagcaacaacaaaaaaaaacaggggcacatggagaaagacaagaaatctaaggaggcaagagcttgaagcttcagggcgaatgtctgaacttcgtgttgaagaatggataccatttagagatgaagagatgtgggaaggcagtctaggaagggagcatgagcaaaggcacaggagcagggatgtgcagagctcataatttaggaaaaaggactggtccagggtcactgggtttaagactgtgtgatgggaaaaggtggtgagacggcagggcgcagtggctcatgcctgtaatcctagcactttggggggccaaggcaggcagatcacctgaggtcaggagttcaagaccagcctggtcaacatagtgaatcccatctctactaaaaatacaaaaattagctaggtgtagtggcgcatgtcccagctacttgggaggctgaggcaggagaatcgcctgaacctgggaagcagcggttgcagtgagccaagatcgcccgccactgccctccagcctgaaaaacagagcgagactccatctcaaaaaaaaaaaaaaaaaaaaaaaaaatggtggtgagaataagattagaacaaaattcggtttcagtctctgctcagatcctgtttcatggatgtctgactccactcaaggaggctttggggatacagaatctaagcactaacggtcctcggaggtcttctggggataaggttccctgtccatttccctaggaatcacctctatggtatccttctgtgtgcaaaggaacccacaggggaggagtaaagatggagccttcgattcaagaaagtaactgcagacaagtaactaaggctcagtttcctcaggtgcaaaatgtgggtaattgacttgcctaatacataggatcgctgagaaggcccaacggctaggattacaagcgttggaattacaagagtcccacctctgctctgtcctttactagctgtgtggaccttatacactggtaagtccttaatttcacggagcttcagtttctcttcagtaacatatttgtaatagtatctacctcctaaggttgatctgatgattaaccagaataatgaatataaaatgcttagcaaaaacgtggcacggagtgaagtactcagcaaatattggttataatggttgaggaaatgacatgcactatatacatgaggtttcattgtctgaaaacatgcacgatttgttaccaaaagacttatcctgggccggcgcagtggctcacgcctgtaaccccagcacttggggaggccaaggcaggaggattgcttgagacctgggcaacatagtgagatactctctctacaaaaaatcagcccagcatggtgatgtgtgcctgtaccccagctactccggaggctgaggtgggaggatcccttgagcccaggagcagtgaggttgcagtaagcagagatcgcgccacagcactccagcctgcgcgacagagcaagaccctttctgaaataaataaataaataaataaataaataaataaagcgattttaaaaagaaaagaaagacttattctggaggattggctacatagtgcaaataaacagaacaaaaatctagggccgctgtagcgggcaaattcgttcaccaactccaaccagaccccgcctccaagcaggcaagccccgccctccccaggctgcacccttgtccccgccccgatgcgcctgcgcagggccggccgccggcggccgaggcgatgagggtgttggtgcggcgctgttggggtcctccgctggctcatggcgccaggcgtgggaggccgagtccccagtggcgagcactggcccgactcggctgggaggactgccgggactccagagtccgcgagaagcctccctggcgggtgctcttcttcggcacggaccagttcgcccgcgaggcg

SEQ ID NO: 14123 - DNA, 2300 bp, Homo sapien
ctcctacaatccattttccacccagcaggccaagtgatcttagacaaatgtcaattagattatgtcactttcctgcctaaaccctccagtggcttctcatcacttttagggtaaaatacaaactccttaccctgttttacaaggcccaccatgaggagtggatactcctgtctgtcctctgactttattccatgccacttccccctcatcactatgattcagctatattggccacctttttgttccagacacattaagctcattatttcttcagtgtctttgtacctgcttgctttcttttcttttctttttttttctgagatgaagtcttgctctgttgcccaggctggagtgcagtggtgcgatctcagctcactgcaacctccgcctcccgggttcaagcagttctcctgtctcagcctcctgagtagctgggactacaggcgcctgccaccacacctggctaatttttttatttttagtagagacggagtttcaccttgttggtcaggctggtctcgaactcctgacctcaggtgatacacctgccttggcctcccaaagtgctgggattacaggcatgagccaccacgcctggcctttgtacctgctttttcaggtctttgcatggttaacccctcatcattcagtttttagtgtagtaatatagtaatcatgtctcccccacctcatccctttctatcttattatgttgtttaagatattcacagaaatgatcactgctataattatcttttaattatgcttttgcttacttttttgttggctatctcccctggagtttgagctccaatggagcagggccctcacctgtcttatttaccatgtatctacacagtagatgctcaagtaacatttattcaatgaataaatgaatgcattacaaaatgaggaggagctggagttccaggcagcccctagattccctgttgggtcttctttcctctgccccatgcacacacagtacacactgttgactaatgtttaactcatagaggagtttgggcttgacatgtgacctcactcagcctctgtttcatttgtgaagtaagaaataagagtgggcggctgggcgtggtggctcatgcctgtaatcccagcactttgggagtctgaggtgggcagatcacgaggtcaggagatcaagactatcctggctaacacggtgaaacaccatctctactaaaaatagaaaaaattagccgggcatgatggcacatacttgtagtcccagctactcaggaggctgaggcaggagaattgcttgaaccggggaggtggaggttgcagtgagccaagattgtgccactgctctccagcctgggtgacacagcgagactccatctcaaaaaaaaaaaaaaaaaaaaaaaaggagtgggcttatttcacataagcccactccttgctaaaccaacaatgattgcctaagatgcacggagccagttggtggaaaagtccatagactatcagagttgaatggtgctggtcaggtgggaggagcacctcattcctgcttccccatcaagttacttgccttggcctgcttcctactctctgggtcactggtgctcacacagcctttcccaacccccacctccaaaggtcatattttacagctccttgtgaggaattcacatcatgccatgaccttcactatgagaaagcacaggctgtaaaaggccagcctggctccctgctccgtggttaaatattgatgatattgggcaatagagacctggagtgggcacactacatatccccctgcagtgatggaacccacagaccgcaggtcctctgcagtccattctcctgcctgtccagaggatccggatgttttctctttacttgaggccaacacataacaatgaaagcactgggctactggtgctttcggattgtgaaagtcaggtggagcctgtttgcactctgagtgcactcattcaagaggtcagtcaccctggagtgatacagaaggctccaggcctgggcgtgtgctaaggccagagctaccagatgggtccagctgccgcaggctctccaggcactgtcccctaagtgacagctgttactgcctgggagagctcaagtgcaaagactatcctgttctcccataaagaggaggaaaaggaagatacagaaatcggtgctgctcccaacagcagatcaaggcagtcgtcaggaactcaggatccggggtgagtgtcctcatcttgccttggggatgggtggcccaggtctttggcagaagtcacagtccaatggcacgatggttaagccct

SEQ ID NO: 14124 - DNA, 2300 bp, Homo sapien
agtccttgaaagtctaagaaagggccaggcacggtggctcaggcctgtattcctagcattttgggaggccgaggcgagtggattacctgatgtcacgagttcaagaccagcctgggaaacatgaggaaaccccatcattactaaaaatacaaaaattagcctggcgtggtggcatgccctgtagtcccactacttgggaggcagaggcacaaacgagaaccgcttggacccaggaggcataggttgcagtgagctgagatcacgtcactgcactccagcctgggcgacagagcaagactccgtctcaaaagaaaaaaaaagaaaaaaaaaaaagtctaagaaaggtctttttttctccctgacttccatctccaccttggcatatgaatgatcattcacatatgaaaagcttaagtcagtattgtatttgtgtcaaaatattttcccttgcaatttgtagatatgcctttttagttttctcagagcatttagtgctagaggaaactctgatgtaaagctagtccttttgttgatactccaattttctgtctggctgtttgccatctagctgtttttgaatgcccctggctaagtgtccaaaggctatttggggctgagattgttgagcacctaaggcagtgacagagtgtgaggggacctgagaatgcttcgatcctccctgtacactttttttcttggtgccctatggcatgttttataattgatctgttcaaaacacttctcttgttttattttagttacgtttatctccattcctactcccttcctcctcctccccaagacacagcttaatgtgtttaatgcgtgtccttttaaaaaaatgtgttattgggtcaggcgcggtggctcactcctgtaatcccagtactttgggaggccaaggcgggtggatcacctgaggtcaagagttcgagaccagcctggccaacatggtgaaaccccatctctactaaaaatacaaaaattagtggggcggtagtgacatgcgcctgtaattccagctacttaggaggctgagacaggagaatcgcttgaacctgggaggcggaggttgcagtgagcagagatcgtgccactgcactccagcctgggcgacagagtgagactccgtctcaaaaaaaaaaaaaaaaaagcgaaataacttaacaattttaatattggcctgaataatatatgttgtcaaaattaattttacctatttctttttgttttgtaaagtatggatgctagaaaattttatattaagtagtaataatgcagttagtacaagaagacgtcaaaatgtctgactgttttgagattgactgaggttcagtttattattaatagttgggatggaaataggcctacacgaagtaagggatttatccagagagcatggattcaagttcttcccttgcaaataacagaaaccaattctgctaacttgtccaaaaaaaaaagaaaaagaaaaaaaaagctctcggggtcggggcagggggtgccctctcagcatcaggagccggcagctgcctttccctccggcacttttcccttttctcctctctgtgtcgtaggcgtgccaatccccaggagagaggcgtgataggcccagcctttgacatgtggggaaacacaggcctgtgattggctaccgcatgacacccaagggacaagttgctatggcaacgcgtgggcgcgctgtgggctcgtagaagccaggtgcggacgctgaacaggcaggcgaagacccgagatgtcctttgcaagggtcccagaactcgccagtggctcagtcctcctcactcccagaacagtgctcctccacacatgcgatggcttttaataaatatttgagtcactcccacttccagtctctgcccctccaggctccacgtgctcctgggttcgttcgggtcgtttttgtcccataactttgggccagaggagatctggatttgggcacagagggagatcaaactcgggtgggatatccagtcatgctgtctgctttgtttccaggggtcttcacggcttctctgcccaggggccagaaccgaggaggccaggagggctgctggggctaaggggtctaaggacctcgttgcacacgctaccaggagcaggggcatggagcacagtgagggggctcccggagacccagccggtactgtggtaccccaggagctgctggaagagatgctttggttttttcgtgtggaagatggtaagtggtgagagattgacggcaggggtgggggtgtgcccctcaacacagagcagagtttggctgaaggtcc

SEQ ID NO: 14125 - DNA, 2300 bp, Homo sapien
gactatagttgcatgccaacatacccagctaatttttttatatgcgtctgtagagacagggtttcaccatgttgcccaggtttgtccctattttgaagatgaggaacagagacccagaagggcaaagtagtttattccagggtctgacagtagcagcccctgggtgaggaaactggggatggagaaaaggataggtcgcagccatgaggtgggcactgttttcctcccaagcctcagagaaggggcagactttgagcaatgagctgtcacagttgagggccccagtaaccaggtggccaccagctcaaataatctctgaactggaagagaattaagggtcatcttactgcaacattcgagtcatgaaggcgtctcttctctaacacttccttgacgtggtcactcccttggttgctgccagtgtcaggggagaggggttgagttccaccaaagacagtcccttctaactatggacagtcagatggttacagagttcaccctcagactgagctagaatcttgcagctcccatctcctggttggtcaagttttaaagatgaggaaacagaccacatagaggtcaagtaacatcccagcatcacacaagctgagaagtagcagagcttaagtttacatgcagttgggcccgtgcaggcccacagttagccctgcctccagcagttgtccattgagattggttctatccccaaaggccccatctggaaccagtctgtcttcacagaatggggccagcccagggatgtgactggaacttggctcccactttctcaactcctacaactcaaaggaaaacccttggccattagctgtgtgactaattctggcctgagagtgtaatctaaacaaattccacccactaccttaataacacagctggtttaccatgatttccccaaaacacaactaggctgagtcaatattcatgtcctggccaggaaaataattgttcttctttgaagagtcgttattaccatccagctctgaccctgggccctgcctgcacacctggttttccatggttcctctgtgggtgggtgggtagatgagttaaccatctgcgggaaggggaaggagaagggctgccgtgagaggtctctgaggctcccatgcctttccctgctctaacctggagcgtactccagaagagatgcctcacagggttctagaatgtacgcaggcctggagcccagggctgattctgtcactctctattttgcttcattttccccttccttcagtatttatatatggggacaccgaagcccaaagaagcaaggtgacttgcccaagattactctagggcaggagctagcactagatcctaagtgtccaggttcgtggtgtgggccctttgccctgtctttggtatgaccagatttaccctgagtcccaaggggaatgaccaggggacccctgccaggctcaccaccaatcccagaattgctgtaggcaagaggcagtgccaggttttagaacaaacaccccatttacacaacaggccacaaacacatgcaactcattagctcccattagggagagacagtaattcagaatggattaggtttcttgaagctgaacccatattggccctgaaatcttagtgaggggttctctccgccccgccccctctcccagaagcctgggttccgaatgggttctgcagtgaggcctctagagtctccacagcaaagggcagaataatgtgattggggatatagagtgccaaggctgagctaaagaaagggcaaggcttggaattgaacccaggaagcttcctggaggaggaggcggggctggcttggtagaacaaagggaggggtggattttcttgctggtgaaaagagattgagtgggaggttcagggaagagtgcaaacatccttcccctctctccccctagccctggggctccttctctgctccttcccggccgggtttgggggcgctcgggagggtgacggcagggtcctcgaggcccagcccggcggtgggggcgcggccggcaggagctccctccctgctccaggagccggctgagcgcgccccgcggggggctccgcagcccttacaaggaatttggtggcgcttggggtggccccgcccgccaggctccaccggcccctcctccccgcggggtggcagcccgctggacgcggggccgagggcgcggacgccgacgggtccggggccgcgcgctccagggaagcctgcatcccgctcccctgggccccgacgggcgggcgcactgcgcggggcccaccggccgcagacctgcgtggcc

SEQ ID NO: 14126 - DNA, 2300 bp, Homo sapien
gaacgcaacgcaaatctagggcttcccactggctgaggtttgctataagctaggggagctggaggctcaatcaaggaatattcaatgcacagttacttcctgccagacactgggtttgggagtgtcaaaaccacaggacatgaagagttggccaagagggttgtgggaccaggccctgaactgtacagcgggatcaggtgttgagggagcgtcagggctgcaataggctgagaaggcttcaggacggaggaagtgaaccctgaagagcagggagaagtgaccctacagtgaaaccacagaagcttaagcctcaggctcctccctttgtctcttccaaggccttgtgcccaattttgtattcataattgtgtgttctttttctgtgaggtgccttccaaattatgtaagtatcagactccacaaaacatggggtgggtcaggattggcagcagaaggtggcagcggggcacagctttctgccccccagcagccccacagtcaggccaggagatgctgcagaataaggccaaggtagaattcaatctgcaagacagagacctgaggtctggtttcttacatgcaccggcttgtgaccttaggcaagtcactgaaccaccccttctctacctgcactgtgagccaacaacccttcacacggttgtttagagcatacatagtagagaagaggctctgtaagcgtgatgtgccatgcccacatccaagaccagatgttgatgccaggatggctcttccctggccaagatgaatttaactctcataacaaccctgtgggggtgggacagtattctgtagatgatggaaatgaggcacagagtggcaaagaatctttttcaaggacacaagagtagactcagctcctaaactttgatgttctccaccctggaggtaataaagggtagaccctagggtgaggtcgtggcagggagagccctgagaagatgcgtatgggtggggattcatgtgtgttacatatacactccaccccaagagccaggcggcagctgtgttttccttgggaggaggggacaggatgaaacgttcagggctggcagagaggtacttcctcatgggagaaggttcggggcgatgccggccaaaccaatggaaatgccttcaagtcaccctccttaatccagggtgtgtttcaactggtgtgcccagttcctcccctgctccatgccctgccaaaccccagcccaaccaaattcaagaaggagggcctggttgggaagacctacccctgctcatctgtcaccaaggtgtggggcataaaacctaagtagggttgaggtaccaagcgtgtgttgcttaatcaggtcattaacgtttctgaaccttgatttcaatgtctgtaaaatgggatagtagaatggacctcatatttctttcactagtcactttcctgacattgttttttgttttgtttttttttttgagacagagtttggctgttattgcccaggctggagtgcaatggtgcgatctctgctcactgcaacctctgcctcccgggttcaagcgattctcctgcctcagcctcccaaatagctgggattacaggcatgtgccaccacgtccggctaattttgtattttttaatagaggcagggtttcaccacgttggttgggctggtctcgaactccttacctcaggtgatccacctgccttggcctcccaaagtgttgggattacagccatgagccaccgcgcccagtccctcacattgtcttatttaagtctcctgatagtcccgtgaagtagcttagggattgccctcatttttcatatgagtatactgagtaagcattagagagctggggtctgcaggactctaagccctccataatattagcccctacactctgtacagaaggtggtacataaaggcatttttaaaaatgtccagcccaactgagtgtcacttcctgtagtaactgacatgtccagtctgtctgtatttcagtccctcagcccgtacacctgtctgccacctcttgggggggcaccccaacctctcaacccccacaagtcacaccctgatactgcggctgacctgctgtccgccctgagccaggaggagcaagacctcattgggccagtggtcgccctgggatatcccctgcgaagggccatcatagctctgcagaagacagggaggcagagcctgagccaggtgagttgggggacccagagctgatgagctgtgatgctggagccaggtgagtggccacatgattttcaccttttgagctgtgacataggcccaacaacagcatca

SEQ ID NO: 14127 - DNA, 2300 bp, Homo sapien
aaaattcaaatttattaagcaggcatttgttacaggaatttgaatcttaaatgctaaactttatctgcaaaatccaagtctggattggtaaggataccatcaattttggaaataatgttacgtactgtagttggaagcttttgggtgcaagatactaatggctttgtcccttttctgttgtttaatttgcattaatttatacattatatagagtcaacagatagggaatgagggccacatgtctccaaaatgtatgtctacgcttataaatcttaaaatctgatatgattaccctcatagagctccacaatcctgtgtgcctttttgttagatatctccaccatttgctctctgatgagatgcaggaagagtagaaataaggtgaattgtacgatgtgtgtttggtgtctggacagccttgccactaagatatctgctgtgagggcagggaatgtgctgcagggactcaggaaaactcggacagcagaacccaagaaggtggcatttagccacagatggagaaaaaaaaaatccctttttcctttggcccttgcaaggttttaataaagtgatcaggctgggtgtggtggctcacgcctgtaatcccagcactttgggagaccaaggtagatggatcacttgaggtcaggagttcaagacctgcctggccaacatggtgaaaccccatctatactaaaaatacaaaaattagtcaggcatggtggcaggcgcctgtaatcccagctacttgggaggctgaggcaggagaatcacttgaagccaggaggcggaggttgcagtgagctgagatcacaccattgcactccagcctgggcaatagagcgagactctgtctcaaaacaaagaaaattaaaaaacaaaacaaaacatgagcattactcttgttcggtttttatttgtaagattttcctggtttattacctgtgtgtagtggtggtggcagtagccactggttctttcaggtttagagagactcatggtagtatctttaatgaattgtactttcaagaatatgagcagtgttattgtaatgttatcccacagtctttttttttctttttttaacttggggaaaatttcaaatacattcaaaagtaaagagaatagtacaatgatttttttccatgtacccatcatccagcttcaaatcattatcagcttatggccaatcttgtttcatctatacatcctccactcaccctggattattttgaagcaaatctcaggcatcaaattacttcatctgtaaatatttcattatgtagctttaagtgattaaaaaaaaaatctaactacagggccattatcacatctaaataaaggagtaacaactcctgaatatcacaaatatccaatcattgttcaaattgccctctcgtaaatgttttacgttttgttcaaattaggatctgaatagactccatacactgttgtttgcatccttgtgatgccatgtccctctgttctcgtatgtcctataatttagtagttaaacagagctgtactgtccaatatagtagccacattcagctgttgagcacttgaaatgtgatctatttgagttgagatgtgcaattacatatgtggatcacgtttcaattggatagtgctgatctagaggcttgatcacattcagattggaattttctggcaggaatacttcacagacataatgtgtacttccagtcaggaggcactgatgtcttggctttttttgtgatgttagcggccactgataagacccagattcattcattgatggggaggggactcaaaaatagtgatagtttaattctgtcattcttcaattattaactggaatacttttaaaaagaaaaactgtacaaaagcatttgtttttaataaattcggtaaatacagagattagaaagctatgagagaaagagattagttcttaaatactaagggtatttagcccaagtggctgagtttatgatgtcaaagaatttgctgctacaagccaaccaacttaatcactctataaaaccattcatgctcctatgcccatgtgacatttgtaacaagaagcttaggcttatgccatctgttgtagctattcatttatacacgctttgtctgcagggaagttctcctggtaattacaaggtaagtacaaagtatatcttattccatttaaataagtataatatgcaatatatgaaaggaatgtgaacattctgaaatagtagtgatttatggaatagtgattaaatgagacattatcaactaaatttgttttttgccacctgtttgtccca

SEQ ID NO: 14128 - DNA, 2300 bp, Homo sapien
atctggtattgctaaaatgcttgggtaacatattttcctttaaaatcttcaaggactgacaggatagatcacatccacatcactctacattgattcacctggaagcttttgtattacagggccattatggtagtgagtgcacaattgcagtccactcaaatattcattaagttaaaatctttttttcttatgaaactttatgaaacatttcacacatgcacaaaaatagaatacataaacactcatcatcaactatgataccattgtcacaccaaaaaaattagcagtaattctttgatatcacctaataacctgactattttctccactgtggctttagatatgttggctatactgttagctgacctcatagttaaatcaggataataaccatcccagttttactgggacttggggctttcagtgctacatgcaggcaaaccaaaacagttggtcagcctactgtcagcagcagactgcaaggtcagtgtggttgttttaagtgtatcttcctcaccatccaagtgtgcactcccaaaattcacactcagtcagaggaagaattgtttattaattagatctgggagttgatgctaagggaatttcacaaacaatgaagttaagacaagttcctccctttagtgagctcactgtttcaagtggaggatcaagaccattagaaataaacaaagtcgaagccaggtatggtggttcacgcctgtaatcccagcactttgggaggccaaggtgggtggatcacctgaggtcaggagttcgagaccagcctgaccaacatggagaaacatctactaaaaatacaaaaattagccgggtgtgttggtgcatgcctgtaatcccagctactcaggaggctgagtcaggagaatcgcttgaacccgggatgcgtggagtttgcagtgagctgagatcgcaccattgccctccagcctgggcaacaagaatgaaactccatctcaaaaaaaaaaaaaaaaaaagaaagaaagtcagaggttaagtggtgtggatgatccagagggaggagttgagaaagtcagggtagggtcagagtaattgaatactcagaaacatcaaattgagccttaaaagattgggtaaaatttctaaattttaaccgatacatactatagctaggacttttaaacttcctcattataacacaaattttgggataagaaaacgtgtgtaaaaggccatttgggctggatgcagtggctcactttgggaagccaagctggtaggattgcttgaggccaggagttagagattagcctgggcaacatagcaagacctcatacaaaaaagttttggtctttttttttggagacggagtctcactctgttgcccaggctggagtgcagtggtgtgatctccgctcactgcaagctccacctcccaggttcacgccattctcctgtctcagcctcccgagtagctgggactacaggtacctgccaccatgcctggctaattttttgtatttttagtagagacggggtttcaccgtgttagccaggatgttctcaatctcctgacctcgtgagacctcatacaaaaaatttacaaattagtaggtagggccaggcacagtggctcatgcctgtaatcccagcacttagggaggccaaggcagggggattgcttgaccaggagtttaagaccagcttgagaaacacagggataccctgtctctacaaaaataaaaaaaaaattggctagatgtggtggcacgtgcctgtggtcccagctacttgggaggctgaggtgggaggatctcgggcccaggaggtcgaggctgcagtgagtcgtggtcatgctgccgcactccagcctgcacaacagagtgagaccctatctgaaaataaaaaataaaaaataaaaaaaagccaggcatggtggtgcacacttgtacttgtagctacttgggaagccaaggtgggaggatgggttgagcccaggagtttgaagttgcagtgagctatgatcacaccactgtactccagcctgggtgttagagcgaggccttgtctcaaaaaaaaaaataaataaaatgccattttgtcctgtctgcccaggggtctgtcctccagcctcagcagatgagacttttacgcatcatcttcagcgactgagaaaactcattaaaaagcgctctgaactgtatgaagctgaagagagagccctcagagttatgctagaaggagaacaagaggaagagaggaaaagagaattagaaaagaaacaaagaaaagaaaaagagaaaattttacttcagaaacgt

SEQ ID NO: 14129 - DNA, 2300 bp, Homo sapien
aaatagtttcccattgttcataagatatgagaccccagacattaggacttcacttcaccaggatcaccagactcctctcagagctccatccataactcgcattcttttttttttttggagacaaggtctcgctctgtctcccagactggagttcagtggtgtgatctcggctcactgcaacctccacgtcctgggttaaagcaattctcctgcctcagcctccccagtagctgggattacgggcacgcaccaccacacctggctaatttttgtgttttagtagagacaggaattcaccatattgcccaggctggccttgaactcctgagctcaggcaatccacccgcctcggcctcccaaagtgctgggattacaggccaaaactggcattctatcaggcttcccactagacatagtcctgtaacctaaggcaggtccagttccctgcagcttgcaaattcaaataacaagtaagagaatggtaaaaagaaagtgactgccacgggcacggtggctcacgcctgtaatcccaacatgatccaaggcaggcggatcatgaggtcaggagatcgagaccatcctggctaacatggtgaaaccccatctccactaaaaatacaaaaaaattagccaggcatggtggtgggcacctgtaatcccagctactcgggaggctgaggcagaagaatggcatgaacccaggaggcagagcttacaatgagccaagatcacgccactgcactccagcctgggcgacacagggagactctgtctcataaaaaaaaaaaaagaaagaaagtggccaggtgtggtggctcacacctgtaaccccagcactttgggaggccaaggtggacggatcacctgatgtaaggagtttacgaccagcctagccagcattgtgaaaccccctctctactaaaaacacaaaaattagccaggcgtggcagcaggggtctataatcccagcaactgactagggaggctgaggcaccaagaataactggaacctgggatgcagtggttgcagtgagtggagagtgcgtcattgcactccagcctgggtgacagagggactctgtctcaaaaaaagtggggggtgcacgggacttggttgacctggatggcatgcaaggggtggggagggaccaaggaggtgctgggtctatgggacttgctcctatgtatccatcagtgatctggttggcgccatggaggctggggcgaaggcggagggggggtggggggtagcggggagctaggttgtaaattgacagttgtccccaggcaatcccctggtatgggaaagttccagaggtccctggtttaagcttcggtccttggaactaataagcgaacacataattagataagcttacagtgtagagagtgtctggtggagagaaggtaaaggttaattggatttttttttttgacaggtgtcattctgtcgcccagggtggagtgcagtggcgttatcgtggctcattgcagtctttacctcccagggctcaggtgatcctcccacctcagcctccccaatggctgggactacaggccgatctcgcctgcctcggcctcccaaagtgctgggattacagacgtgagccacagcacccaccctataattgcattcctaaagagctaaataggaggtggggtgaaaggagaaaagtaaaaataattcatttttctaagaaaatgggtagttggtcacactcctatttactagggcctttgcacatgttctcatctgcactgtgcttccctctctttttctatttaactatttatcttccagatctcagctgcagccgcagtttcttaggataaccttctccaacttctcgaagatactcaccatgattaattgattagtgtgttatactaggcagatagttccacgaagagaagctctgtatctctcagtctcactgtatgcggagtgggtagctctgcacctaggatgctcaataagaacggtatttatgaactgaacgacagaaggttgaacgactgcccacttatgcactgagccttccggagggacgagtctacaggggtcgcgcgtcgtaacgacgtcacttccgtcggaaggttctcatgaggagccactcagattcctgtcacttctcaaagcatctccgtcgtgaacatggccctgccaccattcttcggccagggtcgcccaggcccaccgcccccgcagccgccgcctcctgctcctttcggctgtccgccaccgccgctgccctccccggctttcccgccgcctctcccccagcggcccggcccttttc

SEQ ID NO: 14130 - DNA, 2300 bp, Homo sapien
cacacctgtaatcccaacactttgggaggccaaggcaggcggatcatgaggtcaatagatcaaaaccatcctggccaacatggtgaaaccccgtctctactaaaaatacaaaaactagctgggcgtggtggtgtgcgcctgtagtcccagctactcaggaggctgaggtaggagaatcgcttgaaccgaggagccagaggttacagtgagccaggatcgcaccactgcgctccagcctggccacagagtgagactccatctcaaaaaaaaaaaaaaaaaaaagacaaaagaaaaagttttacataaaatgaagacataaaaagttatgtgcctgactgggtgcaatggctcatgcctgtaatcccagcactttgggaggctgaggcaggcggatcacttgaggtcaggggtttgaaactaacacggccaacatagtgaaactctgcctctactaaaaatacaaaaattaaccgggcatggtgacgcatgcctgtaatcccagctactcaggaggctgaggcaggagaatcacttgaacccaggaggcagaggttgcagtgagctgagatggtgccactgcacttcagcctgggtgacagatggagactctgtctcaaaaaaaaagttatgtgccttcagctatgtagttcgcaaaaagtaaataactcaaggagttaactcctccagtgtaaactatttgagctggaaaactgcacttgactttctttttaaagcgtcattaatctgtcagaaaacagctgaaagtaggtgtgatgtggaagggctgatgtgaccacaagtatttgccatcactttcctggtgaaggatccattttctcacagggataatctcagatggctctgggttttttttttttttttttgagacggagtctcgctctgtcgcccaggctggagtgcaatggcacgatatcggctcactgcaaccttcgcctcctgggttcaagcaattctcccacctcagcctcctgagtagctgggattacaggagtacgccaccacacctacctaatttttgtatttttagtagagatggggtttcaccatgtgggtcaggctggtcgcaaactcctgacctcgtgatccacctgcctcggcctcccaaagtgctgggattacaggtgtgagccaccacgcccagccggctctgtgcttttgaattcataacttgagaggatggcctgataggaacctgaccagaggttatctatgcagtgccatccttaatcacggccgggtgcggtggctcacgcctgtaatcccagcactttgggagggcgaggcgagaggatcacttgagcccaggagtttgagaccagcctgggcaacatagggagacctcatctttactaaattaaaaaaaagaaagaaagaaaagaaaaccctcaagactttaaagcacccacggactagcaacagctagaagctttatcaccacgaggcctgaaagaacaaggagacggagctgttaccaactaacaattgctgctcagggaactaactgacaataccaactccatgttacaagtgatgaaactaaggagaatgagaagataaggaacacaggatgtggaattccgggggaagaaatttagtgaatctgaagcatccagcgcctaccaaggcactttagagacttccccctggagggttaagccaccagcctcaccttgaccttccctgccgcccactaaaagtgaccggaagagctcgactatgacgactcgggactacaagtcccggcatgcatctctccgcgtctatcgcaaaacctttcaactttaggataaaagggcttttggcaaccttgagcgtcgggacctgtagtcgccccagttggggctagacgcttgccgtagggaactcattggcgcccagggcaccaccccctcgccttcgcctcacgtagcttcaccagctcgcaaacacggcgcgtgcccacgccctccgccccctccccgggcctagggcgcaggcgcgcgcaagctccccgggcccagtaggctgggggtgggggtagaaggagaaggaggggaagggaggggggggttgggtgtctactctggtgaatagacggctgtggggcagagaagcgtgaaggcctggctgccgggcaggtgaactctccacggggtctagggcccgcgaaagggttcggaaccgagtcagcgcgccttgcgggcaggattcacgccgctgtgacccggaggtcctcagggggcgaagccccggcctaggcctcgcggagatgcccagctgcggtgcttgtacttgcggcg

SEQ ID NO: 14131 - DNA, 2300 bp, Homo sapien
atctggggattgtggctcagcctgtctgtctgtctattccttaggccatcagatttcacatggggttcactcagttcagacgtctgcagtcaaagccatggctgaaactgagtcatggcttggctctgacaagttggaccagactagggccaactacagggcttatgaaccaagggctggtggccaggagggagacggggctccaggagataaagcaaatcagatctatgccccaggtctacttgggaaccatgctgctcaacatcctttctccacccccactctcttccccagcagatttttttttttttttttttagaccaagtctcactctgtcacccaggctggagtgcagtggcacgatctcaactcactgcatcctctgcctcctgggttcaagccactctcctgcctcagtctcccaagtagctgggattacaggcacactccaccatgcctggctagtttttctatttttagtagagatgggtttcactatgttgaccaggctggtcttgaactcctgacctcaagtgatccacccgcccctgtctcccacagtgttgggattacaggcgtgagccactccacccagcctcccagtatatcttgtcaaaggcaatgctcagaaaaaacagctcttacgcacacatacacacacacacacagaaagacacatacacacaggaaaaggcataaacacacacacacagaactctctggcatgtgggtatgcactgttgtactacgggatcatttccacgtgaggctctttcctctgagtgcaaggatacatctcttttcttgtgccttcccagtgcccagtctagagcctgggaataagagctcggtaaaggtatgtggagagagtgagctgaccctggcgtggatggccacaggaccaggcctccatctccagttgctggcatgaggcaggaagcccagcccaggctagatgagcctgctacatggggcaggacctgggaagctcccactgtggtccttagtacactcgctcttcatcttcttccttcaactggggctctatcactgtgaccagtcaatctcaaaatgtgatccatgaaccaacagcatcaatctcatctgggaacttgttagaatgcaaagtctcaggccccactgaatcagaaactctgggtgtggggtccagaaatctgctttaaccgccctccaggtgattctaacacatgctaaaattagagaaccagtgtctgtgcaaacagataacctcatgctggggccagggggccgggagtgggggtgtgaagccccagagcacatgcagctgcatacgccccctatgggtaacactggctgttcacatgctggtggatgcctatacctgaaggcagacacgtactcacacgcatgcacatatatgagcatcagggtctcagaagagtccacatgctggagctctggggtctcagtgggtaccagcaggcactcagatggaagtgggggggagaaaggaagaactgttctcaccagctgacaacctatgccccacaattcttttgtcccttatcccttctgaggttccctgagtgttccctcagaagccagagaagctgagtagttgcccaactcagaccagacacacccagctgagaggccaaggtggcctgtgtgcctaagagtgtttggagtatgtgctaagaccagcaaagtcttttctctgtgtgggcgagccagggccaggggaatgtggggcatcagcaagctaggcttaggcaagagcacaccatcccccgggccatgaaatgctgcccagatctagaattccccgtggccccttcccagggctgtttctagtgcccagcccacctcctgacccctctctctgctctggactgtgatgccccaggccactgcccacctggcccatcaccaggtcctgcggcatctcctccttaggatctggacataaaatcctggcctctgtgaactgcaaggggacatggggaggggagagggaggctcatgctcagatctggtttcgctgctgcttcctctggctggctgccacaggctgagccaccagctgtgctatataaggccggcactggactgctggagaggcgaaggcttggacccccagctgaggagtcctgctcaagacacggtgagctccactcctattcccctcaccccatccctgcaccccactgctggactcaactgctcctgccctcccctgactactccattcccttctccccacttccccccactttttgctgcctgatccttcatctcccacagagaagactcccttt

SEQ ID NO: 14132 - DNA, 2300 bp, Homo sapien
tatgctaggcaatagacaaacctcaatgaatttaaaaggacaggagtaaacaaaatgtgttctctaagccaggtgtggtggtgtgagcctgtagtctgaggtactctggaggctgagccgggaggatcatttgaggccagaagttctaggctgcaatgtgctatgatcatgcttgtgaatagccactgtgctctagccgaggtaacagtgaggcccagtctcttaaacaaaaaacaaacatgttggtgattgcttaggagtgggcgacatggtagggtgggtagagcattgatagactaggtgtagagagttcctttctgaggtgataaaaatattctaaaattgattgtgacagtttcacatatctgtgaatgtactaaaaactattaaattgtacactttaaatgggtgaattgtatggtctgtggattatatcaaatttatataagcagggctgaaacccctccacaagaaatgtggttctgagaccaccttagcaaattctgataaaatctagaagaataaagtaaacataagaacattcagtttcactatcaagtaaatgcaaattaaaactataatgaaattcaactttgtgtctatggaattgacaagaattaaaaagaattctaatattctgcatgagctaagtcatgagaatgctggccatcagaggcccttccacaccaccctgtgatgtgaatattatcactatgattctcatatcatatgtgacaaatatcttcagataagcaaattttatatatccacccaacaaacaattcttgaggccaaggaggtatcagagggtggcttttgtctaagggcctgcaatgaagaagaggtggaatgagagatggttccctggtctcctgacccactccaagctctcccttcctggggtctgagcttcagaagccaccttagagttcctgggtcctatgagaacccccatggcttttgaagcactaggggccttgtggttctaggcctcagagcaaacagatttgatgtgggctcctgggagcagcccccaacctttacctggcaaaagaagatgggaagctctgtggtgtctgggggaccagtcttcgccctacctcccgaagtcatagatgcaatccaatggcatgggaccacctctcctctgagtccagggcccagcacagcctggatgcagaaggagaagtttcttcctcagaagatcctgcagggtaggagtgtgtgcggtgtgttggtttaagcacaatggtctgtgtttagatttgcatgtgaccatgaggtcacactttggggttttctctaatgaaggttctgagtagggagaggggatgggagtctagtccttaccctccagcagagttaagtcaatgcccctctgctctcccccaagctccctgtcagagaggtctcccaaggaggatcttggggcatttgaggccagagacttaagcaattcagagaattctggaggctgaaaagcagaggaaaagtcttttggttttccaaagatctcggtgtgaatcctagatttacccatctggctgtgggatcttgggcaagcattgcagcactctaagcctcagtttccctgggtgttaaatggctccttctgtgcagttttggagggaaaagattcaagagagacaataggtagcattaataccccaaggaagagaggtaggctcagtccgcagagctgggacaaagacaagtacaggggcgggtcgagagggtgcccacatcaatttctaccagggctgctgctgctgtgaggatggctggcaggggcgtgggcgacgtcgcccggcacacactggcggcggcaactctcgtagctgcgggtgatcggggtctgggaggggcgggcacaacccgtacggtggagctggctggggcgcgaaggggcgggccctcggctgggccgggcggagcgcggcggcgggaggggaggtaggccgggcaaggcaagcggacgtgagctgcaggcggaagacaggtggcgccgcgggcagcttggcgagaggcgggacttcggcggcgcggcgggaggcggggcaggaaggcgcgcgcggcgcagcagcctcgcccgtcgcggagagtgggctctgcccgccgtcccccgggggctgcttcccgccccaggcctccgcggaggacacgtgtcagcacgttcccgcggttgtcattccattgtcatagcccttcccctaggccgggaacccctcccccccaccagccccagttcctttatccctgggcccaacctccccgccgacccgcggtccaggcctcggtct

SEQ ID NO: 14133 - DNA, 2300 bp, Homo sapien
ctccgaaaaatgaaacagtacccattagaagttacttcccacctgctcattcacccagcctctggcaactactaatctactttctgtctctgataggcccattccagacatttcatataaaaggaagcatacaacatgtggccttttgtaccggcttcttttggtgtggctcattggtgagcaaacattcatctggttttgtttgtttgtttgcttggtttttccttcccacaacaaggaaaatgtgatttaattctacaaatttacaaaccaaaatacaaaaacaaaatgtggaacacaaaataaagatgaggagttctgagactcaaggcagctcagccgtagcagctgccccgtggtccgggctgaatcctccccatgacttggagtcggctctgaccttgccagaacttgaggctgaagccgggcccgcaaccgaggcgccctggttcgtgatggtgaagtggaagccagtctccttcacgtggtcgtcacccagctggctgtagcccaggcctccctggcggggcgcgggtcgggtgggggcgtgctggtgctccacttcacacactgctgctcactctttacgggccacgtggggaacatcgaggggtcagtgggggggcggggggcgatctcgcagaaatactcgcttgcggccatcctcagtgctcctcccggggaagtaggtcaggaacttgttcgtaagatgaaagccctgttctgagagcaaggcccccaagcccttgcagaggttgctataggggtactggctgaaggtcatcttcttgactgctggaaggttactgtagccattcctatttgtttttgttttgatacacgttctgtcacccaggctggagtgcagggctgcaatcatagctcactgcagcctcaaactgctgggattaagcacctcctgcctcagtcacccgagtatctgggactatagtctgcaagccaccacattgggctaattttattttttaattttttgtagagatgggggtctccctatgttgacagacatgttgcccatgctggtctcgaattcgtgggctcaggggattctcccacccctgcctctgaaagtgttggtgagaggtgacagcgcgctggcagccctcgtagccctcgctcgctctcggtgcctccttggcctcagcgcccactctggccgcgcttgaggagcccttcagcccgccgctgcactgtgggagccccttcctgggatggccgaggccggagccggctccctcagcctgcggggaggtgtggagggagagacaccgcaggaaccggggctgcgcacggggcttgcgggccagctagagttccgggtgggcgtggccttggcggcccgcagtccgagcggccggccggccggctccgccgaccccagacagtaaggggcttagcacctgggccagcagctgcggaggatgcgccaggtcccccagcagtgccggcccaccggcgctgtgctggatttcttgccgggccttagctgcctccctgcagggcagggctcgggacctgcagcctgcaatgcctgagcctaccctgcccacccgccatgggcttctgcgcggccggagcctccacggacaagtgccgccccctgttccaccgcgcccagtcccatggaccgcccaagggctgaggagtgccggcacacggctcaggactggcaggcagctccacctgcggccccagtggaggatccactggacgaagccagctgggttccggagtgtggtggggacttggagaatctttatgtctagctaagggattgtaaatacaccaatcagcactctgtatctagctcaaggtttgtaaatgcaccaatcagcactctgtgtctagctcagggtttgtaaatacaccaatggacactctgtatctagctaatatagtggggacgaaaacttttgtgtctagctcagggattgtaaacacaccaatcagcaccctgtcaaaacggaccaatcagctctctgtaaaacagaccaatcggctctctgtaaaatggaccaatcagcaggatgtgggtggggccagataagagcataaaagcaggctgcccgctcctgctgcggcaggcaggtggggtgttttctttgataccgaggtggctttttttcttttgctgtttgcagtaacttgctattgctgctgctactgctccgtgcgtgggtctggcctatgagctgtaacactcaccctgaaagtgtgtagtttcgctcttgaagccagtgaggccggaaaccaactgggaagaaggaacaactccagat

SEQ ID NO: 14134 - DNA, 2300 bp, Homo sapien
gtttgaacagccattttagtcttgcaaaatgaagctagtggcctgtatagcattaaaatggttttggggctccgtgcagtgtctcatgtctctaatcccagcactttggaaggctaaggcaggcagatcacttgaacccaggagttagagaccagcctgggcaacatggcaaaactccatctctaccgaaatacaaaaaattagccaggcatggtggtgggtgcctgtagtcccaggtacttagggagctgaggtgggaggatcgcttgagcctgagaggttgaggctgcagtgagctgaaatcacgccaccgtactccagcctgggtgacaaagtgagaccctgtctcagaaaaaaaaaaaaaaaaatatgtcttggatctgctactaactaactagctgttgttttcttggatcttttttctctctagaaatgggggctttaagcctctccctagaatcctgaaggtggaggggaaaagggaggtcaaagtggggttccaggcatcctacatctaccccatcaatggcagcttagcttttatctttttgttttgttttgttttggagttctctaaactgactaactaggcagataggtctaacagggagtagttcggcagctgcaggtgctgtgatgccaagagggcttaagggcctagagtcttaggtagaagaagtataactctaagatgaacatttaggagagttataaagaaaaacatttttatcacatctgtggttatgaccaaggttagattaagccttgattcaggaaaacaatgagttatacttaaattttggaaagcttttcatgtatcactgtcactactagtgcttggtagtgttaaatacagttagttggtcagagcaaggaacaacttggctcctgctcgtttggtccctcaataagtgttgcccattcttttattttattctcaaataaatggatggatagatggatacttctatgcaagggtttggctatgggcagtctagaaaatgcttataatcgaattatggtgacatggacattagaaaatgctgcagcctcagaaagggctctgtgatatgtgtcaaataaatggtgctaaccaagggctattggtttagccaacagccttctgttgatctgggcaacactaattatttaacagataaagaattgattaatcatttaataaatctgatagaacactggaacataagcatatcattcttcctttaggtggaattagtcaaagagcccatcagaagagattaggaagtccatgtttccagaaaaagaatatgcagaattgaggggtattaaagcaggtccaggccgggtgtggtggctcacacccgtaatcccagcactttgggaggctgaggtgggcggattgcctaaggtcaggagttcgagaccagcctggccaacatggtgaaaccccatctctactaaaaacacaaaaaaattagctgggcatagtggtgcctgcctgtaatcccagctacttcggaggcggaggcaagggaatcgcttgaatccaggaggcagaagttgcagtgagccgagatcaggccactgcactgcagcctggaagacagagcaagactccatctcaaaaaaaaaaaaaaaaaaagcaggtccattctcaaatctcacatcagcaaatctctaagagtatctatcctgcacctatctgcctctgtgccaagtactctgtgaaggatagcacagaaagataagacacttcctgatcttgaagggtgtaatctccccacccacccccccaaccctcgcctttaaaaaaaaacccactttgtttggtggtgatggtgaaaaagcagcctgacgtagcacaaagtatctcttgaatgcatacatagtgtgaccatcggcttgtccatctgcaccgtggtttcctttagttctgattgatttctaagttgagccacctcgtgtcctcacctgtgaaaaaagaagtgcctcagccttaccgggcttctcatggtgccttggcttccaggagcatctcggtcaaaacagtggcctccgtgcttgggacattaaatccaaattctgaggccttgctttgcagacctcccctttctgaccatttccctcttcccgactcctctagtcccttcatcagtccaggctccccacagtgccccatcttccctcttcttttcccagtctttctctcctgccttctctacccgcatctctcccagccattgcctaaacctcggcagtcctttcaggttggtggcacacagctgggcactaaggtatgtaaattccccactctttct

SEQ ID NO: 14135 - DNA, 2300 bp, Homo sapien
atcactctcagaccaagggttgtgataaagaagaattaaacacttgtcaaaatgaatttaaaatgacagcaattcaagagaccaatttgacctcttcagagtccaggacaagccaagaaggggttgttgagaattcaagccctgcaggagggagttccaggattttaggcccagggagggcccttcccctccctttcctaaggccagtagaccaccactcccaccctttctcacaatgaaatccaatagggctttggcacattggagtcctccacctagaatttttccattgcttcccgctgttcacatgcctcatgtcctgcttctcaggctcatcttccagtagctgccctagagtgaacagtcctgagctatgccaacctcatcattagtaaacctgtccatctacaggcactctgatttctggaggcctgtacttccttacttatccgtatcaaagttagttttttgtttgtttgtttgtttcgagacggagtcttgctctgtcgcccaggctggagtgcaatggtgcaatctcagctcactgcaacgtttgcctcccgggttcaagctattttcctgcctcagcctcccgagtagctgggattacaggcgcctgccaccacgcccggctaatttttttgtatttttagtagagatggtgtttcatcacattggtcaggctggtctcgaactcctgacatcaggtaatccacccgcctcagcttcccaaagtgctgggattacaggcgtgagccaccgttagtttcgtacatggtcccaaagttccagagttggtatcaaaagaaagacttagtttttcctctgccatcccagtccagtgccaaaggagcaaatagctacattaggccaacttttattatttatttatttattgagacagggtctgtgttgcccaggctggaatacagtgggactccaggcatgcaccgccatgcttggctaatgtttgtattttttgtagagacaggttttcaccatgttgcccaggctggttttgaactcctgggttcaagtgatctgcccacctcggcctcccaaagtgctgggattacaggtgtgagccactaagcctagcctgccagctttaattctctagctcctagaacttagtagctgctcaataattttgatggactagtccatcatgctggactcaacagaagaccatttaatagagagtggctgagattcaagatctctgagggctagtatgggtatgtctctgctaaaagacatgcttatcttctgtaacattctcacgtgggacctctgttgtctccttatatgttctctgacatgaacgattgagggccttctttgtggcacagaaacgttactgggaattttaactttctatgtgcttttccagttaccaggtcatttgtcaggacctctgcggtttaaaggtctctagggatgaacaggagagataagattattttcatctttcagatgagctcagtgagagtgactgggctaggcagcaggcagaacccaggtcggaagccaggcccctttagagctctcattgtcctgctgctgggtctgctctctccaggcaatcctccccagcggagcgccaggactcctcggtccagagaagccaagcttgcagctacaggatctatcctttgagtggaaggaccagaaatccatggaaaactgaatctttgacaactttacgcagctttttagagaattatctctaaaatatggacttggaggagggcgcagcagaaagagtgggtcagagcaaatcccgcagctgtgtgtctttccgcagcccggacccactccccagtccgctggtgtccacttcctcagccccccaggtccccggctggcccgcggggaggggatacccggctgcagcccgggacggcgccggccgctccagccacagttcaaagcgcagggggcgcgtccgccgcgcagccgggaatgtccggccgcttaaagcgctcgccggctcttttgttccccagaccgggcctccggggagagggggctgggggaggggaccgggagcagagaggaggggggcggcgggctggggaggagggcggggcggccgcgagcggtgcgagtgtggagcgcgcaccccgggcgaggctgacagatcgcccgggtgggtgcaagatggcgcaagcggcgctccccctgcgccccccgcgctgctgagcaggcatgcggccccagtcccccaccgcctgggctcggccccggccggagccccagccccggccccggcgccggccccgcgggacgctgtgagc

SEQ ID NO: 14136 - DNA, 2300 bp, Homo sapien
cccaaagtgctgggattacaggtgtgagccactgcatccagctgggactggctttagagaccagtttctttgggaaattgctttgattggaggattaacttggtgaggtgatgagctttatggtgtggaggtggacagcaggactggctacgtaatttccagggcccagtgcagaatgaaaaggtgctatcccttattttaaaaattagaggtcggacggccaggcgcggtggcttatgcctgtaatcccagcactttgggaggccaaggtgcgggcggatcatgatgtcaggagatcgagaccatcctggctaacacggtgaaactctgtctctactaaaaatacaaaaaaaaattagctgggcgtggtggtggatgcctgtagtcccaactactcaggaggctgaggcaggagaatggcgtgaacccgggaggaggagcttgcagtgagccgagatcatgccactgcactccagcctgggcaacagagcgagactccgtctcaaaaacaaaaacaaaaacaaaaaaagctagaggtcgggcatggtggcttgtgcttgtaatccaaagtgcttatgcactttggaaggctgaggtgagaggatcacttgaggccaggagttggagaccagcctggacaacatggtgagaccctgtctccacaaaaaatttaaaaattatctgggtgtggtagctcatgcctgtggtcacagctgcttgggaggctgaggtgggaggatcacttgagcccaggaggttgatgctacagcgagccgtgttcatgccactgcactccggcctgggtgacagagcaagaccctgtctcaaaagaaaaaaaattagaattttaaggtggtgacagcagagcatgaactcaagcgtggggtccatccaagcatggggtctgcgcacctgcacatgttgcacacccatgcaacagccctgggagcaggcaacacgtgcttcaccaaaggccagtttgaggcagagagaccataacttctgggtgtgttttagggaggacagtcagagggagaggtagtagtagtttctgtgaggctcagggccctcctgtccttgtatcagaagattgtgagcatctgaagggtgagggtccagctggtgtctcctgagaaagccatggatagtcctgatctatgccctgtgcccttcctctgtcctgacctgctctgtgcctctctctcccccaccagactcgctggacatgcactcagtcacgggcatcatcgtgggtgtctgcctgggcctcctctgcctcctggcctgcatgtgtgctggcctgcgccgcagcccccacaggtgagcaggggagccagtctgacttcagggaagggagacttccaggaagggctgcagaatgggccatcagggaaagtggccatgacttgcccttggcactcccaggagccccgttaaagtcaggactctgggatgaaggaatcagggatgatgtcctcctgagaatggggagtggacttaggggagccccagcctaccctcctcagcaaggccaacagaactgcctcactcccacttcctctgtagctgccagcatcttggaaagaggggccccaaatctccagatgcctgcagccaagggaagaagagccctgtttacagcatcaggctgttttgaacaatagcagtttttcttactcattgcacagaccaggaaagcaaatcccagagatgggcaggaacctccccagagacataggctggaccagatcccagccccgcctgaccccttactctgaccgctatgccttgttttccgtcttcccttccagggaatccctcccaggcctgtcctccaccgccacccccgggaatcccgcgctgtactccagagctcggcttggcccccccagccccccagctgcccatgaattggagtcccttgtgcacccccatccccaggactggtccccgccaccctcagacgtggaggacagggctgaagtgcacagccttatgggtggcggtgtttctgaaggccggagtcactccaaaagaaaggtaagtcagagccccacattgcggctcttttctaaataggacaccagggggcgacagagcacaacgcgtggctatgcgagcatggctctacctcctcttcggagccggctgcggacgctagggcctctctccctcctccacggaatggttggctgtcagggaagcacatgggcctccatatcccggcggaataggtcagcttggttctcacgaaggaaagggcctcccagcaggtgacccagggtagccagaacacccag

SEQ ID NO: 14137 - DNA, 2300 bp, Homo sapien
ccactgccctccagcctgggggacagagtaagactctgtctcaaaaaaaaaaaaaaaagaagagaaaaagaaagaaaataaaataaaaaagaaagtgacagttaaagacaagaatagacagcagggaaggaggataggaagagtagggggtgaggctgtgagaaagcctttatggtatccagtatgagggaacagatctctagacttgcactggccggacaaaggtcttgaggctggaggggaggaggctgcccgcgatcaagttacagcaaggaggatggtgtggctggagaggtggtgagcacagggggtggtgtcgaaggggaggtcagagaggtagagcaagcctacagatcagataggccttgtgggtcacaataaggactttggcttttgctctgacataggagccgctggtgggtttctagcagagaagtggcatgatctcattttaacaggagcactctggctgctgtattgagaaaacactcaaggaggacaaggacagaaaaagatcagtgaggagtttgctgtgacaatccaggtgagaggcgacgggtcttggaccaaggccacagtgagaaagtggagggtgaagcatctgaacatgaagagtaggagatgactctacatttttttttaatagaaatgggggtctcgctatgctggccaggttggtcttgaactcctggcctcaagcgatcctcccacctcggcctcccaaagtgctgggattacaggcgtaagccaccaagcctggcctctacatttttgacctgggcaacaggaaaggaactgagatgaggaagactgtgggaggagaaagattgatagaaaagatcaggatgagtttgtctactagacagctaaaggaactggggcctggatggctggatacagaagtccagggttcaggaaagatggtctaggctgaaagtatacatttgggcatcattagcataaagatgctctttaaagccttgaggaccagatgagatcactaagggaagcaagtgtttcaaggaagagggagtgattcactaagtcaaatgctgctgatagggcaagtgaagatggggcgtggcaatgaatgaataaacgccaggcctgttagatatgcaaagcgccagtgattattgagggttaactgacaacagacaggtgtagagacaagatggctctaagtcacaggaacacttagagacacagggaagggaagaactatggcatcttggagttggaaaggaccttaactaggtcattgaatctgtactcttttccccaccctagcctgacaattgaacccttggctgtagaacaagaaatatttgcgggatactgaggcaaacagtctggctaggtaggttagagaaagtaccgttgaagaatgagaaaaagggtacttcagtaaatgctggacagcagaggcagggtgagggagtggagatgaccttccgaagtcagaaaaccaaggttcaggtcctgtatctgctgctccctagcctcctgtccttgggcaagtcacttcaccttctccagcctcagtttccccatgcggcgacatctgaatatggtagtgcttgaaggtagtgtaaaagtgtcctgcctgtgttagttactgccagagcaagggaaggaggccaagagaagcccttggtttgggatggcagataggactatcaagatctccgcaggtgggctggcgcaacgtgtggagaagcgaaccagcattcaggccaggacctgggctggaatggactgggctcgggtggcaagggggccatctggacaaagaccgtggccctgaatctgcctcccctgagcctggaacggaggtggagaccccgaggcagcaacagggagaagaaatagagacgctgaggcagagagaccagaagactcagagacggggagactaagagacagacccagcaacaggcggcctcacgggggcccgcggcgacccggagagggcgaggcaccgggacacagacccgggccgagaggagcccccgcgaggcgcagggccgtggcgcgcgggcgcagggtccccggcggggccagggtggccacactcgccgggcgccccctcccgggccgctcgcccaagatggcgatggaggggcgggtgaggcggcagcggccctggcccccgcgccggccccagctcgggcccgggcccccgaggccgcgcccccgcccgcggcgccgcgcctccccgggccactgacgcccggcgcgctctccccccgcggcggcggccgaagcacggggaggcggcggcggcggcggcggcccga

SEQ ID NO: 14138 - DNA, 2300 bp, Homo sapien
gaccctgtctctacaaaaaaaaatttaaaaaaacttagctgggcatggtggtgcacacctttaatcccagatactcaggagtctgaggtgggaggatcacttgaacctggaggtcaagctgcagtgaactgtgattgtgccactgcagtccagcctagatgacagaccaaaaccttatctcaaaacaaaagagttaataatctttctagttacattaagataccatttttaggtcagacgtggtggctcacacccataattccagcactttgggaggcccatgtgggcagatcatttgagcctaggagttccagaccagcgtggggaaacatggcgaaaccccatctctacaaaaaatgcaaaaattagccaggcaaggtagcatgcgcctgtagtcccagctactcaggaagctgaggtgggaggatcatttgagcctgggaggcggaggttgtagtgcaccgagattgtgctgctgcactttagcgtggatgacagagcaagtccctgtcttaaaaaaaaacatacaaattttaaagtggtaaaaatacttgctgtatagaaagatagagtaggccatgcatggtggctcacacctgtaatcccagcactttgggaggctgaggcgggcagatcacttgagatcaggagtttgagatcagtctggccaacatggtgaaaccctgtctctactaaaaacacaaaaattaggcaggcgcacctgtagtcctagctactcgggaggctgaagcacgagaattgcttgaatctgggagttggatggaggttgcagtgagctgagatcgctctactgtcctccaccctgggcgacagagtgagactaagagagagagaaaaaaaaaaaggaaaggtaacgggcatcaattcccacttcctgtgtaagcactgagggaggttttggaagatcattatcaaaagacaattttttgtttcccttgaaagctaattcatcttaataaatttatatatacacacacacacacacacacacacacacacacacactttttttttgggggggagacaaagtcttgctgtcatccaggctggagtgcagtggcaagatcatggctcactgcagcctcaaactcctgggctcaagcaatcctcccacctcagcctcctgagtagctgggactacagatatgtgccaccacacccaattactaatttaaaaaattttttttagaggtgagggtcccactagattgccccagcttgtcttggactttaggctcaagtgatcctcttgccttagcctctcaagtggcttatgtttggttttatcctaggcaattgattatgagctttaggaactcttcttttgagaattgtgatgatcctggcttctattacatttttatgagcaaactattttatattggtaaaaataattttaaaatatttaataaaatattgagtgaataagtgtttaataacaatgtttaatgaacagtaattactctcttaaacaggttgggcaacaaaatttatgaagtagtgttttattgtctttatgtcctttatgtcctctcctgttacccttagctttttcatttgaagttaaaaaaaattcctttctggtaagttaaggcaatagaaagtatatttttctgggaagcaattatcattgttgactttttttttttttcctgatactgagtctcactttgtcacccaggttggagtgcagtggcacgatcttggctcactgcaacatccacctcccaggttcaagcaattctcctgcctcagcctcccaagtagttgggactacaggtgcccaccactatgcccagctaatttttgtatttttggtagagatggggtttcactatgttggtcaggctggtctcgaactcctgacttcaggtgatctgcctgccttggcctcccgaagtgctgggattacaggcgtaagtcaccacgcccggcctcattgttgacattttacctagaaatattgttcatcttataggaagggtgctggaacatgtatgtgtcagcctaatacttaccttaaaatgttgtttacttttctagcaacaacctttaaggcccaatctagtggaaactagttgtcccaacatacggatggatccaaaattatgccctgctgatccagactggattgcttttatacatagcaacgatatttggatatctaacatcgtaaccagagaagaaaggagactcacttatgtgcacaatggtaaggcgtagttcttcagatttacttttctgaacagtattttttgaagtataatttgctgcttgca

SEQ ID NO: 14139 - DNA, 2300 bp, Homo sapien
ttcagcctgggcgacacattgagactccatctcaaaaaaaaataaataaaaattaaaaaaaagaaatctagattccaatctagtcaaatatataattagctatgtgatataagcaagtattttatctgtccatggctctttttttaaatgcatgaaattatatatttttaattgtttgcttttgcggggagggggctctatctcttcttattaggctataaactgcatgaaaacaggggctttatctactttgttcactattgtggccccgctgcttaaaacagtgacaggtacaaggcagagattcagcaaacacttgttgaattaatgaagtgcaagatatttctctgtattttgtgtgtgtgtgtgtttgtgtgtgcatttaaagcctttaaaatctgctctcaggtcatttggagaaaattaatagaagagacccaaggaaaatgactttgcctttttttttttttttttttttaagggagctcaactttaaaaagcctgagggaaggctcatttaacctcagagtgaataattatatactgtggagtggagcatagtacccaaatggattttttattagtgctattataataaatcctaatgacacacgactctgacacattgttctttgtaataatagaaaataggggaggccccgcttttgcacagttttgttgtacacctgctactttcctggatatcttcctgagttccctttttctcagccaatatacagtgtagaccaggaaagaaattgcaggtcaagggacctgcctctggctctgattataacaagtcattcacttctttcccctaggccccagtttcttcattttatgtgttaaagtgcataccttttttttttttttttttgagacagagtctcactctgtcacccaggctggagtgcagtggcgtgatctcagctcactgcaacttctgcctccgggttcaagcgattctcctttcctcagcctcctgagtagtagctgggattgcaggcgcccgccaccatgccaagctaagctttgaattttttgtagagatggggtttcgccatgttggccaggctggtctcgaactcctgacctcaagtgatccgcctgcctcggcctcccaaagtgtggtattacaggcgtgagcctccacgcccagctggttttctttaattgcaattaagtgaaatgtattatatcccttttagaggtaaagaaattatggctcaaatagattgagtgacctgctgaaagatcgctagttaatattagagccaagtttcggactccaggttcagatttctttccaccacaaggagacgcttagatctccaaggccctagtctctttcctcaatatcatctcgttgaaaggggagggatttaccctggtttgctcccagcgtctaaggctctctctgcctggcacatggacaggaattttgtctattttgagcaggcactcaatatatattatttattgactacagacgcgccacattttgccctgtgactttcagcaagtcgctgttcctttctggagttcatctctatcccctgctcggcccagtctccaccccgcgcctccttggctcctccggccactagactgcgctgtggtgttggaccccacccagcagacagcggcgcccttcttggcccggctgcgccttcgccagtcggaaagcggatcgcaacgaaccggaagtgctaaagcctccgaggccaaggccgctgctactgccgccgctgcttcttagtgccgcgttcgccgcctgggttgtcaccggcgccgccgccgaggaagccactgcaaccaggaccggagtggaggcggcgcagcatgaagcggcgcaggcccgctccatagcgcacgtcgggacggtccgggcggggccggggggaaggtgcagtatccgcccccttctccttctcctgcgccggcgaggcctgggccacggctcaccaggccctttccgcctcacggagggactgctcggcgcgttctcagggtcagcgcgctttgcggtttacccggcgcgccgccctgcccagtgcagagccggtggtgcccttcccccctcccccccacttgccggaagaggaagccgaggctctgagattccgagtcaaccaccgttcactgggcgccccttgagctctgggcgctggcctcctggcttccacgtccgttatcttaattgagtctcgctggggttgggaggccgggtattgtcagcgcttacagatgaggaaacggaagcccacagaggcgaagggattttccttaagtccgacttg

SEQ ID NO: 14140 - DNA, 2300 bp, Homo sapien
cttctattctaggaacatcacacagcattctgctaagagtcagagatccctggattcaagcctacgcctatgatgcatgcaaggtggccagcgttccacggtggagatgttcctctacagctttctcagggtttgaaaataagaataaaaatcaagaactctggccgggcgcggtggctcacgcctgtaatcccagcactttgggaggccgaggcgggcagatcacgaagtcaggagatcaagaccatcctggctaacgtggtaaaaccccgtttctactaaaaaaaatacaaaaaattagccgggcgtggtggtgagtgcctgtagtcccagctactgaggaggctgaggcaggagcatggcgtgaacctgggaggcggagcttgcagtgagtcgagatggtgccactgcacttcagcctgggcgacacattgagactccatctcaaaaaaaaataaataaaaattaaaaaaaagaaatctagattccaatctagtcaaatatataattagctatgtgatataagcaagtattttatctgtccatggctctttttttaaatgcatgaaattatatatttttaattgtttgcttttgcggggagggggctctatctcttcttattaggctataaactgcatgaaaacaggggctttatctactttgttcactattgtggccccgctgcttaaaacagtgacaggtacaaggcagagattcagcaaacacttgttgaattaatgaagtgcaagatatttctctgtattttgtgtgtgtgtgtgtttgtgtgtgcatttaaagcctttaaaatctgctctcaggtcatttggagaaaattaatagaagagacccaaggaaaatgactttgcctttttttttttttttttttttaagggagctcaactttaaaaagcctgagggaaggctcatttaacctcagagtgaataattatatactgtggagtggagcatagtacccaaatggattttttattagtgctattataataaatcctaatgacacacgactctgacacattgttctttgtaataatagaaaataggggaggccccgcttttgcacagttttgttgtacacctgctactttcctggatatcttcctgagttccctttttctcagccaatatacagtgtagaccaggaaagaaattgcaggtcaagggacctgcctctggctctgattataacaagtcattcacttctttcccctaggccccagtttcttcattttatgtgttaaagtgcataccttttttttttttttttttgagacagagtctcactctgtcacccaggctggagtgcagtggcgtgatctcagctcactgcaacttctgcctccgggttcaagcgattctcctttcctcagcctcctgagtagtagctgggattgcaggcgcccgccaccatgccaagctaagctttgaattttttgtagagatggggtttcgccatgttggccaggctggtctcgaactcctgacctcaagtgatccgcctgcctcggcctcccaaagtgtggtattacaggcgtgagcctccacgcccagctggttttctttaattgcaattaagtgaaatgtattatatcccttttagaggtaaagaaattatggctcaaatagattgagtgacctgctgaaagatcgctagttaatattagagccaagtttcggactccaggttcagatttctttccaccacaaggagacgcttagatctccaaggccctagtctctttcctcaatatcatctcgttgaaaggggagggatttaccctggtttgctcccagcgtctaaggctctctctgcctggcacatggacaggaattttgtctattttgagcaggcactcaatatatattatttattgactacagacgcgccacattttgccctgtgactttcagcaagtcgctgttcctttctggagttcatctctatcccctgctcggcccagtctccaccccgcgcctccttggctcctccggccactagactgcgctgtggtgttggaccccacccagcagacagcggcgcccttcttggcccggctgcgccttcgccagtcggaaagcggatcgcaacgaaccggaagtgctaaagcctccgaggccaaggccgctgctactgccgccgctgcttcttagtgccgcgttcgccgcctgggttgtcaccggcgccgccgccgaggaagccactgcaaccaggaccggagtggaggcggcgcagcatgaagcggcgcaggcccgctccatagcgcacgtcgggacggtcc

SEQ ID NO: 14141 - DNA, 2300 bp, Homo sapien
ctgtcaacgtcactgctttcatcaactcattcttggcagattgcattggtctcccattgctttgcctactaccaattcctcctcctctctgacaggtctttcttgctgagcacatttgattttactaatctccaggttaacaaacttccttggctcccatgtgtctgtgggatacagtataggcacctcagtgaagcaaacaaagactttcctaatgcaccctctgcctttccagattcagggcgacctctctcctctatgcctttaatccctagcagcagaacctccttccacaaccctctctcttttttaaattttaagacagggcctcacactgtcacccaagctggagtgcagtggcgcgatctcgcctcctgggcttaagcaattctcccaccctagcctcccgagtagctcggaccccaggggcgcgccaaccacgccctgctaactgttgtattttttgtagagacagtgtattgccatttttcccaggctggtctcaaactcctgggctccagcgatcctcccgcctcgtcctcccaaagtgctgggattacacgcgtgagacgctgcacctggtccacatcttttcacctgtgaacgaagcaagcgccctgtgcttccacggcctacctggttcttactcagtcaaattcctactcgcatttcaccatcccgttctcaagggttggctctcaaatgtctgacaatggttcccacggccctcagttcctatcatcataaactctttgtgagctcagcacattcattatatgaaaactctctatattttattctgtccactcttgagctaaatgtttccagagagctagcagaatttgttttcagcgttagatccctctgctaaacaaacgggtgctaatagaatcactttgctaaataaatgggagctaacaggattgaatatgagttccatttttgtcccagagttctagttttcatataaatatttcttcccattaaattcttctctgcagaagaacttggggatgaaacccgatacagacaagacagcttaagtaagacataaatgagtgttgtctctagtttgagtttcctatttttttgagacagtctcctgcactgtccaatagaatagccaccaaaaatatggatatttaagtttaaattagaagtgaataaagttggccgggcgcggtgtctcacgcctataatctcagcactttgggaggccaaggcgggcggatcacctgaggtcgggagttcgagaccagcctgaccaacatggagaaacctcgtctctactaaaaatacaaaattagccggtggcgcatgcctgtaatcccagctactcgggaggctgaggcaggagaatcacttgaacccgggagacagaggttgcggtgagccgagatcgcgccattgcactccagcctgggcaacaagagagaaactccgtctcaaaacaaaacaacaacaacaacaaaaaaaaaacagaagtgagtaaaattgaaaattcggttattcagttcaagtactcaaaagcctcatgtggctagtggctaccgtattaaagagcgcaatgtgcaatatttccatcatcacctacagttttattgggcagcgctgccctggtctttattttcccttgttggaacgctcttccacgctgctcccacaccatgtcccctatcaccattattatcctcatttcatctgtaattacttgcatcttttaataggctgggagttctaagacagaagggactgtgtctcacttctgttgttccagtgtttagctttgaaacccaggcacacagtaggtactcagtaaacagaatgcgaaggaccgtccagagacaccagtcccaaacccttttccaggctgatcggtcccccataagtctccagccttttttattttaaagcttattttaaagcatgtccctgaagacgagtggggagagcagaccacccgctgattccaattccctaggcggccgcggcgagctgcggcgtctctgtgccccggcctgcccctatcccgcctgcgccccgcccccgcccggctcgcgccaaggcccgctgctggcgccgccgccatcccggcgcgtcactgcgcaggcgcggcccgcgagcgtggggtatctcgaggtgccgggttgcaggcgctcaggagcgctagggtttgaggcctgctttctgctcgcgccagcagagcactacctgaggcagcgaggcgcagcgagcctagcctccccgcgccctgggcagtgtggccatggagaatcaggtgttgacgccgcatgtctact

SEQ ID NO: 14142 - DNA, 2300 bp, Homo sapien
gatgggttgactccaggaggtcagggctgcagagagctatggtcccaccactgcattctaacctgggaacagagtgagaccctatctcaaaaaaaaaaaaaaaaaagcccggattagataccagctttatccatgtagactagcttgatgcctacttctccagcctaatgtcgttttttcaccttgaaagtttcacaagacattacttgttactccccacctggtattacagtttttagattgtaagctctgagggcagccttgaactacctttgtatcccagtagttcttctcacagtaccttgcacattgtaggtattcagttaatgcttggttgagtgaatatataaccaaatatcagggttgtttttttcatttactgtatctgtctctttgagctagtttgacctcagtgaccttaaagaaattccagaaaagaagaaactatggattatattaagatgactggagggccaggcacggtggctcatgcctgtaatcccagcactttgggaggccaaggtgggcagatcacctgaggttaggagtttaagaccaccctggccaacatgatgaaaccctgtctctgctaaaatacaaaaattagccgggcgtggtggcggaagcctgtaatctcagctactcgggaggctgaggcaggagaattgcttgaacctgggaggtggagcgtgcagtgagccgagattgtgccactgcactccagcctgggtgacagagcaagactctgtctcaaaaaaaaaagaaaaaaaaaattgagccggagctgaggaaatctttatttcctttttgtaatgcctcttcagatggccactcatttttttgccaggtgttatggaaaaaatacaacactacaacactcaactgctttttcctattttcttactcaacaacaatcaacacagaagacttctgtgaccaagtgggtgggttttttcccccacataccaagcaagcaatgagttctgcagcagacaccagctgggtgccctctggttcaattctgacactgtttacctagagatagcatcaggttcccacagatggagggctcagtccccaagacacacccctgcccccagcctgtcccgagtctgaacctccagaacttgtgaccaataggctgtaaattacggttcccacaacccgctcctgtggtttgattgatttgctagcgtggctccacagaactcagggaaacacatttgttcatttattataagggatattatgaaggatacagatgaagagattaggaggaagtatggaggaagtggcgcggagcttccatgccctccccaggtgtgccaccctccaggaacctccgtgtgttcagctgtctggaagctgactaaaccctgtccccttgggccttttatggagacttcatcggataggcatgactgaagcgtgttgaactgtgttgaaatgtgattggacaaaaagggtctgacctaaacccagcaaggcctgtctgtccagattcttctcagcctctctgtgcagtgttccctcctccagagtatgaggcaagaccctctctggaatgagggtcttaggacccacaatcagattagagtcgtgccttgggcagctgaaaggaaggcagggaaggtcatagagggagattctgttgtctgaggcctaaagtgtcccaacattataacaaaaaactgtaacaagggctgtgggagttataagccagaaaccgttgccgaaaacctatatatacatatacacatatcataatatcacaccaggggtaatatttttttcttgggtttgttatgtctgtatacctattcttcaaggctgggaaaggaagtcctgctgaaaatacatgctggagagcaatgttccttgtatgtttctctgtgggagtaggagcccaggctggtgaggacctggaccaggtatttgtgtgggagcttaggagcattcaggaaggaaaaagggttgaagtcatccagatatgcctcatacacctgtctcctgctgggactattgcttttaatagcttactgctttgctttgctttacagctcttacaaacttaaggaaaggatacctgtttatgtataatcttgtgcaattcttgggattctcctggatctttgtcaacctgactgtgcgattctgtatcttgggaaaaggcaagtaagacatttttggattaattttccctttctcagtagtttggcccagtattcaccaaagggagcactctctgcctttgatgttaataataacccctgcatttgtgcagcaccctctacttttcg

SEQ ID NO: 14143 - DNA, 2300 bp, Homo sapien
ctggtctcgaacttctgacctcgacattggccaggctggtctcgaacttctgacctcgtgatccacctgcctctgcctcccaaagtgctgggattacaggcgtgagccaccgcgcccagccaaaattccatttgtaagtaggctgtttcgaactcagaatacactggttcatggaaacaatgtttacaactcaggttgtaagcataggcgtaaaagaagaaactgaaagttcctgaaggatggttcactcaagcagtataggcccgactgaaaaaaaaaaagtgaggtcctgcacaatattggttcaactacactatattagaccataacatacgctcactaagggcagggaccatgccacattttgcccatgatgtctcctcaaaacttatcacagtaactggcacatagtaggtgcccaacaatttgataacaactgatgaactacccctaaatcaccagatataccatatattatttagcaaaatacattataaatgttaactctggacaccagaaacacatttcctcttctcctcattcaagcagacatatgggggactccctcacgtctgcccagctcctgtggtagtcccattcatgcagggaggcctttttacaagttgaggatcatgaggagtactgccctcacctcttaggagaatgggaggaaacagtttacacagacttagatcaaatacaaaaaagcactttcagcccgtgaaatctgctgttgacagtgatgacagctggcagtcttgccttctctgaagacacctctggagctggctctttctcccaagtgatgcatttgtgtcgactcccaaatgcacctcattaacagttacaaagtcgtgggagatcaatttagtactcaggttggagtaaaggagggaactgaaagttcctgaaggatagttcactcaagcagtataggcctgattaaaaaaaaaaaaggccaggcacgcctttaatcccagcactttgggaggctgaggcgggcagatcacccgaggtcaggagttcgagaccagtctgaccaacatggtgaaaccccatctctactaaaaatacaaaaattagccagatgtggtggcgtgcgcctgtggttctagtacttgggaggctgaaataggagaattgcttgaacccaggaggcagaggttgcagtgagccgagatcgcgccactgctcttcagcctgggcgacagagcgagactccgtcttgggtgggggggaatccctgcccaccacagtctaccaattttgtgagcacaacactatgtattcctcacttgggtggattctgagcccccaagtctcccacccccacccccttcccacgtgtactgttcaaacaactagggctcttctttctcaggaacagtctgagaaataggccctagccacctatttggccttgaataccaagtgtccatcagctagacgtttgtaattcttccctgaaggtgataattagctcattcataaagaactgattctcagcagtctcgctctcaaagcaggattctacctgaatttctagtgcctcacctgctctttggctttcccgtcagcctccgggagtccctccccagttctcagatataatttcatctctaaaagtccagactgaaaatcacatctgggagatgtatttttaccttaaaaatcagtcaagaaaatgtgggatctggaagtctctcttggaaagagggggcagaggggagctgagcagagggcgaaatcgtgcagtttacgcggagctggggaccccgagcctcagagcgaggggaggccgggagcagcgccccggaactggcgcctcacagacagcgcggggcggccgccacggtggcgggaaggccaagcgctggccctgggttgttcttcacccataaccccttcacctgtaaccccaacaagcagcgaaaggcagtcccgggccctcggcctccccactcaccccgtgcccatcgccggacacagtccgtcggcataaactttccgtcggcataaactttccgtccgcgcgccacagccggaactataaggccgcgcgacagaagggaatccggcgcctgcactccgcgctgggcggggcggtccttggagagcttcagggtcgcccgggcagggttctggctcatcccggagggacgctagggggcgcggcctctcttcgcgatggccaatccgcggccacccctctcctcccacaaatccccaacttctctcgagccttggctgggtttcctgccgtgtctctctgcattgccctgaatctctccccattctcg

SEQ ID NO: 14144 - DNA, 2300 bp, Homo sapien
cactgtttcaaggcaggaaaaaataaagggaatgagagattatgcaaaggaaactatttattgatttcctttaatgtgtgtgtggaaacacgcaaatgctgagggtcgtttgagtggggaaaagaaattcatcagccagtgatggcttgaaagacaccccctttaaaaccttctaacctttgtgctgatgttctctgatgttatagtcactgaacaaccttctgatttgtaatgggattccactaaggaggaaaaacaaacaaacaaactagttgccctaagtaacacagtcctcctggtagctgtgccttttatcatcaatttaatatattgattttttgctttccaagtctcccaaagcctgttattcagaagaactaggtcacaagatttgatcatccatcagtgaactaacttaagctttagggttgggtaaggtaatgaatcagaccctgcaactgagccagaattaccacgaggacagtaaccctatggctaagtcgttgtcacattaggggtaactagacacttgcttacccacacattcttggccacatccctcccaatagggcaagattagaaatcatgactaagttatcaggctgcagccttacttacctggagcccaatgcctgctcaagcataactaggtcttgacatggtgagatcagccaggttggggaaagaagttttgaagcaaatagggcagtctgcagggccctggccccagtgctggcagggatattcccagggacaggaaaaaactacaagcaactggccccacaatctcccacataacaagctgtgagaagtcagacagatttgtctgttcagttcaaagcatcctccttcctcgtcccatctcctaatctcgccccatcctatcagctaaaagaaaaaggcaaatgcctgaggccttctagaggcctttctgtactcactttgtaacctatgtggttccacattgttctttgaaccgtaactacccaggggcctgctggcatccatctaagcctatctctagctgggattccctggctccctacatggttagaaagaaagtcacctcttgccctcttaaggacctcactgaggcacagactacaatggagacaccaggtggccagagtggcaggcaagagcccatgttgccttacagggaaatctgagcacgcatgccttgtccagggtgagaggaacgagggccctctgcttccctcaaagaggggataggggaaataaagtgagcatttgggctgaggagaccaagaggccaagtcttgaggtaaattgggctcaggtcagctaagaaggatatacaaagcatacctcagccaggaattacagttttggggtttttccccccaagattctcgtgcgttagcctcccaagtagctgggattacaggcactcgttaccatgcccggctaatttttgtattttagtagagagcggggtttcaccatgtttcccaggctggtctcaaactcctgacctgaagcgatccgcccaccttggcctcccaaagtgctgggattacaggcctgaaccaccacgcccggccaggatttgtagttcaggaattgcagtttaaaaagaacaggaagaggattctgtcaaccggttcagaggatacgagagagggggctaaagagtgacgaggaaaatagcaggaagggttgggctcgtgcaccgacggggcccaggggagtgaggggacaaaagtgtgaagcggacacagagtcaccgggccaggtgaggcccatgggtcagtggggcagaaggggaaggaaagagcccgagaatggggagagattcagggcaatgcagagagacacggcaggaaacccagccaaggctcgagagaagttggggatttgtgggaggagaggggtggccgcggattggccatcgcgaagagaggccgcgccccctagcgtccctccgggatgagccagaaccctgcccgggcgaccctgaagctctccaaggaccgccccgcccagcgcggagtgcaggcgccggattcccttctgtcgcgcggccttatagttccggctgtggcgcgcggacggaaagtttatgccgacggaaagtttatgccgacggactgtgtccggcgatgggcacggggtgagtggggaggccgagggcccgggactgcctttcgctgcttgttggggttacaggtgaaggggttatgggtgaagaacaacccagggccagcgcttggccttcccgccaccgtggcggccgccccgcgctgtctgtgaggcgccagttccggggcgctgctccc

SEQ ID NO: 14145 - DNA, 2300 bp, Homo sapien
atctaccccatctgttcttccatcctgttccaggggagggtataaaatgaggcaattttgtagagcaaattagatcagcttcctcttctcagtggtgctggccattctccatccatttgctctcaaaagatcatgagctttttgagtgggcattctcctctccatccatgtgtagctcagggcccccatctctgagcatcttcctcactgggttatgctttttatatttaatatatataaaatgtatttaataaataactttatttataatattaataaataaataaactcatttatttattaaatacattcattgcttgccaagcactgttctgggctctggggattcagtggtgaataagacaggcaagttccctgtcttcttggagttcacccgctagtaagagttgcacacattaatcaggtgattgcacaaataaatacacggtagagtgttgtaacaatgaaatgcatggaaacctgctgacccctctaacacaatctgattgtgatacctaaaagcagaaaaacaacaatagtacccggcactattaatatgttttacaaattaattaatccccacaacaaccctatcaaacaggtaatgtcattatcatcctcattttacaggatgagaggtttataaccactgagaagttaaataacttgtccaaactcacatggctagtacagaggatgcttccattcttggttgagcagccaaatttcctgctgaatttcaaaatgtgccagaatcccatgataataagacagaagaaactgggtttacccccagcgggtaggatttaggttagacaccaggaagaactccttggcaacatttatgaacatatgagagaaaggaatcacttttctgaggatttccttctcccctgaattttttatattgaataaacaacattgtaaaaatagaggagttatttcagaaaaaagatcactcattttactttgtgaattatattccttttttcatctttctgggccagattgagactgtgttacatagtggcatgaaaagggaaagaactagattttgttctgcccacagcagcataaaggcaaggacatgtaactagcagacctcaggtcctgatcccaggcttccaacatccagagtgaccccagcatactcagagatgaagccagctcttccacagtgggtgggcccttctgtgggcttcagcagagggagctcgtgaccttcttactgttccaggccactcaaggtgaagcagggtagaggtgaggctgtgaggattaactgctatttcagatgaaagtaacccaaagcatcatgcacccaggtactctggaggaaacaggaaagggagaaaggggcagtcagtaaatgtcaggccgagttagctgaatgattgaaagggcttccagatcaatggttaggatcacaagatccccactaccttaccctactcccactttgatcagctccaagtcatgggctggaggcgcggggggctcagggcaccaactcctcaggtatcttgggatgtcccagcctgctctggggagatccattagtgccctctacaccaaggatttcctttaggcctaataaaatagatttcaggtatgaattgctttgaagtttgcttggtgttttctctataatctttgttttttattttgattctcacattcaccttacaaataggaaggacaggtattattatccccacatttacttttagattacattagaatcacacagtagcaagtcgagcctaatgctaactgaggtcttctgatctcttaagccccagtcactttcccttcgttttctcagagcgccttctgaatcttttcaaaactttccaccatctaagcatggaaaccctagaccacctctcattctcatagcttagaaacaagtttgagaaatctccccagttcctccattgactttgtgggcccacagtgagcccctctgtgtccctggtggaaggcccactctctcaggcttggtcaggtgtaccgggacccagaacttgtacaatgccctgataagcttcttagaggaggtgggtattagccacgatcggatattcttcccctgagctgcccttcacacccgaccctgccttgaattaggattccataggagagctgggggcaggagaatggggtgttccctgctgtccagcttcagacccactctttgagatattggattctgacaagtttccagagctgagaagacagccagatgtcaaggtctgaaggtaaatgatgtaattaggtaggagggatcagctggggtg

SEQ ID NO: 14146 - DNA, 2300 bp, Homo sapien
gtctcatatagtaataacaaccttacgttttacaaatttgggaacttcaaatccaaacaaaaagattacattgttacttaaaatcatatgtctcctaagatagagaactaggattcaaaactttatcttttgtgactaatctggtgaaaacgattttctaaaaatgatgcagagcctctttagcaacacagtgtattagaaaatttttttatattgatagacctttttccattctttgagacagggtttcactctgtcgcccagactggagtgcaggggtgcaatcatagttcactgcagccttgaactcctgagctcaagtgatcttcccacctcagcctcccaagaagcctcccaagaagtgtctataggtgcatgccaccattcctggctaattttttttattttttatttttagtagagatgaggtctcactgtgttgcccaggctggtctcaaactcctgggctcaagtgatctgcctgcctcagccttccaaaatgctgggattataggcatgaatcactgctcccagccccttttgcttttcttaacaatatcttcaacactagatttttatctcattcccatgtatttgtactcacatacagttcaatgattattcagctaaatttttttaaaaattaattacccatcaataaatttgaagaaatccaatttttttgtaaaatcatttagacatttagctctagtgacctatgtatgaatgttctgttataaattctttacagatttctccattgcttagttgaaactcaaactttcaactagaaaggtcatggacttgtataaagaatgtctggtttgtctgtgtcttggagctcatatagtagtgtgaatgtatgtagttacttttgactacagtgtggaaccaagagtaaattatttcaagatcatctctttcttatattaatagagatgatggaagggatagttaacaaactaatgctttaagggtagctaacaaaataatgctttaagttggaagttgtccagaaaaaaatttataaggaaatccaaacactagtatgttgctcctaattccagttgcactcactaaagaagtttctaatagagttttgtttatttttgtttttaccaggtggccagtctgatcttggatataattcattatctaaagatgaagttagaagaggggatacatctactgaagacattcaagaagaaaaagataaaaaagggagtgattgtagttcctgtaggtattgtttaagttgatattgtataaaattgagaacttatattcatagaaaatgcaggtgattttataaaagtgctggttttactttccatttttccattataactctttcttttctaccattacgtgccctctcagccaccacatactctcatacaaatgctttatgtatgaagtatatagcctcagtggcaaaacacttcccaaatcaaataccattagaatgaatgctacgtaattccaaaaatacatgtatttagtagaactgtatatacatttcttgaaactatttcttttttgagacttaacaatattttaaagcttgtgatccttttgtagtttatgagcatgatgattgggtattcatccatgtttgtgagatgtgccacccttgaaccttgttacgacatcagcacattacccatctgacctgaaaaaagaaaaaaaaaaagtttgtttaatggattgtgattatatttacccccttccccactccaccaaaagcactcctttacaatcagtgaggaaatataaaatttgtgcatggacctcatgcatgatcagtattcagtagtttgatctacactttgaggcctcaaataagtgaaatcacttatttgtggttgacaaacagatatagaggtgttcaatattttcttgtcacctattttcaagtaaaaatatgtagaactgaaaacttctcttgatacctcctacagtgtatatagatttcattttattaacattttcattttcatctttacagtgtcagagagtgagagtacaaaaggaagtgctgattgccttcctaagctcagttatcaaaattcttccagtatcgttcgcctcactggtacaagtaacaacagtgctggtaaaatatcaggagaaagcatgggtaagttgaatagtacgcttgtgttatgtgcggaataaattgtatctgtatgactagtgaatacttatttttttaatagtcttaattctccaaggtgattttaaaaaatattttgtgcagcctctcatggcatagcttagtaacttgagttctatatttt

SEQ ID NO: 14147 - DNA, 2300 bp, Homo sapien
atattgttctttaagaagctattttctctgattaaaaaaaccttcacgccttttaaacttttgaaaggttttagaatctcattgtgtatgctacatgcaactatataacattttaattggtactctgtagatgaaaatatttgtgtgtatatatatatatatatgcacatatacatgtataaccaactaaaagagtgcttttgctgctagtggaatattttgatatgccaagctactccttaaagaggaattgacctgatacgtctagcaacacttaaaactaatgaaaggctaaatctgtgtccaatgggtaaagaattgggagggttcccaactggactttaaaaaaagctttttaaggtagggcacaatggctcatgcctgtaaacccagcactatgggaggctgaggtgggtggatcacttgaccccaggaattcaagaccggccttaggcaacatagtgagacatagtctctacaaaaaacagaaaaatttgctgggtgtggtggtgggcacctgcagtcccagctactccagaggctgaggtgggaggatcaattgagcctgggagggaggctgtagtaagccgtgatcaggccactgcactccagcctgggcaacatagcaagactctgtgtcaaaaacaagtctttttttacagctttaactgacatacagaggactacatatatttaaagtatgcaactcgattgttttgttttgttttaaagcaaaatcttgctctgtcacccaggctggagtgcagtggcacaatctcggctcactgcagcctccggctctggggctcaagcgatcctcccacctcagcctctcaagtagctgggaccacaggcgcacgccaccacgcccggctaattttttgtatttttggtggagacagggttctcgccattttgccaggctagtcttgaacttctgagctcaagctgaccctcttgcctcggcctccctaagcgttgggattacaggcatgagcaaaggcgcctggcctcagttatttttctaacctttatagcatgtttccccttaaaatgtgcttaagtacttttttattgtccctcttctcccactaaactgcagtttcctgaaggcaaaggttttctgtttccctcaccactgtgcaccctctgtatggatgtttgttgactgaatgaatgaatacaatgaaagaactggaggtaggaaataaagttgtaaacttggttagtaaaaggctatgcaatttaggaaaagttgactttaaagcagagggattttgggggtcctgtttcttctttcatttgtccatggaataatgtctaacatttattgagtactttcaagcactatactaagtacttcacaggtactatagaatttaactcccgagcaaccccatgggggtaatcaagctttattaacctcatctgtcaacagccatcaatggtggagagccacagtcaggtttaagtaggccgtatccaattaatccaaagtaatcgacaccccgtcagtcaacaatagctgtttcatcaacgtacttttcggagaaaccccctgaattccccgctttacctttctatcttgggaccgaaacctactcggcggttgctaacccttaagggagtttcctggagaatgtgagcacccttggtggaggagcagcagctgctcagatctagcaagtctgagacgaaccgagcaaggcaatctcaggactcccagagtgccggggaggaaggaagaaacaggtcagttggcgcgaactggattcttgtgcctctgggtgacgaaaggtgaagggattgtacgcttcgcccacgccagcctggggctcgggatctcctgacccgacggggaaccacggtgcgtttccccaactacaccgcacgtcacggactaaggcgacttagtcccgcccaccttcaccgccccattatcagtttggcgctaggaccccacgaccctcaactcggccctctcctcccactcgggccagatccggccttcgattggtgctcgcgggcgtgattcccgcccccgccccttccgtcattgccaagatggcgccggtcgcggtggccgcggaggctagagtcggagaaagaggcggaggcagtggcggccgcgaggggagggggagtcccgtctgactgagacggcaggcctgggcgggcgggcgggggtgccgcgaagggcggagcgccgggctggggatgagctaagcgggctcagagcgccgcggcattcagcccctcgtgttccgctaccgcgcgtgcgggattccggcgccgctctc

SEQ ID NO: 14148 - DNA, 2300 bp, Homo sapien
gtcatgcttgagactaaattaaacattagtgttcttttttttttttttgaggagtcttactctgtcaccaggctggagtgcagtggcgcaatctcggctctctgcaacctccatctccttggttcaagcaattctcctgcctcagcctcctgagtagctgggattacaggaccttagataaacttactatcactttatagcagtagagaaagcacggaaattggcactgtatttgttttctattgcttctataacaaattaccacaaacttggtgacataaaacaacacaaatttattgcttaaagttctgtaggtcacaggtctgacaagtgtctcattgggctaaaatcaagttgtcagcagggctgtgttccttctgggggccttatggaagaatctgtttccatgcctttcccagcttctagaagcctccagattcctaggctcctgggccctttcctccatcttcaaagccagcaagggcagattgaggtcttttcaagtcacatcactctgacctcttctgcctccattttccacttttttttttttttttttgagaacgagtctctctctgttgcccaggctggagtgcagtggcgtggtatcagctcactgcaacctccgcttcccgggttccagcaattctcatgcctaagcctccagagtagctgggactacaggcacccaccaccacgccagactaattttttgtattttagtagcgacagggtttcaccttgttggccaggctggtcttgaactcttgacctcaggtgatccacccaccttggcctcccaaagtgctggaattaaggcctgagccaccgtgcccagcccattttctacttttaaggaccttatgacaacactgggcccacccaactaatccaggataatatccctaatttaatgtcagctgataagcaaccttaatttcatctgtaacctcaattcccctttgccatgtaacctaacctattcagtctccaggaattgggaagtggacatcattggcagggggcattattctgcttgttataggcatacttgcccacaagtctaaatcgagagtttgcatataggaggtaggaggtgtgacaataattggataaaggcttttctggaatgacaaaattctcttcaaatacagggaggccctgcgacatgatatctggcaaatcacttgagtcttagtatccaaacttccgctaaaatggaaattaccatcctttgcttggcatgttaaatgaaatacttatgtaaacggacttagattagaggcctacaaataggactcaagttcttgatgaatcttgatgaggagggtgggcgaagtactctaaatgaaaatgagatagattgcgagatttccggagaggagtgagtgacaagcgcctacccgtgcatgaagctggaggtagaaaattccagcaaaaggaattttcaagtttcactgaagcttttgaatcaaggcttgaaagcccagggttaaaaaaaaggcagtgaagaagctcattaagacaaccccccgccaggtagcagatagcacctgaaatgcagtgggaaatttgtgaggtcttcataggcaaggattaaattttacatctccatcttaagatgtgtcatagttgttcaattacttagtgaccaaaaaagtgaattaaagatgttgtcaagattaaaaaaacaaaaaccaatgcaggttccaccgagatttgaactcggatcgctggattcagagtccagagtgctaaccattacaccatggaaccgccacgcatgtgtagctgccttcggctgtctaatcctcagagaaccccgcccccatccacaaacccaccactcacaggcggtcccgcctggttccagcgagccgcttccggcacggtagctcgagaaatgagcaagcggccactaagactatggtagctaggagttccaggactcagtttcccctttgagcctcctttagcgactaaagcttgaagccccacgcatctcgactctcgcgcacaccgcccttgttgggctcaggggcggggcgccgcccccggaagtacttccccttaaaggctggggcctgccggaaatggcgcagcggcagggaggggctcttcacccagtccggcagttgaagctcggcgctcgggttacccctgcagcgacgccccctggtcccacagataccactgctgctcccgccctttcgctcctcggccgcgcaatgggcacccgcgacgacgagtacgactacctctttaaaggtgaggccatgggctctcgcactctacacagt

SEQ ID NO: 14149 - DNA, 2300 bp, Homo sapien
tcgccagcagacctgagggcccacacctgtcctggctaccaccacatgcaggctctgtctgcaggaaggagccctgagctcagccatccatgacccagggccagggtggccctctgttctcgctgcatgggtctttatatccttattcctggaccttgtggagcctccagacccaccacctgcctggctagacagagcctcctcatcacccccatgcccttaatcccgcctgacccaagaggcatcacatggcttgttcctccctgtgcccgcccttccctggactgccctgtcccccagctctagccgcaagtcatcctcagactctggagagacattttgctgtcttgccagaaaccactttgaaatttgcaaactcttgcaaatggaatagtgaacagagagcaggaggaaatccccacaagtgccagtgttccccctgctctctcggctcccctccccatcctgagatgtccaactcacaccagcctaactgggtcttagttccacactttgccaaaccagcatggaagggcaggggtatctgggaaactctgccagtcccagagcctcctgtagaaaagcatttgggcttgagccccgggcactggctgctgaatttccgtctccctgggacacagcctttttccttctcacagattttcagagccagaaaggagcttgcagaccaccctggccaattctcctctatttcagacttcaccttcaggacagcattattgacttttttggtttgttttattttgtttatatatgtatggcttctattcccaaagagattgtagggttaagagatttctttttattccaagtgtctacaacagaataaagactcatacatataaaagatactagggctgggtttgaattcacattgtccaaccctctcatcttgctgacagggaaacggaggctgagaggaacatttggcctgcccatggcttcctgaccctgagcccaaccttcctctactttttgttgattgattgactgacttatgacaatatcaaggagcaggagcaccagacaaggtaggggtgggctccccaagcgttgtccctgcaggcccctgcatcacctccccaagagaggttgggaatttctcaggaccagtgtcctcctggacggtgtggagacccaacatcactacttctgatgccactggaattcttttttttttttttttttttttttttttttttttttttttttttttttttttgagatggagtttcgctctgtcgcccaggctggagtgcaatggcgcgatctcggctcactgcaagctccgcctcctgggttcacgccattctcctgcctcagcctcctgagtagctgggactacaggcgcctaccacctcacctggctaactttttgtatttttagcagagacggggtttcactgtgttagccaagatggtctcgctctcctgacctcgtgatccgcctacctcggcctcccaaagtgctgggattacaggcgtgagccactgcgcccggccggcactgtaattcttaaagatatctccaggagtgagggaattgggaccagccagcaggaagtctcaccatttctttcaacctaatgccagtctttcccccagacatttccctgggaaggaagaaagctttcattagtgaattggaaagacaggcttcagataccattaaacaatactttttattgcaaaagacagaaacccaacctaaggtttaggcagaaatggggatttgttgcctcttgtaactggaaagaacagaggtggatgttgcttcaggcccagccacaccaggggctcagatgatgttgtcagcaatctgtctgcaccttgcctcggttttcctttgtgttggctttgttctgaagtcttctcttcccaagtaatagcagagatacacaccaacagctccaggaccacagtctcccagcctaacagcccaaatggaagagaacacctacttacccaatgttcctgttggagtcccaggattgaatcccattggccagattgggtcacatgcacattccagaaccaatcgctgcgaccaggaaattgaatgatctaatcctaggggcctgggccctgtgctgtacaagggtagaatcaacctcctacaggaccacctacaggacccgagctggggaggggcggtggctttatgctgacaaaacaacagctgcccgttatcccctccccggtttagctccatcacaaccccacctccgtgtgcttaccggagtggccatgggctgtcttggaatgggcaggtgaaggat

SEQ ID NO: 14150 - DNA, 2300 bp, Homo sapien
aattgtgcttcggtgcattatgtggtttaatcctcacacagctcacagtactatcatcgttcccattttactgatagggaaacaggttaagtgactgcccagtgtcacagttagtaagtggtggagcaggcatacaaatttggcatctatgatacccacaaactgtggcacctcagagctggagaaaatcttagagaacatcgaattcagcctcttcatggtcaggtggggaaataatgccagcatgggggcggccatggaccaaggccagacagctggtgaacagcagccctcagatttgcctgcagtcgggactagggtgaggcagggaggctctgaggggagaatttaaggaggcgctcaccctcagttgcagactctgagggtgagcactccacgtgccccacccaagtctcagccttgagcagatgcttcttctggctttgtggtgtgaaccacagaggcccaggccgggctttattgacttaatttgatatcccaaagcgaggaatgaatagaatatttgtgcagagttttgctagcaccccaaagtagatttttacccaggggctgagcagaggttctgcttctggttgtacttctgtttctgcttctggttgtgtaccacagaaatttctggccccagaaattaggggtggaactatgagaatcctggtggtgtcgggccgcagcgtggactccatgggaacggagaccccacgtctctcctcccgcccgactccactgggctgaaacgaggaagtgccaggaaaagcttctaggggagggacttgctccatcagacccagaatggcccgggtgggctaggtgctcagacacacggacggacacacagctcccagtctcaggcattaggcctactttattcgcaaaaattcatctccccaggtgtgtataaccacctttccaaccctgggcctttccgctccagttttagttcaaggacaaaagagggcaaaccccacgagcaaagtaccctgccgccactcctatcccgtgtaagcaggagtcagcccacatttcctgggaaggggtaggaggtggaggaaagggggttccctgcaccactcttaagagccaggtctttacccctgtctggcttggcctcactaggagtgtcgtggggcagccaggcggccccaggtgctgtagcagaggaggaaggcttcctccccatggcccccgggacttgggcgcagaggcaggcaaagggacgggaacgagctgacgggcctcaggcgccctcgcacttcccgcatcagcgcaggagcccagtcctaggctgcgaggagcggtgggggtctcgaccttgcctggagtagacctcggcaagacaagttcattgccctcttctctttgggtctcagtttcctcatctcaccaggcacggctcagcccgacttgggtcttaacattttgagttctttgcttttcttgcccttttccttgccgggacgtttctcgagcccctgtcttgagtccctgtctccggccctacccctccctctcgaccttcggcctgttaggagcacggcctgggggtgcccctggctccatttaacccccagacccccactcccatccccgggatctcccatcgagagcatagaggaggaggcgcgcaggccgctccactcccccaggagggaaagggggagtagggaagagaaaggggagtagacgcgcgagaaggttagcaggaggagaaaatagaaaatagagaaaagagggagcaagaaaaatgaccaaaagaacgaaagtggggaggagggaggtgagatgctggaaaaggatgaatgggagaaaaaggagaatccaaaggcaagctgaagagagagactgaagacaggaaaaagaacgaacgagcgcgcgcgtaacagcaggatctgaaaggaccaaacagagagaaagaggaaaaaaatgaggggggtgtgcgggagagcggagggagggagctgcgagccgggaggaggaaggctgggagggaaggagagggaggggccgagggacgaagcgggtgggggctggctcggcagcagccgccgcggctccagccgcccgctcgctcgctcgctcagtcgctcccggtgcccgctgcccgccgcccggctcccggctgctcgcggccccctgctcctgcctggcgctctggccaggctcgggctccggaggacaggaccgcgcgactggccggccgatccctgggccggccgcgggagcaggtaggtggctgagtggggaccgcgaggacgcggagtctcggacgccgggggcaccag

SEQ ID NO: 14151 - DNA, 2300 bp, Homo sapien
caggcgtgagccaccgcacctggccaagtcactgagatttttaaagttgcatattaccacagcataaactggcttattcttacaagtatagacactttttttcaggcaagaggcatcagatggcctgtgaggcaaaccaaccaaccaaccaaccaaccaaccaacaaaaaggcactcttgtccattttagctcattagttccaagaattaaggaatcatgctttttaaaacataatttatacattatcgccaaaatgcaagcaaaagaagtgcttaatggaccttgaattatttaaaatactaataaagccaactttcaatagaactccagacacactctcttccttaaaagatcatttgacccaatttgaagaaagtttaaagctaccaagtgctaaaaagcgatgtcatgggcatattagtatctaatcaacacccccccccccccataacctggtataatcagaaataaaagaaaaatgaacgtgagggagctttgaagggaactgtggtcagctgcctggaacatatttatgtaggggacaaatctggcaacttgactgtcctctgggctgtccagaactgacctcctgaattagggacagcctcctgcactgctggttgccttacaggccagctctgtgctgttttcctaattcgtgcaattccacctcagatctcattcacatcagctcacactgcagggtaacttgacatggaagtacaatgagtgggagatcgtggctctctttcatgcattcctgtagagtgacaagagccatccaacagagcatcctcagttctgcctgcttcagcatcacaggaagtctgatgtttccagccagctggttgagctgccttaactggagctcaccaagcagactataaagtctctaaatgcaggacctgtattttactcatctctgaatagcacggtaattacttctgagcctccttggaattcagtcagattctggcttgaatattgatcccaccacttaataactgggtaaccttggccacttaacttccctaaccctgttttatagtctataagataggaatgataatgccccactcctttgacttgttgtggaaattaaatgggacacgtatacaaagctgctagtgcagctcaaaagtcttagttgagtgcttggaagaagagtggattctatcccatcaagggtgtgtgatctcagaagagactgtgtgcatctctttatcaagagctacaggctgggcgtggtggcttacgcctgtaatcccagcactttgggaggctgaggtgggagaatcacttgagcccaggagtttgagaccagcctgggtaacatagtgagacactcccatctctacaaaaaaaaagaaaagaaaagaaaagaaaaaaacgctaggcgtggtggagaagatcgtttgtgcccagaagttcgggggctgcagtgagccatgatcatgcactatactccagcatgagtgacacagcaagaccctgtccaaaaaaaaaaaaaaaattaatacaaacatgtacgtttgtgattgtgtcacagtggcagtttaaaggagaaatcctttgccagaggctgcaaaagctataaaagttggagtggaacagtgcttcaagggaagagattggttttcattttatctgcattgtttgattatataagtacatgataacttcaatagggataccaaaacaaataaataaattttaaaaagaacatgaaaggccaggcgcagcagctcacacctataatcccaacactttgggaggccgaagcaggtggatcgcctgagaccagccgggccaacagagcaagacctgcccccctcaccctcccatctctacaaaaaaagaaaaaaactttaaaaaaagtacatgtaattttaaatgaatataactttttagaaatgttcggctggcagggttgccggcttatgtgctgagtcttttacctcgtttggagatagcgagagcaacgaagagaaaacattaattacccggtattagtattaatacggcggctccattcccacatggacctgggggggacaaacaaagtctcctaatcttggacagctgcgcccagcccttcttcacctgccgtccaggtatcatcctagtcttccctccgtctctggggtaggtcgtttccacccctccgccctggtccaggccactgagggaagggaagaaactaaggccgggagggccgggccccagcctggagcgtgtagctccgggcctcccccgggcgcggcagttacggcggttccggagccgcggcgcctagggc

SEQ ID NO: 14152 - DNA, 2300 bp, Homo sapien
taatggaccttgaattatttaaaatactaataaagccaactttcaatagaactccagacacactctcttccttaaaagatcatttgacccaatttgaagaaagtttaaagctaccaagtgctaaaaagcgatgtcatgggcatattagtatctaatcaacacccccccccccccataacctggtataatcagaaataaaagaaaaatgaacgtgagggagctttgaagggaactgtggtcagctgcctggaacatatttatgtaggggacaaatctggcaacttgactgtcctctgggctgtccagaactgacctcctgaattagggacagcctcctgcactgctggttgccttacaggccagctctgtgctgttttcctaattcgtgcaattccacctcagatctcattcacatcagctcacactgcagggtaacttgacatggaagtacaatgagtgggagatcgtggctctctttcatgcattcctgtagagtgacaagagccatccaacagagcatcctcagttctgcctgcttcagcatcacaggaagtctgatgtttccagccagctggttgagctgccttaactggagctcaccaagcagactataaagtctctaaatgcaggacctgtattttactcatctctgaatagcacggtaattacttctgagcctccttggaattcagtcagattctggcttgaatattgatcccaccacttaataactgggtaaccttggccacttaacttccctaaccctgttttatagtctataagataggaatgataatgccccactcctttgacttgttgtggaaattaaatgggacacgtatacaaagctgctagtgcagctcaaaagtcttagttgagtgcttggaagaagagtggattctatcccatcaagggtgtgtgatctcagaagagactgtgtgcatctctttatcaagagctacaggctgggcgtggtggcttacgcctgtaatcccagcactttgggaggctgaggtgggagaatcacttgagcccaggagtttgagaccagcctgggtaacatagtgagacactcccatctctacaaaaaaaaagaaaagaaaagaaaagaaaaaaacgctaggcgtggtggagaagatcgtttgtgcccagaagttcgggggctgcagtgagccatgatcatgcactatactccagcatgagtgacacagcaagaccctgtccaaaaaaaaaaaaaaaattaatacaaacatgtacgtttgtgattgtgtcacagtggcagtttaaaggagaaatcctttgccagaggctgcaaaagctataaaagttggagtggaacagtgcttcaagggaagagattggttttcattttatctgcattgtttgattatataagtacatgataacttcaatagggataccaaaacaaataaataaattttaaaaagaacatgaaaggccaggcgcagcagctcacacctataatcccaacactttgggaggccgaagcaggtggatcgcctgagaccagccgggccaacagagcaagacctgcccccctcaccctcccatctctacaaaaaaagaaaaaaactttaaaaaaagtacatgtaattttaaatgaatataactttttagaaatgttcggctggcagggttgccggcttatgtgctgagtcttttacctcgtttggagatagcgagagcaacgaagagaaaacattaattacccggtattagtattaatacggcggctccattcccacatggacctgggggggacaaacaaagtctcctaatcttggacagctgcgcccagcccttcttcacctgccgtccaggtatcatcctagtcttccctccgtctctggggtaggtcgtttccacccctccgccctggtccaggccactgagggaagggaagaaactaaggccgggagggccgggccccagcctggagcgtgtagctccgggcctcccccgggcgcggcagttacggcggttccggagccgcggcgcctagggccgaggggcgggtccgaggccgcggccttgcctccgccgcgcccgccactccgcggccgccgggagacacgccgccatgctgcagaagcgggagaaggtgctgctgctgaggaccttccagggccgcacgctgcggatcgtgcgcgagcactacctgcggccctgcgtgccctgccacagcccgctctgcccgcagcccgccgcctgcagccacggtcagggccggggcgggggcggggacggggccggcgggagcgggcggccgcagtgagggg

SEQ ID NO: 14153 - DNA, 2300 bp, Homo sapien
tgctcagaaaatcctggttacaccttgggattacagaattcccaaaattcgaattagcactcagcaagcagaaaccctccaggtagttggcattctacctctactatgggatctctacgctttctccttctgtctttaccagctttttagcagtaccagaaagcattgttaattcctttgcatataaagaaataaattattgatggcatctggcattccaagatactgggatgtgttttttggggtttttttgttgttgttcttttgtttttccaagacagagtctcactctgtcacccaggctggagtgtagtggcgtgatctcagctcattgcaacctccacctcccgggttcaagcagttcccctgcctcagcctcccgagtagctgggattacaggctcccgccaccacgcccggctaatttttgtatttttagtagagatggggtttcactgtgttggccaggctggtctcaaactcctgacctcatgatccaccacctccacctcccaaagtgttggaattacaggtgtgagctaccatgcccagccgtgtttttatgttttttaattctttttttgtagagatggggtctcactttgttgcacacgctggtcttgaactcctgacctcaagcagtcctcctgccttggctccccaaagtgctggaatcacaggcatgagccactgtgcccagccccaagattctgttttttaaaaattctaaatatatgaaaaccatccattaagtagtctgtggttaataaattcaggccagagagaaattgtcctagaaagagctgtgtaggacaaccagagagaacatacattatccagctgtccaacatagaaactttctatagatacactttgccaacactaacaagctttcctccagcaagcaatatagaaatacgatcactctgccctgtagggatgatgtagtggtacttcacagaattgattatccataaaggaatatagcactggagagaagacataaacaagaaggttagaaattaacctttacttgtgtcaaaaagtatgggcattgcccaatttaattccccctgatattttacagtttgtaaatgagacactaaagcaggatgtccccagccagtaacctagccattgtgcttttacatcttgaagccttatgcaggctctccaggccagttgcacctaatacattttccattcccatggtttgctggaattttggggtagtggggattcagtttacacgacaccttcttctccaccaaagaccatcttaagaggtcttcaaagagaccaggcgcagtggctcatgcctgtaatcccaacactttgggaggccgaggcaggtggatcacttgaggctaggagttcaagaccagcctggccaacatggtgaaaccccatttctactaaaaaaaaaaaaaaaaaaaaaattaggtgggcatggtggtacacgcttgtaatcctagctatgtgagaggctgaggcaggaggatcacttgaacccgggaggcataggctgcagtgagccaagatagcaccactgcattccagcctggttgatagagcaagactccatctcgaaaaaaataaaataaaataaaatagacttcaaagaaattaggaactacctcccacacacaaaacattaagattgttgttttaaaacttaatttggagcatgcataattgagttttcccctagtgttgcaagcgttaactagaatatattacagttaactagaatatattacggctctcttcagcagactaaaatttccagccctcttcattgatgtagagaggtaatgcctcccttcaaagcattgggtcaagcatttcataccatctggcaatttagtaataggaagaatgaaaaacaaaaaaaaaaccctaccatacaccactatttgcacctggccactctccttggaacccagtattgtttgcctcttgtttgtttgatgcctctaattgacccacttaactcctggtgctcagctgtgttttattttttccttttgtgcaggacttcagggtggtcgtgcgcatcgattcctgggagtcaacatctgtgtatccaaatggacattttgtgcgtgttttaggaagaatcggagatctggaaggggaaattgcaaccatcctggtggaaaacagtatttcagttattcctttctcagaagctcaggtcagattttccagaaggctttgatctagtgacattttctttttgcttttgttgttgtttcatcattaagaaagaaaagtctttgtgctgtggaacaacccact

SEQ ID NO: 14154 - DNA, 2300 bp, Homo sapien
tcataccatctggcaatttagtaataggaagaatgaaaaacaaaaaaaaaaccctaccatacaccactatttgcacctggccactctccttggaacccagtattgtttgcctcttgtttgtttgatgcctctaattgacccacttaactcctggtgctcagctgtgttttattttttccttttgtgcaggacttcagggtggtcgtgcgcatcgattcctgggagtcaacatctgtgtatccaaatggacattttgtgcgtgttttaggaagaatcggagatctggaaggggaaattgcaaccatcctggtggaaaacagtatttcagttattcctttctcagaagctcaggtcagattttccagaaggctttgatctagtgacattttctttttgcttttgttgttgtttcatcattaagaaagaaaagtctttgtgctgtggaacaacccactgtgtgaaggcacagataatggaaaaatctcaatcctctttattctatatttggaccaaactgaagtcagcttcaagtgtagaattagttttctatagcctcatagctctcaaatttttatattttccaactgggcttaaaaatgatatgtcagtgtctcatagtcagtatacatccatccccagcaactacaaggacacctagttacagacccaactgagctccacactctctgtccaaatcattcaaccagaggctgcataaagctgcagggggtggattcctgggatccatacatctccaacccatgggtcaaaaattatgctcattatgaaacagtttttgtgacctttacagaaaacaaaaatctcataaacataaaacatcagctatttccatcactttatgatcttttaaaaccctcataaatcttgtgtattattcttgaatgactatattcattgtgtgcacacactaatttctgttctgcttctttcacttaaaattatttttatatattgacatagcctacttattttaatggttatggtaaattacggtatattgacgtaccctagtttgcttaagcatttcttgatttttgggcattcagctgtctaacttttcagtgttataaaaaaatgtaggccaggcgtggtggctcatgcctgtaatcccagcactttgggaggccaaggcaggtgaatcaccaggtcaggagtttgagaccagcctggccaacatgatgaaaccccgtctctactaaaaacacacaaaaaaagtatctaggcctagtggtgggcgcctataatcccagctactcgggaggctgaggcaggagaattgcttgaaccagggaggcggaggttgcagtgagccgagatcgcaccgctgcactccagcctgggtgacagagcgagactgtctcaaaaaaaaaaaaaaaaatgttactttgaacatttttataaacaccgctttttaatttctttttgatcattctcttggaatgtaatccttaaagtgagattaccaagtcaaagggtataaaagatttaaatagcttctaatatgtacaagcagattgttctccagaaaaattggacccatttgcattaccataaggagtgtctgggtgttcttattttcattaaagtttttcacagaacgggagctatcatagtaaactattttagaatattttacatcattaaatttttatatttaacattagtttctggaaattatttgttgacttgtttggcagctcttagtgaaaatgttacaataaaataaagtgtgggctatacatcataggactagaattttctcttcccttttagcctacttaactgcaaattgatggcttaaacagataataatggagagaaaatgccctagataggtcctgtataaaattatctttaaggggtaagcttttaatatttggaacatgttgattatttttttcaaggcttaaatttaaagcttgactacatttaaacaaatggatcatttgaaaatgggctacatgttgtactcttgttccaagcccctgtaactaaagaggctggtagaagttgtgggacattttctgtccaactgtaagggtcctcaggggtgtaggactttgtctttcttgttgactcctgactttccagagcccagcacagtacctgggatatctgaggcacctagtaaacaattattgatcaaaggaagccaacataggttgatgaagaaggtaattgagaatgaatgaatttctatgtggtcatactgagaatattagtgagtggatttttacagaaatttgtggtgcatgaattgctgaatatttggtttctca

SEQ ID NO: 14155 - DNA, 2300 bp, Homo sapien
gattacaggtgtgagccactgcacctggcttcactttttaaatttttaataaaatgtttcaagctacagaaaagtagctgggtgcggtggctcacgcctgtaatcccaacaccttgggaggctgaggaggggaggatcgctggagaccaggcgttggagaccagcctgggcaacatggcgaaactcccatctctacaaaaaatttaaaaaattagctgggtgtggtggtgcgagcctgtagtgccagttacctgggaggctggggagggaggatcacctgattctagctgtgatcgcaccactgcattccagcctcagcaacaaagtgagaccatctcaaagaagaaaaaaaaaaaaagacagagagaaagaaagaaaagtggagagaataatgctgccagtattccctaattatcttctaggtttggcaaatcttaatgatgctatatttgcttcagataacatttttaaatttagttttttgaatagttaatacatttgtatgttcaaaaaaaattatagttaagttcccatcccactctatcccatatgccactttcattgcataggttctagttatatatttttctgaggttgtgtgtgtatgtttgtgtgtatacaaacaaatacaaatatatttggacttactatttaaaaatggaaaagttaactttttaaaaaatgttttttctttttaatagagacagggtctcagtatgttgcccaggctggttttgaattcctgggctcaaacaatcctcctgcgtcagcctctcaaagtgctaagattacaggcatgagccaccaagtctgaccaaataactttttttttttttgagacagagtcttgctccgtcgcccaggccggagtgcaatggcatgatctcagctcactgcaacctctgcctcccaggttcaagtgatactcctgcctcagcctcctaagtagctggaattacaggtgcgcgccaccacgcccggctaatttttgtatttttagtagagatggggtttcaccacgttggctaggctggtctcgaattcctgacctcgtgatctgcccgcctcggcctcccaaagtgctgggattacaggcgtgagccactgcacccggccccaagtaacatatttttgacatttttttttgtttacattcacactctctcgcttttttttttttttttttttttttttttgcgacaagatctcactgtcacccagactggatctccagctggatcgccagcagtgcgatcctagtcactgccgccttcaacttctgggctcaagccattcgcctgcctgggcctcccaaagtgctgggattacaggcgagccacaccgcacctggccagtgtctatgttcagccctatttttcctctctttaccacctcttttctcagcttattattcaataaacaattcataaaactctgagttcgaagcattctgctatgaactctgaagaagcggtaatttcttattcactattgcttgcctctgtcctttttcctcctcccacaactcagttttccaaaaaccgagacctatttccaaggtttaaagtgccgggcacagtggctcacgcctgtaatcccagcactttgggaagctgaggtgggaagatcgcttgagctaaggagttcgacaccagcctgggcaactaatccccgtctttgcaaaacaaacaaacaaacaaacaaaaacccattaaaacaaaaattcggtgtggtggtgttagtcggggaagggaggctgaggtgggaggatcgtttcagcccgggaggtagagactgtagtcagccgagatcgaatcactgctctccagcctgagtgatagagcgagacttagtctcaagaaaaaaaaaaaagaaaaaccccagaataacaagtattaactttatgcaaataaggaggcttaactgagttcctctgaagaattcagtagggcggaaattgtgggaccgaaggcgggaccggcgtgctgggcggaacctgagaggcgggttttgcaggctccgcccagccccccgcacggatttggcgccaaacgctgcgggcccttctcgccccaggagttcccgagtatcgcgagaagcgcgcttagtctgcacgccgaggtccgcgctgtgtcccgtgttttctgcgtgaggtgagagctggctggcgggccaatgaagttcttgcggggagaggggagtcggactagccagggagccagatggaagagccagggagccagacagactagcgggaaagcctaattgtcgcaggaagggggtcaggaggttggggggtc

SEQ ID NO: 14156 - DNA, 2300 bp, Homo sapien
agactttgtgtaggactgcctcccaggtgttcaagccctcttcattttctcaggttcctcagcctccttacctgctaggtcaccaacacctggctgtggataaccaggtgtagatgtttcctttgttctgtacacgtttcctttgttctgtacacctaatgtctttgacacttagtattttaggatgggaaaggggaagaggaacactgaatgtgcacttttaaatgggtattgtgcctcttattaagctctttattcacatcttatttctttagtaattcacagaattggaatttttggattaaagttctttttttttttgagacggggtctcactctgtcgcccaggctggagtgcagtggtgtgatcttggatcactgcaacctccgcctcccgagttcaagcaattctctgcctcagccccccaagtagttgggattacaggcacccgccaccacgcccagctaattttttgtatttttagtagagatgggtttcaccatcttggccaggctggtcttgaactcctgacctcgtgatccacccgtctcggcctcccaaagttctggaattacaggcgtgagccaccgcgcctggcctggatgaaagtttttttaaagggagtcttgctctgtagccctggctggtgtgcagtggtgtgatcatagctcactgcagcctcaaactcctgggctcaagtgatcctccagcctcagcctcctcagtagcttggacgacagctgcacacaaccatgcccagctaatagagacgggggactcactatgttgcccaggctagtctcgaactcctgggctcaagtgatcctcttgcctgggcctcccaaaattgggattacaggcgtgagccaccgctcctggcccgaaagagtgtttttaaggctttaaaaaaatattgccaacatggtgaaaacccgtttctacaaaaatacaaaaaggatccgggcatgacggcgagtgcctgtaatcccagctactcaggagactgaggcaggagaatcgcttgaacgtgggaggcagaggtggtagttagcggagatcgcgccactacactccaggctgggcaactgagggagacaccgtcttaaaaaaaaaaaagttcccaagtctaaaaaaaaaaaaatcatcaatctgctctcaaaaactgtcgcaacaatttacaatctcatcagcactgagtatccatttccttgcacccttctcagtagtattaccattaaacaaacaaaatttatatgcgtcagtttgttgggctcaaaggagcctctcgacaagtttcctattccccacgctgcctctcctctggacacaggaaggggtccttttccttatttattttgttatttcattttcgtcaacacggctcggcttggggacaggggtcgggggcaggccggttaccgcagaggtggaggccgcgcggcacctggcctggagagctcaccacacagcgacacagacttcttctcagctgggtccacctgcttgcctcggggcgacagagggcgccacggcgtccgcgacggaccccgcccccaggcagtgcgccgcgctcccgtgacgtatttccgcgtcatctgccgccgaggcttgcccccattggttgtctgcgaggcaataggggcggagccgagtgggagtgtggaaagcgccgcatcccgggtgggaggcgaggcttccccttccccgcccctcccccggcctccagtccctcccagggccgcttcgcagagcggctaggagcacggcggcggcggcactttccccggcaggagctggagctgggctctggtgcgcgcgcggctgtgccgcccgagccggagggactggttggttgagagagagagaggaagggaatcccgggctgccgaaccgcacgttcagcccgctccgctcctgcagggcagcctttcggctctctgcgcgcgaagccgagtcccgggcgggtggggcgggggtccactgagaccgctaccggcccctcggcgctgacgggaccgcgcggggcgcacccgctgaaggcagccccggggcccgcggcccggacttggtcctgcgcagcgggcgcggggcagcgcagcgggaggaagcgagaggtgctgccctccccccggagttggaagcgcgttacccgggtccaaaatgcccaagaagaagccgacgcccatccagctgaacccggcccccgacggctctgcagttaacgggaccagctctgcggagtaagtatggggcgggcggtgaacctcggggcccggctggggaggcccgagccggggag

SEQ ID NO: 14157 - DNA, 2300 bp, Homo sapien
aggaagtcaaattgtccctgtttgcagacgacatgattgtttatctagaaaaccccatcgtctcagcccaaaatctccttaagctgataagcaacttcagcaaagtctcaggatacaaaatcaatgtacaaaaatcacaagcattcttatacaccaacaacagacaaacagagagccaaatcatgagtgaactcccattcacaattgcttcaaagagaataaaatacctaggaatccaacttacaagggatgtgaaggacctcttcaaggagaactacaaaccactgctcaaggaaataaaagaggacacaaacaaatggaagaacattccatgctcatgggtaggaagaatcaatatcgtgaaaatggccatactgcccaaggtaatttacagattcaatgccatccccatcaagctaccaatgactttcttcacagaattggaaaaaactactttaaagttcatatggaaccaaaaaagagcccgcatcgccaagtcaatcctaagccaaaagaacaaagctggaggcatcacactacctgacttcaaactatactacaaggctacagtaaccaaaacagcatggtactggtaccaaaacagagatatagatcaatggaacagaacagagccctcagaaataatgccacatatctacaactatctgatctttgacaaacctgagaaaaacaagcaatggggaaaggattccctatttaataaatggtgctgggaaaactggctagccatatgtagaaagctgaaactggatcccttccttacaccttatacaaaaatcaattcaagatggattaaagatttaaacgttagacctaaaaccataaaaaccctagaagaaaacctaggcattaccattcaggacataggcgtgggcaaggacttcatgtccaaaacaccaaaagcaatggcaacaaaagccaaaattgacaaatgggatctaattaaactcaagagcttctgcacagcaaaagaaactaccatcagagtgaacaggcaacctacaacatgggagaaaattttcgcaacctactcatctgacaaagggctaatatccagaatctacaatgaactcaaacaaatttacaagaaaaaaacaaccccatcaaaaagtgggtgaaggacatgaacagacacttctcaaaagaagacatttatgcagccaaaaaacacatgaagaaatgctcatcatcactggccatcagagaaatgcaaatcaaaaccactatgagatatcatctcacaccagttagaatggcaataattaaaaagtcaggaaacaacaggtgctggagaggatgtggagaaataggaacacttttacactgttggtgggactgtaaactagttcaaccattgtggaagtcagtgtggcgattcctcagggatctagaactagaaataccatttgacccagccatcccattactgggtatatacccaaaggactataaatcatgctgctataaagacacatgcacacgtatgtttattgcggcactattcacaatagcaaagacttggaaccaacccaaatgtccaacaatgatagactggattaagaaaatgtggcacatatacaccatggaatactatgcagccataaaaaatgatgagttcatgtcctttgtagggacatggatgaaattggaaaccatcattctcagtaaactatcgcaagaacaaaaaaccaaacaccgcatattctcactcataggtgggaattgaacaatgagatcacttggacacaggaaggggaatatcacactctggggactgtggtggggtcgggggaggggggagggatagcattgggagatatacccaatgctagatgacacgttagtgggtgcagcgcaccagcatggcacatgtatacatatgtaactaacctgcacaatgtgcacatgcaccctaaaacttagagtataataaaaaaaaaaaaaaaagaaaaaaaaaagctaaatatagaaagccacctgctttctaattgtactggctgccatcttgtcttctttctactgacaagaaagtatcaataagaggtagtgattggtttgagggggaaacagtttttctaccagtttagtccttaatctgtggcttcttaagacctctgagttccatgttagaatattttaatgtattagtttctaggaaataggagtagctgaaaggagaggaggagtgaacattcttaagcatggagttatgttctaggctgcgattgacatatgcagtctaccactatgcaaggacgaatgaggtcagtgttgtagga

SEQ ID NO: 14158 - DNA, 2300 bp, Homo sapien
tgttcagaacaaaatttcctctgaaatactgttgagaaagtctgtcatttgcaaaaagagcagagtttaaatacaagccagtctttccagtcaacaatgcctctttgaagaaaaccaattaaagactgtttgcatgccgctgaacccttgtgagcagttaggacacagtctaggacagaaagatgacaaggggaaggactgagggccgtctgagagcacaagctgtttctacctctcagaggcattgaaatattgcatgctataaactgctttgtgtatctgttaccacctctcacttgagacatcactcactggtaaaatgttttataaataaatttataagtagccatcatggagcctgctggtttctagatagcgacagagagaagcagcagttccttctctgaggaaaagatacaacaggatggtttgaaatccatttctggtccttaagagagatgtgccatgcttggaagactggattttttgttttgttttttgttttgttttgtttgagacggagtttcactcttattgcccaggctggagtgcaatggcgcgattttggctcactgcaacctccccttctcgggttcaagtgattcttctgcctcagcctccagagtagctaggattacaggcatgcaccaccacacccggctaattttgtatttttagtaaagatgggatttttccatgttggtcaggctgctctcgaactcccaacctcaggttttcctcccgcctcgacctcccaaagtgctgggattacacacgtgagccactacaccaggccggaagactggatttttgttaacagatgacagttacagaataagagtttttacttagtatctgaagttgaggttcatttctgcatactgtcccttttccactgactaccatgaaataagtagttgcttaattttataaaattaatttcccctgcccaagcaacagtaaaagccaaacaaaacacaaagaatcatgtcaagcagaacttatgtaacagttcccaaagaaaacaaagaatactttttttgttaatccacatttcattgaagttattttgagctgcttttagaggaaacagccagaagtttaaatgagcatgttccttagaacacacaatgggaagacagtttgggaacaaaaagcatcaaggtacataaattttgggggtctaatttaaaatatgagcatgagttttaaaagctggaaaacttgactatgaattccagctctaccacaaactggtcacttgtcttctcacctctttgcaactcacgttcccatctgtaaggtgaagatactcacatctgctctagcagtttcacaggttgctatgaggtgctaatgagatcatttaaaaatccaactatcattggtatctcagtaagaatctggcattgggagctcaaaacactgcaagattcatgcggggatcataattcttggctaaaaattaaaaaaaaaaaatctaaacacccctcaaaagacactgagcatgaaagtggtcagatctaggttttagataccaggttataacatttcttctaaggatgtagtattctcattttaatgaaacattctcagtagtggtggtatcctgtcatttgtaaaagacacacagtgtaaatgttaaaacccagcctaaatgtttatatgttgaaaatgtataagttaaactgttgacttagaaaagctatacttcacagtgagagaaaaaaaagttgactagcttaggcagcagtatatacaacactgatcatttttttaaaatcctggcaatatcccaagctctggtacctctagattggactacctacttagaagattatttacccaagttttgtttttaatctaaaaaggaatgggccttttatttataaatatatatgttggctttagtttctgtaacctgccctttcaaagaaaataatgagcggagaggtattgaccagcagcctcaaatgtacctaaaagaagttcccaatggctttgtgacatcactgccacctcacaggcatgacaaagccagcgccaggcacattcctcctttccaggaaggtgtggttaagtgtaagtggtgaaagaagggaaaccattgcttaatgtcgcaaaggagacagactgtcctatgttgtgcagaaagctcccacaccaggtaggcaagctggccaccagcaaggccctcctatgagcatgacagcctaaaagtgcaggcaggccctcagctcaactattggtatatggaaaatgagaaatgttctgtgagataagaaatgttttgtcatttt

SEQ ID NO: 14159 - DNA, 2300 bp, Homo sapien
cggctaatttttgtattttcagtagagacggggtgtcactatattgttaggctggtctcaaactcctgacctcaggtgattcacctgcctcggcctcccaaagtgctgggattacaggcgtgagccaccgtgcccggctggtttgttttgtttttgtttttctcttcctgatacattaagttcttacagggatttgattcttactgttttctgcctaatttgttgcagcacaagctccgggtggataaggcagctgctgcagcagcggcactacaagccaaatcagatgagaaggcggcggttgcaggcaagaagcctgtggtaggtaagaaaggaaagaaggctgctgttggtgttaagaagcagaagaagcctctggtgggaaaaaaggcagcagctaccaagaaaccagcccctgaaaagaagcctgcagagaagaaacctactacagaggagaagaagcctgctgcataaactcttaaatttgattattccataaaggtcaaatcattttggacagcttcttttgaataaagacctgattatacaggcagtgagaaacatgacttggtgtgctctgtaaagcttggttagaatttttttaaagtgacattttgttggccataatttagactgttacattttatatagtgtggtataaaatggggcatggatttatactaagtccatggagttcagtggaaggggaatgatttaaaaaaagttgtggttttctaaataatgtggcttgaaaaataggtgtaacaggacttggtcagaaacgcagaggctgttcaagtttagctccccaccagatggaaaataggttaaattctgtaaagatttaactttaaccacaagagggcacaactggagagcacaatttttttggtactgcagtaaaattgattacctcttgagaagtgttctttttaaccagctataacaatagagttgagtattttcacccatggtttgaaaaagtgccagaaggccacactggcccacatctgtaatcccaacactttgggaccctaaggtgggcagagcacttgagccaatgagttcaagaccagcctggtcaacatgatgaaatctcgtctctactgaaaatataaaaaatagccagtcatggtgcatgcctgtaaccccagctacttggaggctgaggcaagagaatcacttgaacctgggaggtggaggttgcaatgagccaagattgtaccattgccctccagcctgggcgtcagagcaagactctctgaaaagtaccagaagcatttttcaggactgcctgtgtgtcttggtgattatgttaaccaactgtgttcaaaagaagtacccatgaaatgcctccagatataagggtgtttttttttacccataaagctaaactgcaaatattaccctagaattaacctcttgtcctgtgtcaaaagtcttgttttgcatctggattgttaaactgtcagcttctctctgacagtctcgaactgtcaagacagtctcagttcacagccaaggtgatctgttaaccctccccatttccagggccaaatctcagttcttaagcacgtcgtttcttagcacggctttattttcatgctctttatttctctattttgtgcagccttacccctttaaagtccactgtgagtcctaccctgcagggcctcttaacacagtagagttcatgtgctactgatttggtgcctgccttcaaacacatgtgcaagttttgtggggttaaagatagccacttggtggcacaccacattggaagtgctgttcacccggtcatttgaaacggtgtttgaccacttggtgcgcaaatggcctatcggattaaaggatagccaaacccaagatttcttcaggttctttacagctccatggatctaatttcaaaatcctgatcattactcatgaatcaaggtgttttgacacaggctgtaccccttcctgcagctcgtcccccgcggagtggccaggctacggcgggcgccggaagggggcgcactcctcgcctttcctcaatgtgtcgggcagccccgcctccccgctcggtttccgggagtcggcggcgatggcgtcatcaccgagtgccgggccgacagcagcccggaggttggctatgtgaccaggcaacatgctgagccggcttcaggaactgcgcaaggaggaggagacgctgctgcggttgaaggcagccctgcacgaccagctgaaccgcctcaaggtgaccccgcggccctctcctgcccctcctccattcctcccgagcgaccatttccccccaa

SEQ ID NO: 14160 - DNA, 2300 bp, Homo sapien
aaccagacccaggccgctaaattccatcagagatgaccagtcttaggtagtgaaacaaaggatacgtttccaaaagcaccctggccagagcggtgagtcccaccacctcgaactctgggaattcgagccacagctctgccagtaccccaagactcagcactagtctgatgacctaaaattgagaagagataaaagttgtagctgcttcatcatacataccaacccatgactattatgcatggtagcaaacagcatcagaacatccgagaaaatcatgtggttcagaaacacggaccaatgaagtggaatttcatcactactgtaaagcagtccctaaaatatctgcagaagatataaatccatacctgctaattcactgacagcatagggctgtctgttgtttttgcgcaagttggtgtgaacaaagttcacaatatctggtcgaataggagccttgaatacagcaggcaaagtgacatttttgccagatgactcccccttttcggagtacaccgatatcagtgggcgagcacacgcctaaagaaaaagacaaggattatttttattgacaagtaatgtttgaagcaaactcttctcatacgccaacaataccattaaatactcaattgcagaagagactggtatggtgaggcaaacaacccttaaaccaaaatagcagtaaatgactagaacccttagaatctcaacctctactgcacaattttattttcaaaaagaattgtttatcataaaactttcaaagcaagccttataaagcacaatagctaaatcaaaaccatattgtaaggtttggagatgctgtttaatgccaattaatcagcaaatcctgtctacccgggctctactcatcccaacttccatccctgtcccactcaccctcaccctctactaaacacgtgtttccaaagctcaccagtggaaagactggtgatattactttttgtttaaacctccaagtcttcccaactgtgagtaaactgaaaatcctgaggctgacctacaccatcttctctacttctgatctcaactcccatacactcttccagatatttttcggtctcaggaccacccagcacttgcctcagactttccaagtgttcactctaaagctcctctttgccagctttctcacatccttcaggccactttaagctttctctgatcactgtttaaagccaaaccactcctattccctatgttttcatctcttactaccatagaatattactacgtatttagtccaacgcaactaccatcccagtcaggacagtgtctgttttgttcgcttaactcccccggcacacaacactacatagtatatacgaacactatttgtggaaaagcagtacacatataacactggtcttattacgagttggctaaggattcaaagattttgataacaccgaacaatttttaggcgaagagaaccagaaagcttttaatagaaatgattcccaagctaggcagagacaagcatccagaaaaaggctaaataagcaaatattctaacagaaggtcccactgctcctgagaacgacccagtgctttccactactgcttcccggcgcgtcctgtgctgggaaccccacgttgcctctaagatggctgccgtatcgccgcacatcccagttccacaccagaaaaagacgcctttggtcctcatctccctctcctcgctctatctcctacagattctatgctccgaaccccaaatccttccttactggccccgagatacggggtaaggccagccaagagaacttccactcaccatggcggagagaggagacagccacgctcctctcagcccggctgctgccacaggaaaaggaagtgcttaccactcccgctgtatatgtcaccttccccttgaccgccccaccttgccccgcctaagaaccaacacggatacaaaaaatatctctctaccacactacaaaagtaaaaacgagagtgttatttctttatttgtgggaaattacggtatctattttcttccaaacgtaataataattcttagaaaatagggactcctttttgcggaataatccatagggggcgaggccaactctcgcgagtcgaggtatcttctccccaaccactgctcttattttaattattgcagacggaagttgaagactattgacatagtaaatagctctgggtggcttgaaacgaaagtttaactttgcggacaaacaggacttattgtagggggtggtcaaaatagtcccggcggggcggggccatgacccctgacgtcgccggtccggcgc

SEQ ID NO: 14161 - DNA, 2300 bp, Homo sapien
aggcagaggttgcagtgagccaaaatcgcaccactgcactccagcctggcaacacagcgagactccatctcaaaaaaaaaaaaaagggtctaaataaagttgtatcaatagaggacttatttatttatttatttttagagacgggttctcactacgctgcccaggctggcctccaactcctgggctcaagcagtcctattgcctcagcctccagagtagctaggattacaggtatgcaccaccatgcctagttaataggagatttttatttttatttatttatttattttagagacagagccttgctctgttgcccaggctggagtgcactggcacgatctcggctcactgcaacctctgcctcccgagttcaagcaattctcccaagtagctgggattacaggtgcccgccaccatgcccggctaatttttgtatttttagtagagacggggtcttgccatgttggccaggctggtctagaactcctgacctcaagtgatccgcccgcctcggcctcccaaagtgctgggattacaggcgtgaaccatcgcgcccggccttatcttaaataaagatgaaacagccatagagtgaaatactatatagcagctaaaaacaatgagatagatctataaggagtcacaatgaaagatgtccaagacatgccagttttttttaaaagctagtgctctttctattcaaaacgtttacaagcgtcactacttttgtaagcaggaaaaaaagcaatgaagataaacaatgaaaaattataacatttaggaaatcatgggctagattacacagcggttctcaaagtgtgatgcccaaccagccgtatccgttacacctagcatttatcaggagggcaaattaattggccccatctcagacctactaaatcagaaaccctggaagtggggcccagcaatctgtgttttgacaatcccccggtgattctgatgcatgctaaatttgagaactatggattagatttttacataggatgcagaacttgatggaatccccttggtagtagtacttcaccataagaataaaatgaagtcttggagcacagtgaaaaaataaaggtgttttcaaaatgcaacacaccaatctgctatcattacaattgtagctgatgtggcaactacctcgaataatagagattaacagactaacaccacatttcattcttaggagtcaacaaggctttaaacaggggaaggatgccaacacctagttttccgtatcccgggtggtgcctctacttatggcaagtgtgtccatcagcagaaagaataaatcgcctcttggaacacttgccaccttccatctcgtttgatgacgtacacgttttctcctgagacaagcaagctcccacacggtcaaccccacaccggagccgagaaccggcctctccccaactcctggaccccaggaaagctggcaaagcgctgatccccagagtggcaagaggcttagggcggggatccagacacccagggaaagaagtgctgtcccaggaccccagccaaaagaagagactagactcactgaaggagacgagaataaaagtcctctgctgcgcagttcagccgctcccacatcccgccccaatgtgagagcggtaccggaaccgccaaactgaactgcgcgccggaccggcgacgtcaggggtcatggccccgccccgccgggactattttgaccaccccctacaataagtcctgtttgtccgcaaagttaaactttcgtttcaagccacccagagctatttactatgtcaatagtcttcaacttccgtctgcaataattaaaataagagcagtggttggggagaagatacctcgactcgcgagagttggcctcgccccctatggattattccgcaaaaaggagtccctattttctaagaattattattacgtttggaagaaaatagataccgtaatttcccacaaataaagaaataacactctcgtttttacttttgtagtgtggtagagagatattttttgtatccgtgttggttcttaggcggggcaaggtggggcggtcaaggggaaggtgacatatacagcgggagtggtaagcacttccttttcctgtggcagcagccgggctgagaggagcgtggctgtctcctctctccgccatggtgagtggaagttctcttggctggccttaccccgtatctcggggccagtaaggaaggatttggggttcggagcatagaatctgtaggagatagagcgaggagagggagatgaggaccaaaggcgtctttttctggtgtgga

SEQ ID NO: 14162 - DNA, 2300 bp, Homo sapien
ttaatatgttgatataagtgatggaagtataaatgtgtaggtgcaacattttgaaaggcagtctaatagtatcagtgtgattttaggtattaatcttaagaaaataattcaaaagtgttcatttgaattgatgtcatcaattgtttataatagcaaaaaactggaaactactaaaatatcatataatatggaattagttatgtgacaaaagagctgtggtactagactgccaaagaacattgaatgacacagacattcatgatataaaactattagaatcctgtttttattaggcaaaatcctattagatatctaaatagatacatttctatttttattatcattttttaaagagatggggtcttactctgttgcccaggctgaagttcagtagtatgatcaaagttcactgcggcctcaaactcctgggctcaagtgatcctcacacctcagcctcccaagtaactgggactaccagtgcaccaccatacctggctattttttttttttttaagagacatggtcttgctgtgttgtaactagtctcaaattcctggcctcaaaccatcctcccatctcagcctcccgattagccgggattacaggtgccaatgtgtccagcatatatttatatttaaacagagttatatgcttggaaaaggaacgtgtaccaaccaggctaataacggtaatgattatcctgtgcagaatctcactctgttgcccaggctggagtgcagtggcatgatatcggctcactgcaacctccatcttctggattcaggcaattctcctggcttagcctcccgagtagctggaattataggcacccagcaccatgcccagctaatttttgcatttttatttgtgtatttattttttactttttaagatggagtcttgctctgttgccctggctggagtgcagtggcacaatcttggcccactgcaagctccacctcccaggttcaagcaatttctgccccagcctcctgagtagctgggattacaggcccccgccaccatgcctgcctgatattttgtagtcttagtagagatgtggtttcaccagtttgagcagactggtcttgaactcctaacctcaagcagtccacccgcctcagcctcccaatgtgctgggattacaggcatgagccactgtgcccagcctaatttttgtatttttagtagagatagagtttccccatgttggccaggctggtttcaagctcctgacctcaagtgatgtatccgcctcggcctcccaaagtgctgggattacaggcgtgagctactgtacccagcctgttttcaaacttttaaataaacttccagttggaatgagaatgtatgaagttttggccaggacagtggctcatgcctgtattcccagcactttgggagacagaggtgggaggactgcttgaggccagaattttgagaccagcctgggcaatatagcgagaccccatctgtatgaaaaataaaataattagccaggtgcggtggcacacacctgaagttccagctactggggaggctgagatgggaggattgcttgagcccaggagtttgaggctgtaatgcactatgcatatgcctatgaatagccattgcactccagcctgggcaacatagtgagactctgtctctttttttttttttgaaacagagtctcactctgtcccccaggctggagtgcagtggcacgatctcggctcactgcaagccccgcctcccgggttcacaccattctcctgcctcagcctcctgagcagctgggactacaggcgcccgccaccacgcctggctaattttttgtatttttagtagagatggagtttcaccgtgttagccaggatggtctcaatctcctgacctcgtgatccacctgcctgggcctcccgaagtgctgggattacaggcgtgagccaccgtgcccggccgagactctgtctcttaaggaaattttccattgacttgcatagaactggtctttatgtgtttagatagtagaaatatataagtgtatgtataatgttgctcgatacctgttttaacaggctgatgtccaagtgcagttgatcagcaaaggccaaccaaaccctttgaaaaatattctaaatgaaaatgacatagtattcatagtggaaaaagtggtaagtactggtttgactttgtggttgtttaattctccataaccaaatttggtttcttgggaataatctaacgtacacgttttaaaatcagcatcggtgaaaatgagttctcattcttttaggagtaagtgtagtgctgtc

SEQ ID NO: 14163 - DNA, 2300 bp, Homo sapien
aaaaaatcagctgggcatggtggcgggtgcctttagtcccagctactcgggaggctgaggcaggagaatggcgtgaacccaggaggtggagcttgcagtgagccaagatggtgccactgcattgcagcctgggcgacagagcaagactcaaaaaaaaaagaaagaaaaagcagtcaagttaggccgcaaaagccagtgaaacaacttgtaacttcagttgcaactcaaatgtgggaaccataggctggcaggaaaacggcatgaaataagatgaagagggtggtgtgatcccaaccagggtagaaaaagcgactatgaagcagcgggaaataggattagaagaaatagtagctaaaccatcaagggatcttcaaaagttttttaacttcatatggcagaaaacagccaatgttgatttttttggcaggaaaatgacatgatctagttaagaatttctctatcagaagtatcaaggatggattcctaggaaagagaaaatacaacatttcccagttgaaatgctatcatctcccactcccggggggaggtctttagaaaaatgtgaagatggttgggcatggtggctcatgcctgtaatcccagcactttgggtggccgagacaggtggatcacttgaggtcaggagttcaagaccagcctggccaacgtggcgaaacccctcttgaactaaaaacacaaaaaaattagcagggcatggtggtgggcacctgtaatcccagctactggggaggctgaggcaggtaaatcacttgaatctaggaggaggaggctgtagtgagccaagactacaccactgcactccaggctgggtgacagagtgagactccgtctcaaaaaaaaaaaaaaaaaaaaaaagaaaaatgtgaatataatttttgttgtcataaatgattaggagcataggcgaacttggggcatggagtttggtgggggccagggatgttaaacatcttggtgtgtgtaccatggtcccaaatcacaaacaatgttcctgcccaaatgccaatagtgcccctgttgagaaacaatgaatcatcattagcatggtcccagaagaagatggtaaagattttaactaagatgagcacagtgaaagagacttcaaaggaggaaaagaattgtatatgtatggggggaagggtagcaaggtatatgtggaataaaagaaaaaatcctatccatttataaaatatagggggttgaacacagacagactatggccacatgtatatctaagattctgtgactttttaagggagacttgaattagacaaacacacatttaaatgaacttgtgccagctcttccatttaccagtttgttgtcaccttcaggcaaaataactgaaccagccagcaccatgggtggcacacagcagagtggcagcttctagctatagtagtacgtagtggtgatagaaataacagttcttactaaagtgaaatatgagatttctagcgtaggaaattgaaggaacgatgggaccacagacagaaatggggggttttcaaagaggatgtagtctggagaagatagtttcattttgacatactgactcttgaagcaatagcactctacccaagtgggaaataatttggtggaagttggaaagatgggaagtgctatcagcttaaagatgagggtttggagcttgctcacaaaggtgtcagtcaaatcactgaatagatcagctctgcaggggtgcagagagagaagggcagagatgtgagggcaaaagtatgatggaggcccgcagtaagggtcctaaaagaggggctttcaagaaagaagaaaggtgagaaaggtaggaaaactatcagttttatacaaacagagaaataatacttactcataggaagtaaaagtatcaaaaatagttggtactatgctagatggtaagggcacaatagggaaccaggcactcaaatctagtagaggagacagataagtaaacaaattactgtgttttataaacacactgacaagaggtatgtgtggagttctacagcaacacaagccattctgtgagatcaatgcaaccatcacagagagctcacctagcaaagaggtgggagaagtgcataccaggtagatcaagatgcacacaccagaagatgatagagtatgacaggatccgagctacaagcaaggagcttggtatgatgagggttgggggttcagtgggaatggaagtaaagtgtgagattaagctaaagaaataagcaggagccaataagcacatgaaatcaaaactacaaagagataccacttcactacca

SEQ ID NO: 14164 - DNA, 2300 bp, Homo sapien
tttttttgagacggagtctcactctgtcacccagcctggagtgcagtggtgtagtcttggctcactacagcctcctcctcctagattcaagtgatttacctgcctcagcctccccagtagctgggattacaggtgcccaccaccatgccctgctaatttttttgtgtttttagttcaagaggggtttcgccacgttggccaggctggtcttgaactcctgacctcaagtgatccacctgtctcggccacccaaagtgctgggattacaggcatgagccaccatgcccaaccatcttcacatttttctaaagacctccccccgggagtgggagatgatagcatttcaactgggaaatgttgtattttctctttcctaggaatccatccttgatacttctgatagagaaattcttaactagatcatgtcattttcctgccaaaaaaatcaacattggctgttttctgccatatgaagttaaaaaacttttgaagatcccttgatggtttagctactatttcttctaatcctatttcccgctgcttcatagtcgctttttctaccctggttgggatcacaccaccctcttcatcttatttcatgccgttttcctgccagcctatggttcccacatttgagttgcaactgaagttacaagttgtttcactggcttttgcggcctaacttgactgctttttctttcttttttttttgagtcttgctctgtcgcccaggctgcaatgcagtggcaccatcttggctcactgcaagctccacctcctgggttcacgccattctcctgcctcagcctcccgagtagctgggactaaaggcacccgccaccatgcccagctgatttttttgtatttttatagtagagacggggtttcaccgtgttagccaggatggtctcgatctcctgacctcatgatccacccatctcggcctcccaaagtgctgggattacaggtgtgagccacggcgcccggcacttgactgctttttcttaagtccattgagatattgtatgtatgtgcatacatatttatattattttaatataaacttccactttttacatttattcatccccagactacttcatttgtcttatccgtctatctttgccaaagttgcaagcatctccagggcaaacccagtatcctcagtcttaagtcctctgtagcacctatgcacgtggcatcattgttcagagtaccatctttgggatcagaccactgggtatatatcctgagactatcagttactaattgtgtgaccatgagcaagttactgaacctctcttagcctcaataagatgagaataatagtaatatctaccatagagttttgttaggattaaataacatgtactatacataaagcaccacagcagtacctgggatgtgataaacactcaagaaatgttactgcaattaatattattattacatacatccttattgattaaacagtgttttctgctaacaagtttttggggtttttaaatctcctgtaggttttggctgatggtttgaggactggtgtcactgaatggctcgagcccctggaagcaaaatctgctgttgaacttgttcaggaatttctgaatggtgtattacttgttttattaattgagaatttatacttgctatgtttaaatataagtttctctttaagcttgatactcttttttgattggaatatatacaaagctatgagatctgttatggtcagagggacagcttttgttctgaattgctaatggtagagatctaagtaatcctaagaattaataagatttaatttatatttgagattgaaggaaaaaagagatgaatcagtagcctttgaatacctaccatgtgcctgatgccatgtgtcaggggcttttctgttacctccgttcatcctcacacccccacctgatggatatctattataatctccaccagagttcagtgatttgctaaaatccttagttagacttctactgtccccatttaccatttgaaaataggattaggatggaaataatttggaaagcagaaaaatcaagagctaataaacttttgccactttctagacttaaataagctggatggatttggtgattctacaaaaaaagacactgaggttgaggtaagtgattattatcagttagaaatatacacagaaatagcttttaaaattcggttatgctgacatctttcatgttgtaccatcgcaaatggatttgggatatcaaggcagcatttaaggggaatttttgttgatctttattgtcagcactggttattgt

SEQ ID NO: 14165 - DNA, 2300 bp, Homo sapien
cccaccccacccaccccctggcctccctcagcaaacctccgcacaattgctaggtagcgaggcctgaaggagctctctagtttcctcaacctctaacggttccagtaatagcaccaccctcagagcagggccaccacgaggccagggtcagtccagacggggccggcttttgtccacacagccgtacaagcctgcccttgctggagcctggaacctcccgccccactgcagccgaagctgcatctattgccttgtctcaggggttgatgaatgaatacatgaaagcccctggaccttaggaagcacccagtcaacgttagccacggttaggttcattattgtactatttcgattttactcacattattaagcgtccactaggtggcagcactagaggactggatgctgatgaaccaggctggccgcctcccgcctcccaggaacctacaaaggggcaggggacagatacataaacagctgatgtggaagtgcagggtgggaggggtaaacgcaggctgtaggaaaacccaggaacagcctagacaacatagcaagaccccatctctacaaaaaattaggcatgcgtggtggtgggtgcctatagccccagctacttggggtgctgaggtggatcacttgagcccaggaggtccaggctgcagtgagccgtgaccatgtcactgtttaaaagaaaaagaaagaaggaaggaaggaaggaaggagaaagagagagagagagaaagaaaaagaaagaaaagaaagaagaagaaagaaagaaaagaaagaagaagaaagaaagaaagaaagaaagaaagaaagaaagaaagaaagaaagaaagaaagaaagaaagaaagaaaacaaaaaaagaaagaaaagaaaacaaaatccagagaacctagtctggcctgagggtgcatgaatccagaaaggcttcctggaggaggtgctacccattgaagacccaaaggaagagtacaaagaaattaaccaacaacaaagccataaggcccagttgagagagctgtggtgagggctcagctgaaggcagggaggctggaaattgagctatgtgaaggaggcctttctgatggggagggcactgcagggaagggagccacagcagatgagggcaagaggtgctgagactacagggtgggctgttctagcaggtggtgctggttgaatgaatgagtgaggaaagaaatgaatgagggatacaaagagagaaggccaaggtggaaaaaccaactctatcttttatggtgggttttttggttgttttttttttggcagctgggacaagtagacagagacacatggcaacatacactggtcctgcgccacccccagcttgggactcgaaggactggggtgtgctgaaggtggcatgtcaagcccagaagggtccaggaggaccaggtctcccccctccttggctgcccttctgtcccaggatggggagttgattgatagctcccctgcccccccgccccccacccagcgccaagctcccccagctgctgactcaggccctgccggccagctcagcattcctgcccggcccccactgaatggagctattgaaagtttctgtagccacagaccacacccccaaccagagccttcggctgtgctgtggctcctctctcaggggacagcgtaggccctgggggtcagttggagagggctctgactaccagcgactgctctgggggtgtctgcgatcaaggacgatcctgggtaagctggctgggctggcaccaaagaggggattccagagcgaggggtctccctcgtgtgcaggacagaggcactgggatgggcaaccccggcttgggggaggggtctgcgtgtcgttgggagagccaaagggccctgtgggttttcccacctgccccctcagactggagcttccctgaggtagacgtggtttcccccttagatagaggccactcaggggtatgggctgggtctcccccatcagacaggagccaaggtagggagaagggatagtttggagtcttgcccatcagtctcagagctccccaggcacggaaacagcatcagacatccagcctcagcctctgctgctgggtgcagatcaagcgccttcctttcccttcctctccccacttggcctttgccctaagccaagacctggccatcagcctggctgcaggggcctgcagagccagctgcactttttcaggtatgggggagggccaggcaccatgaagccagtgtgggtcgccacccttctgtggatgctactgctggtgcccaggctgggggccgcccg

SEQ ID NO: 14166 - DNA, 2300 bp, Homo sapien
catccctccatccattacagcccggccactctgcaccacatccagaacctccccccttcccctccctgctcgcctcctgtcctcatgagacccccagttccagaggcccacaggccaagtcctattttactctggccagggcctcttggggactcaggaaatgtttcttgaggaaaggctagagggcagacaggtaggaaatctggtgggggaaatatccttattgacacacccccatccaatcactacatttttgtaagggacccagccctggcttctactttgagaatcactcctgtccccatgaatgcacctggggaacgtcagaatttgggaataaagatcttagtgccttcaccacaggcatcaccagggaaaccccaagggacctggccccgttcaccagctgggccccccagtaaagcagcctccccccagcctaccccccaggtgggtgggtctagacccccaccccacccaccccctggcctccctcagcaaacctccgcacaattgctaggtagcgaggcctgaaggagctctctagtttcctcaacctctaacggttccagtaatagcaccaccctcagagcagggccaccacgaggccagggtcagtccagacggggccggcttttgtccacacagccgtacaagcctgcccttgctggagcctggaacctcccgccccactgcagccgaagctgcatctattgccttgtctcaggggttgatgaatgaatacatgaaagcccctggaccttaggaagcacccagtcaacgttagccacggttaggttcattattgtactatttcgattttactcacattattaagcgtccactaggtggcagcactagaggactggatgctgatgaaccaggctggccgcctcccgcctcccaggaacctacaaaggggcaggggacagatacataaacagctgatgtggaagtgcagggtgggaggggtaaacgcaggctgtaggaaaacccaggaacagcctagacaacatagcaagaccccatctctacaaaaaattaggcatgcgtggtggtgggtgcctatagccccagctacttggggtgctgaggtggatcacttgagcccaggaggtccaggctgcagtgagccgtgaccatgtcactgtttaaaagaaaaagaaagaaggaaggaaggaaggaaggagaaagagagagagagagaaagaaaaagaaagaaaagaaagaagaagaaagaaagaaaagaaagaagaagaaagaaagaaagaaagaaagaaagaaagaaagaaagaaagaaagaaagaaagaaagaaagaaagaaaacaaaaaaagaaagaaaagaaaacaaaatccagagaacctagtctggcctgagggtgcatgaatccagaaaggcttcctggaggaggtgctacccattgaagacccaaaggaagagtacaaagaaattaaccaacaacaaagccataaggcccagttgagagagctgtggtgagggctcagctgaaggcagggaggctggaaattgagctatgtgaaggaggcctttctgatggggagggcactgcagggaagggagccacagcagatgagggcaagaggtgctgagactacagggtgggctgttctagcaggtggtgctggttgaatgaatgagtgaggaaagaaatgaatgagggatacaaagagagaaggccaaggtggaaaaaccaactctatcttttatggtgggttttttggttgttttttttttggcagctgggacaagtagacagagacacatggcaacatacactggtcctgcgccacccccagcttgggactcgaaggactggggtgtgctgaaggtggcatgtcaagcccagaagggtccaggaggaccaggtctcccccctccttggctgcccttctgtcccaggatggggagttgattgatagctcccctgcccccccgccccccacccagcgccaagctcccccagctgctgactcaggccctgccggccagctcagcattcctgcccggcccccactgaatggagctattgaaagtttctgtagccacagaccacacccccaaccagagccttcggctgtgctgtggctcctctctcaggggacagcgtaggccctgggggtcagttggagagggctctgactaccagcgactgctctgggggtgtctgcgatcaaggacgatcctgggtaagctggctgggctggcaccaaagaggggattccagagcgaggggtctccctcgtgtgcaggacagaggcactgggatgggcaaccccgg

SEQ ID NO: 14167 - DNA, 2300 bp, Homo sapien
gggcttacccagggtaagagagtcattcatggtagggcaggcacaaaatactcagggaggcaaaggacctgggctagagttcttccccttgacccacacagcctcccagcttatctgctttgcctgaaccaaagcagaacctcaggcctcttcttcaacccctgaggactcagaaaatcatgtgttatatgtcaagaaatctcagctggatgcggttgctcacacctgtaatctcagcactttgggaggctgaggcaggaagatcactcgagctcaggagttcaagaccagcctgagtaacatggcaaaactctgtctctacaaaaaattagccaggtgtgttggcgagcacctgtggtcccagctacttgggaggctgaggcaggaggatcacctgagcctgggagtttgaggttgccgtgagccgagatgtcaccactgtactccagcctgggtgagtgaaagagacgctgtctcaaaaagagaaaaagaaaagaaagaaagctagcttcaaattcttcctctctttttccctttgttgttgacctggccaccaaacaaaccacacttgtctccattctttgaggccagaaaactgccatctgtggctctaccccgttcattcctcctgcctctctccaggcccctctgttaggccatgaaccccagcctgggctgtttccatcaccctgccactgtggccaagaaaacaggaagcatctgagtcacccattgtccccctgggctttggctgcctgggctcaagttctggagtcagggaaggacaaggagagaagaggttggctccgcagaagccaggactgtcctgtggggctctgtcttcccacaatgtgggactccagacactcagtgatccaagaacctctcccccattcttcacactgccttaagatttggaattctcgagtagactctgctccccactggctgtgggcctgggattgactggtgggtcttgattttggctgtaaattaacatcacctgggggtgctttaaaaactactgacacctgggttccacgcacggtgcttcaaattaaatgtttaaagcttccccaggtgatttcaaactgcagccaagcttgagaacgactgggctggtcgttctccctaagtccaagtctctccctgccaaagggggctaatgatgcctactttccacagttgctggaaacaatggagatcctggtgtgttcaggcacatcgaaacatgtaaatggtaatgtaataaatcttatgtccacccatgggagggcttgagcagaagtggggtaccctcaggctttcctcagccagtagagcccaggtcaagatgccagcggcagacattgagcagcgtgctgatgggcatgagcaagcctgtatactgcccccactgtggccatcctccaaagtgccccgcactgagcgggaaattcaaggtgagaacagcagatcaccccaggctcagcccccttgggcggagctgcccaagaccatgggaacccacctcttgcatcactgtgacctgaatgtgagactttgagtcaaaggagataattttggagctttaaaatttgactgccctgctggatctcagacttgcctgggccctgtaaccgctttgttttggccaatttcacccatttggaatggctgtatttacccaatgcctgtcccgcctccatatctaggaagtaactagcttgctttcgattttacaggctcatagatggaagggacttgccttgtctcagatgagactttgaattgtggacttctgggttaatgctgaaatgaattcagactttgggggactgttgggaaggcatgattggttttgaaatgtgaagacatagatttggaggggccaggggggaatgatatggtttggctgtgtccccattcaaatctcaacttgaattgtatctcccagaattcccacgtgttgtgggagggacccaggaggaggtaattgaattatgggagctggtctttcccgtgctattctcgggatagtgaataagtctcacaatatctgatgggtttatcaggggtttccgcttttgctgcttcctcattctgtcttgctgccgccatgtaagaagtgcgtttcaccctctgccatgattatgaaacctccccagccatgtggaactgtaagtccaattaagcctccttttcttctcagtctcgggtatgcctttatcagcagcatgaaaacagactcatagagtgtgagctgtgaatggaggagaggggtcaggcaagaggccaacgtccaggggccagcactctct

SEQ ID NO: 14168 - DNA, 2300 bp, Homo sapien
ggtttgtctctccaccaaggccacagtctttccagtggcccctgctgttcccaaggctgggcaggggttgggggaattacggggctctgcggattccttcctgcctattatttttacatttcctcattaggagattttggctgaagttctttgggggccgggctccagatgagttcctctctcccgcggcctctccccatctctcagccccagattccctggccagtatttcccatcccaagacatcttgaaccagatgggtaaggttagagagctgcctctttttttttttttttttttttttggagactgagtttggctcttgtcgcccaggctggagtgcaatggcgtgatctcagctcgctgtaacctctgcctcccaggttcaagcaattctcctgcctcagcctcccgagtagctgggattacagacacccaccaccacactcagctaatttttgtatttttaatagagacagggtttcactacgttgcccaggatggtcttgaactcctgacctcaaagtgctgggattataggcgtgagccaccacgcccggccgagagctgccatttttgcaagtcacgacttctctctgggcctcagtttccccactggtaatataaggaaggttggaatagaagactttgaagacccatcctagctcagacattcttgaattttcacatcaagtgtatgtgtgtgaatgtgtgtgattgcgtgtgaaattatagaggattaggggtgtgtatgtgtgattactgagcaactgtaattagaagtgtgtgactgtatgtggggaatggtgtgtaagtgggtgtaattgtatgtgttagggtgtgtgtgtgtgtgtgcattatatgtggatgacagactaggtgtggatggttgggaatgtaggtgtgattgtgtgactatatatgtgtatgggaagggtgactgaatgtctatatgtgtgtattgggggtgagcatgagtgtatgtacatgtgtgggtgattgtggtatgtggatctgtgtgcaattcggactgtctaggagtatgttattgtgtataattgtgtgcacatgtgagtgtgtgtgtgtgactgcatgggtgatttggagtgactgtgtccgtgtgtgttgtgtgtgttggagggcaatgaagcttcatctcagcctggacctgattcaggacctggatggggaccgaaccctcttccttgacctactgatgggtatgtctgggctggggcagagcaggggaccctgtgggtacccaggatgccagcaggccagcggagtgtgttccccctggtaattagctccagacatggcagcatggcctctccctgacagggagcctggaagatgctggaaacgtgttcaggccccagccaggtctctttgggggaaaaaaaattaaaggaggagaaaaaaaagaaacccaaaagacaaatctttattgaaacattttgtgacactcacaccaagtaattgatttccttattagtagcagatttttctccccgcctcttctcttgcctgaacttataaaagcaaaagaggtggaaaaccagtctagtacagaccctggactgagtcctgtccctctgcccttcctagagtaggtcagcaagggtgcaacatttgctttttcaggtctaactatagatagaagggcaacgatcacctgggggaccaggtttcaaaagcctggggaaagccctctgtccatccctcaatttcctcttcttcacctccagctgctatgaaatctgaccattagtgagtcattccattttctttcttttctctctctctcttccttccttccttccttttctcccctcccctcccctcccctcccctccccttcccttccctccccttccctttcctttcttccccaccccgctctctctctttcttttttcagacagggtctcactctgttgcccaggctgaagtgcagtagcatgatcatggctcactgcagcttcaaactccctggctcaggcgatcctcccacctcagcccctggagaagctgggactacaggtgtgcaccatcatgcctggctaatttatatatatatatatgtatttatatatatattttgagacagagtcttgctctgtcacccaggctggagtgcagtggcgcgatctcagctcactgcaagctctgcctcccaggtgcaggccattctccagtctcagtctcccaagtagctgggactacaggtgcccaccaccgcacccagctaattttttgtattttttagtagagacgaggtttcaccgtgtcagccagga

SEQ ID NO: 14169 - DNA, 2300 bp, Homo sapien
ggagataataatagtaactatgttaagtccttatatattaataataatagtacctatgttaagtgttgtgagcgttaactaagtcctggaacattgccttgcccatagtaacgactcaatacgcacgaactattattattgtaatacacagtcaaagataatccacaaagagcatacacggggataaaagaaaatacactgagtttctgtttgtattttaagatgtattaatttccccatgggcgaaaagtgactgaaaggggccacaagacaggcttctggggtgcaggtcaggttgctttttgggtgctggtgacatcatgtgtgtttgttcacgtgtgaaaattcatcctgctgttcgcttgcgatttgtgcatttaacgtgcactatctccagggaccttcgtggttctgtgaagcacgaagggcaagcatcctcatccgcggtttcaaacaagaaactgaggctaggaccgctactttaatttggccaaagtagtaggggatgggtgtgaggaagtgtctcagtccgatctttctttcggggagcaacggccactctcagagagcgcagcgcgaacagtacctggttccaggtaaagctcagcaaagggttctgaatcctccttgcaaatgccacccttcccccagcgcacacagactctgggcacggccgggggttcgcaccgccgcgcactccccaggctagctccacgcgtggtcactctccagggagacccgcccgccggcgccccgcggtcaccgcgggggaatggcgcccagccccgggccaatgagagtagcggaatttctttcattcagcgcggggccaggctcctgcccggaaaggggcggggcgccgcgccgggggtggggccgccgcgcgcggggggagagggcggggccggcccctctgcctggccaatcggcgccgcgcccggggggggaggggggcccaggccttttttcccctccgcgcgggaccaatcccgactttacaagcttgaacttttgccaccctcggactagcgagcgcgcccgaggaggtaccccgccgcgccggctccaggggcaggagcggccttaacccttcccgcgccgggcgtcaggctgctgccgccgcgcccccgatcccgcccccaacccacccccattttcgcgtggaaacctctctagggaaagcgtgatccctcacctacagccctctccgaggtgcggagagtaaacttgagaagggagaggaagcacccggcctggagggggcccggccggccggcggcccgcctcgctccaagggagggccgtggcgaccgagaggagccagcgagtagacactccccgcctctaccccaccctctccatctccccactccgggcgagcctggagccaccgtacgcaaagcgtcctgagctccctgtttggcccggcagagcgacccccgactttgtgcaaggagcgtagagcccctagtgcagtcacggaagatccgctaccccaacatatccgccgccccctgctcctcagaggctcaaccctggaaggcacacatgcacacccatttttattagcctaccctaggatgggggtttggaacaactttaaagtgcaaagtgtgtttgtaagtttgtgcacaagccagggagaggcaaagcgccccgtttgcgtccgagtctcagtgggtccgccgagccttgcgcgcctgctcgtggctcgtgtaaccctgtgtgtgtgtgtgtgtgtgtccgcgcgcgcgtgtgtgctcgctcgcatccgtgctctgggcgcaacgcgaggcagaaagcgggccgcgggcgctgtcaggccctgggcgggggtgccggggtggtgtggggcgggggcccgagctcggcccgccccgggagccggccccttggagcctccggccctgcaatgggacgtgttctcctttaagagttaagaaacttgaaaccttgtttgcgcaacaatcagcgccgcggagccgccaaagtgtctagactggcatatgatgggaggcagccaatgactccgcggcgctcctccgggggccctcagtgtgcgtttgaggagaacaaaaaagagagagagagccgagcgggggagcgatcgagggagctgagccgagagaaagagccgccgggcgctgcctcgccagacctcgctgggaccccggggccaccgggaggcacttttgtggaggggggagggggggcgacctcggcagcctcggcgcacgaagcgtccgagggcagcgtggggcgggctgcgacctctgcatcggtggactgcatttttaatt

SEQ ID NO: 14170 - DNA, 2300 bp, Homo sapien
agctgggggagccctgggctgcccacccgcctccaccgcttggccgccagcttggctcccgtaactgggcgggcgcatagctggggctcagcggtgcgcgtcctgataaggagactgcgccttccagggctctgggaagagggccggggcaccgggcagacagatgcgcgcacacacatagcgcaggcacaccgctagcgagcaaagtacactggaacaccggcactgagggactcccacctggcagcagtcacctccgcaccttcaccgaccactgcagggagccccggtgacagaagaccccttcctgggcagtgtggacccctgctgttcagagcccactctccatcaacttgagttgtggccttggggctagtttcctctttgggcttcttttcctatatctaaagtaaagggttggagggaatctgcacaatctgagggctgatgtgcagattccaggccacacaggcctccgtcccctcccccactctgccccaggcttgtctcggaaactggggtcctcaggaggggacccacctcttctgggcatgggctaggggcctcctggcctcccagcccgtgggagtcaggcccaactctgcctcccccttgggtgtctttctgtcccaggaaaagccagttcgctgagctcggtgggtgcctatgtggacggaaatgtggagaaatactttaatcacagctctaacctgtgtttatagagctcctttctcctgaaagtatccattaacttcggaataaatctcctgctctttgcttccccactttttttttttctgtaattatattcagtaaattactattatccaaattgcgcccggggaagagagacagagcgagagagagagaacttctaaacgactggaggaggccgcctaggaaaacacagggttcccaggccaggactataggaattagaatgggctagaaagttttccttttatttggcctggcattatccctttgaaatgagatcaatttcaagttgggcttccaagcccccgccctgcccggctcagcggcccctagccctgcttgtctgctcctcctagctcctcctggaggtgaggaaggggtgataatgtgcagtttgcctcttgctggcgccagccggccgcgctgtttatctggctgccaggggaatctgggcaattaggctcaggcggccttaaagtgccaggagctccttttctgcgtctcccatcatggggcttagggttgagtcttcaggttctgggggcaggaaggacgggcactcaggaggccccctccccatccacagcccctctttgggaggggggaaacttggcaacccgggaggcatgtggatcttttcctaagcaagatgctgagctggaaagatgggggtgtaaggtaatgtcccaaactgaaactttgccaggcactgggagaggctgtgaactcttttctggctttagaatttaggtctagatcccaaaaggctaagtaccccctgggggctaaccagaggcatgcctgggctgagctgaaccttctggtgcactggcccctggctgactgctcttctgcaggaagttggaggagattcctgaagttgattcctcaggctggatgtccaagggggttggagtttctgatgtctttctgtctccctctcttttctttctctccctaccaggtccacttctttcagaggggcctgcggtgctctaaaagttctcctgttaaagtttagagcaaattggttattattttaaaatcaataaaacttttaaaagtactaagacaacttctaagaggggagtggacagagggcctggtggcagctcacagtttcttttctgacctttggtctcacccaccaagtgtcccacctgagtgcccaccttgcccacctgaggtaatgccctggggctccaccagtccagatccacagggcgcagccatgtgggagtggcggctgattgttacccagtagtgttgatagcacattattcataacagccaaagagaggaagcaacccaaatgtccattagctgataaatggataaatgaaatatggtacgtccgaagaatggaatatcattcacccatgaaaaagaacgaagtccagcaccaaaacgtgctacaacatggatgaacttcgatgactttgtgccacatgaaagaagaagccagccacaaaaggccatatattgtatgaaatgaaatgtccagaatgggcaaacccatagagacacaaagtaagttagtggttgcccagggttttggggttggggtctagaaagtgactgcc

SEQ ID NO: 14171 - DNA, 2300 bp, Homo sapien
gcagtgagccgagaccgtgcaactccactcagcgtgagtgacaaagggagactctgtctcaaaaaaaaaaaaaaaaagtaaaaaagaatacttttgtgcttgcaggcagcacaaaaataggtggcaggccagatttggcctacgagttataacttgctggcccctgccatagaagaagggaaggatggagattagcagaccaccagcagcttgtgccgcagtaatcaggcataagacgaggctatatgggctcccagcaccccagaaataagtcctgggctctgagaacttgaagaaagaatgaggctgcgtggaggatgtgtaggactttgataacagagaagttggagaaaggtgatctgggctgagggcacagtgatgagaaaaggctgggtgcacagaagtcaggcatggctggaccaccccacagtttgagggatagagagggagggcccagctgaatgatgatgagccttatccacatctgccaggctgcaggctttttgtttcctatgggcactggggaggtggggagtcatgtgatcacagctgtgctccatgaacttaattttgagtcatttcatatggctctgttcctccaagaagctggctctgatctccttaaaacccatctctttctagcctgggccctttagtggcaatccccatgggccttggatcacgtagcctctccttactgtctgtgtaggaggacatgagttcttggtgggaagacagacaaagctgtgtccctcacaataagcaacatgaagtcctagaggaggaatataccatacaggccagcatgttagacatgctttcactttttctcaaaacacacacacacactatatctctatctgtatctgtatatgtatctctgtctagatcctcatttgtctctgcatctgcagctgtatttgtatccaaggccacatccatatatgaatctatatctacatccatagagccaccacttacccagtatccaaaacatcagtttaagaatagaagctttagtgccgaaaaggtaaaatagagtagtccctcagtatccatgggggattggttccaggacccccatgcatacgaaaatccacagatgctcaggtccttatataaaatggtatattatttgcatgtaacctacacacatcctcccatatactttaaattatctctagattacttacaatacctaatacaatgtaaatgttatgtatatagttgttatactgtgttatttatggaacaatgacaagaaaatagtttttacatgtgtagtacagacataaccattcttttttttttttttttttttttcacatattttcaacccatagatagggagaactgatggtaaagtgaaggctgaaaccagcccctagtggcaaagcatggaaacagaaaacttcacagcagagaccatcctttcacttcccgtcgacatcctactggaagtttccttaataaaaatattcccacgtataatacttgatttacctgaacaacaacaacaaaatactttcagtgtagttatgacaaaaaaattaattttcctaaatatgttttcttataaaattggggtgtttcatgtatatctgtgggttttataggtcagctaataggggagctgcttggtcaatagatgcaaagatgaacaagacagggtgctgcccttcacgattcttcaacacatcccactccctcaaaggagtttgtacctagacaggcactcagggactctgcaaattgccctcggtctgtgcaggccagaggtccccaacctctgggttgtaaactgatactggtccacagcctgttaggaactgggctccactgcaggaggtgagcagcggcccagcaagcattaccgcctgagtgctgcctcctgtcatatcagctgccacattcgactctttttttaggggaggagatgaagtctgtcgaccaggctggagtgcggtggtgcaatcttggctcactgcaacctctgcctcctgggttcaagcaattctcctgcctcagtctccctagtagctgggattacaggcacatgccaacacgtctggctaatttttgtatttttagtacagacgaggtttcgccatgttagccatgctggtctgaaactcctgatctcaggtgatacaccagcctcagcctctgaaagtgctgggattacagacgtgagctaccacgcccagacaacacattagattttcataggaacgtgaaccctcttgtgaattgcgtgtgctagggatttaggtttcgtgctttttatgagaatctaacta

SEQ ID NO: 14172 - DNA, 2300 bp, Homo sapien
tgagccactgggcctggcctcagtttaatttgaatggtggttaaataattaattcaatgtgtagatttatttgctttattttactttaggtttttagaatttttaaagctttttatttagaaatttatttaaagattttaaattttatttctggttccaaaatctatcatacaaatatatccagaaaggtctagcttttatgcccctttcaatcctttcccttccccataactattaatttttaaacattattctttattattacattaatttaatatgtatcacatacataatgcatatgtattcgtatccctccctcctttttttttttttttgtttgagatgaggatctcactatgttgcccaggctggacttgaaatcctaaattcaagcaatcctcctgcctcaacctcgagtagctgggactacaggtatacgcctccacgtttggctcttccttccttttaggtaaggattagcatgcaatgacacttctctgcctcttgctgtattcactgtccatcccactccagctgtctctccctagtagttggtcaagattgtcctcagtcccctttacagccacagagtcctccattgtgctgataaccacaggcctctgctgatggacattttccttgctcccattctttagcgattacaaattgaattgcaataaaaagcctgtgcttacaccttttggtatttttgctagtgtctctctacggtagattcccagcaatgggattcttgagtcaaaggttgaacatacatgcaattttgctatagctattgccaaattcccctgcagaaggcctgcatcattttgcattcccgtcagctctggctaggagtgccagcagaatgcattgccaaacttttggatttttgacaatctgataggtaggaaatggtatctctgagtagttttaatttgcatttcttttgtttgagcaatgttgatcatattttcacagggttatgagccatttgcatttctttgtctgtgaattgtgtgttaatatttttgttttgtttttgagactgagtcttgctctgtcacccaggctggagtgcagtggtgcgatctcgactcactgcaagctctgcctcccaggttcatgctgttctgctgcctcagcctccccagcagctgggactagaggtgcaggccaccacgcccagctaatttttttttttttttttgtatttttagtagagacggggtttcaccgtgttagccaggatggtctcaatctcctgacctcgtgatctacccgcctcagcctcccaaagtgctgggattacaggcgtgagccactgcgcccggccattgtctgttaatatttttagcccatttgtctaggaagttgttcgtttttcccttctctacttttagaagccattcactagagacattcatgctttgcctgtgatacaggttgcaagtgttttctgccgtttgtcatttgtcttctttctttctctgtttgtttgttcgcttatttattcatttattctggggatgtagccatgaacagggtgaccctgaggggctccactgacatgcacagcccaagtcagaaccttggatggtcctgtatgcgcctcgtcccaacccttccctgtgctgtcctttctgcctctgacccctctcctgctgcccagtgaccaccctgcccctgtccttccctgcctgggccctcagcatcacccagtctgagctcacagaggactggaaacaagcctgtttgtctctgtatcccccccacgacgtgcagggcaactgatcagtgaatgagtgaatgaatgaatgaatgaatgaatgaatcctgtgtggctaaaacagcctctccgcccaggaagccaagtcagagaggagcttggaagagcactttcgagatcaaggtttcttcaccccttgcattctcttcagacctaactcaggtctgagtttctactcccaaatgcctcacaggcaatatatgatgcctgcttcttttcatgatttaaaagaacactcgcttattgtagaaaatgtggaaaatacagcagtacaaaaaaagaattagaaattctccattaactcattgcccagaggaaacggccgtgggcattttggtgtatttttattcaactttgaaagacatattttatttttacacattttattttatacagtatagacatacatatgcatacacgcctcctctcatgacattaaacttttgcacaacttcacaattgtaaatgatcacagaaaaatgcctcaaaatgaatgtatcatatcctagcccca

SEQ ID NO: 14173 - DNA, 2300 bp, Homo sapien
tctgggtgactcaggaagcagagcaagtaggtgcttagaccaatggcaaaacccctcccttccttgccccactcctaggccaaggaaaaaagttcagctttattgcattcatccaggattttgcaatcaaaatctctagaaggaagctattttgagctcagcccacatggatgggtggcatttttttcagatttagaattgtttttctttgaatttcatatgagggaggactgatctttcaggatatctaagggtcttaacccagccctgtcttagtgacagtccctgtgggaacacgaagatgaatcacacaaggtctccaggacaagacccacgcagcacagtaaccacagcctctccaagctcgagtcccttggtctgaagctggtaaagaggagcaaggaatccctgtgaccacaggggccaggcagcacagttccagagccctggggcagaagccatgtgcagggctgtcattccttgggaccaatatgagtcatatccagagagctgggcatcctagaaacattttctggaagcaaaatctgctgatctaggggtcagggggctaaggctctttttctagctctgtcaagaattcctttgagatcctgtgtccaagagccctttgcaaacacaaaacccacattccatggtttatgactgacatcccgtgggtacctccagcacatcatagaacttctctgagaggccctcacctaaatgatgaggtaataaacatgcctgagagagtgggtgtgtaagcctttgggaaggtatgtgatggtgggccaagataaacagcttttagcatcatctctctttcccatcacacacacaaacaactgcccctcaaccgtaatgaaagcagccggtccctgccaggcactgagctaagttacacgtcttcatttatatagcagctccttaagcccctcccctgatctcaaggccttctggtgaaagatccaagtccaaaagttgaaggaatctaattacatgtggggagaaggaccaggtatggattccagcactcattttgcaaaatgcttagaggataaagcagagatctcctgctctgcgggtgtgtctctgtctttcctcaagatggcctgtgggaagagaggctggccttggaagcgagagcccaccccttggagctccctcatgtccttccctaggcacaggtgggttctgtcttccctccagtggggtccacagagcatgtgaccaggggcagaagttttccctgggcttgagatggggtgtgggtttgagttttgctgccctgggcctagaactccatttccccatttgttttttgaccaggttgagacatagttccagtgtgaactgatttccccatctctgggctatgctatcgcaaataactcacacatgagtaatgtgcccatgtttgtgtagagtttatttagataagaaaaacaactcgaggcctcatgggaggggctgctcagcaccactgagccaggcgtttcctgggcctgcccaggagagccaggccttcaggctgctggagggtggctgaaaagcccacatgctcagacatctccagggcctgcccatgggaagaaaagtgagggatggaacagaggatggggaacagaggacagggaagctggaagctgggtattgagtgtagctctgtagccatagttgtgtgcccttgggtaagacacttcaaccctctgagcactagtttcccctctttgcaaagggacaggttgggggaaaataataacaacatccagccaccaaaggattgtggagattaaaagaaatgacctaagggagagactttgtaaactgcagaggccaacacacaagttagttattaattaacggctggattaaggccgtgttttcaggccacactcaacagtggagttggcacaatgccgggattcaaaggcctgggtccaagttccaatctgccagcacccagtcacaagacctcaagcctcctcatctccccgagacctaggatcacctctgtgaagtgaggatagtgattcttccaccacataatccttgaggctctgtgttggcagttttgaagcaaaggatagctatgaacctgttttgtgaactgtacaatgtacaaatatgagatgatgctgccaagttattcaaagggtcattcatcagtgaatcaacgtatcaacaagcctattagctggacagttgaggatacaccaataagccgtctagctggggatgagaagagggagggctgcacgtgaagggttaattcacaatgtagagtgatagtggtgagc

SEQ ID NO: 14174 - DNA, 2300 bp, Homo sapien
gtgagcaaataatccttgcagtgttacaacagtgtgcccgtgtagagaactgttttgcaaagagctcgatcaatgatgtcatctttgccttccgtgacccaggcagctgggtgcagtctcaagatcggagactgaggcttcaacaaagtattgggttcaaattccagctctgccacttggaaccctgagtaagtaatgtaatctctctgtgcctccgtaaacgtgaggcacaggaacatctacctcaccaaccactgttaagactgaatcaaagggcagcaggcggactacccggaatgaagaaagcaatcaataaatgtggattgtgtcatccttgtctctcttgacggacgggaagaggagagtgaaacctaagaccacagcggcagcgcgttaacaggaggaccagcaaggaacggaagccaggttgtcaagcctcagttggctttcacgtattctccttttcaggcgggtatttaggaagagaggagggtgaggagcacagcgcacttctgcagcagcagctgcggattggcttgtgggaggcggttctccggagcaaggcaagggcccctgccgcttctgggctgactgtggattccgccacacctcacagggctttgtaactccccacccacttgagggttccagataactttttttttttaacaaagcaggggtgggggtgggagattcctgctgttaaaaacaaacaaagggcttagacaccggctagtcggctgcgggaggcagcaagagaaaggccgaggggcctggagtagctcctgaaaaccgccgagggccctgcgggcagacgcccctgaattcttttggtggggagaaaagccgcggagctccccaatgtgccaattggtttgttgttgttttgctttttttgaatacacaaactctccgaaaactcctgtcttgccccacttttttgtgagttcattgctttggaaacaaaactctcttccatttattggcaattatcaaatttccgatccttctctatcaggagatccagcaacaaacaccctgttatgtaaatttctttcaaagataaattcgaaagcccctccattcattccttcaagaactcaacagatgtccttgaggctcattttctgccgggcactcggttcacaaggctcaagagacccctggctccagccattgtccaggttgtcactggtgtccccagctctccacttctgaggacccacttctcaccccctcctcctccgcacacgttcccgaggctctcggccggtgtgatctcaccgactagagaataaaaacagcccaggggcgccggcgccggccaagggccttgacggggatcagcaagcgcgaggccaagtgcgggccccaacttcctgggcccgggccttccgcgcgccccctctcgggctcgggtcctctccagggtgcactcgcgtccggacgacgcttacttgctgcgagtccaaccctctccggcccgcaactccaaccgagccgcccgagtgtggactccgagagcggacgccacgggccgcgctcagccctcccgcccgaggcccctctcgccgtgtttcccaggacttcctccccgcgcccgcccgacttcaggtcggggccgcgcagggtcccgcgcgctccagccaggactgccgccgcccgggtcgcccacgtgggcgtgctgggcgcggggtggtggccggccgggcgccctccccggagcagggggcgggcagggcgcccgcgggaggaggtggcggggcgcgggggaggaggcggggagccccggcggcgagggggcggtgacagcacttggaaaggaggctgcacgcggatttgcatgaaacacagactgggagcgggcgggagcgggagcgcggcgcacgccccgggccggcccagccagcgagcgagcgagcggcgagccgggaggaggagggtggcggggcggtgaggccgcagaggcggagggatctgcgcatcaaagctagcgaggcgagcgaagtttggccgggggttggactttccttcccggaggcggcacccaaacagctaccccgtgcggaaacccaaacttctgctgccacttggagtctcgcggccgccgcctccgccccgcgttcggggccttcccgaccctgcactgctgccgtccgcccgcccggccgctcttctcttcgccgtgggagccgctccgggcgcagggccgcgcgccgagccccgcaggctgcagcgccgcggcccggcccggcgccccggcaacttcgccgagagttgaggcgaagtttgggcgaccg

SEQ ID NO: 14175 - DNA, 2300 bp, Homo sapien
atttcccctactttaggcttgggctttggggcccgtttgcctggggaagctggcagtcactgggagcagctctgctgttctgcctcctttgcgagcctcaggtggccccagggccattgtgtgtgagcaaaggcaccctgtccagtctaacctgaatctctgtaggaagaggcgtgcggctctactacatcggaggggaggtcttcgcagagtgcctcagtgacagcgctatttttgtccagtctcccaactgtaaccagcgctatggctggcacccggccaccgtctgcaagatcccaccaggtaaacgagccgcacaggcacccctgccttgaggtccctctccgagtgcatgcctaggatgctggagagagtccacctttctcaccttttctgctcactcatgattgcgttgtcaatctggaggtgattggattaggttttctctatgcccacagatctaactgtgctttccctgaacttccagggagcagatgtagcatctgataggtctgcctttaacctgtgggtacctgcctgttgccctgtgcgtagatgctcaggcagtatggcttcctttcttcactcattcattgcacaaacagcatgcagggctctgtgccaggtgctgtaggggatgaagaggtagatgcggccctgctctgcccccgcagaccttacaggcctgcagagcacagaagacaaagacacggatgagttcaatataagggacgggtgccaagcaccaagccagcagcccaggtagagagaaggcccatttagctgttgggatggatcagggaagtcttcatggaggagaaacatccggatcctgaaggataggtaggcactaggcacagggagggcattctagacagggggagcagcccaggcaaagggcctgaggtaatggagggcaggacatggatgggtagctctctggctggaggagggtcatgtatgagaccgtcaggggaaatgtttcaaaagcacaacagcatgaggccgtggaaggacaccagagagtttgactctagggaactgctgagggttttctgagtgagcctgaaaaatcccacctgtaccccaagaagaggtgtcaggctgcacccccgagagtggtttggacagggccacgcctggacagcaagatcaggcaggtggctgatcccatctaaggcctctttcctcaggaaaccaaggcagaaagccccagccaaagtccacttttcacaggacgtgcagccactgtgtaggcagcccacagaacatggcctgtgacagactagtggagcaggtaacctggccaggccattgcctgtggcacgtgtgtggcatgccccttcctgcccactgagtagcagatggtagtggagaagtggtagaccacaggcaggggaaactttagaatgcagaaagtctgaaatgataatagcacaccaggtttccagagcattttgtggttgcatttatagagtacattccgatcgttgacctcatttagtcctcaccagttattctctggctctataagtaaggagacgctttgagagacaagttcagagagtttcagccacctgcccaagcgcacacagctagtaagtggccaagccgggatggggcctagggctgatggactctcaagtttggtgctcttctgcttcttggctctgctgggggtcagggcccaggttcagccctgttccaccacccttgtccttggagagaatgaagaagaggaagctcagtgacgctcttggccttctgcctcttccattccccggccccacccccatcttttgggtgagggctgagttggctgtggtgttgtttgtcagctcatagaatgtcagagctggaaggacctctgaggccagcccttcattatacagagacacagggtccccaagagaaagcgaccagctcagagtcacacagcaagaacaggagcctgctgttggctcattcataagcgtcaccccggctcaccttttggctatttccagcatgtgcttttgtctttatttttctggttgacacattcctggcactcaggcagtaagacttcaaacgacatttattttaaactttatttgtgactgtctttagttttactgtctggagaatcagatgcacaccttcacttagctgtgaatgtcacctccacccagcccagtgcccagaggccaaaatttggcccagatctctccttacctcctagccccagcaccaggtgtattcatcagaggagcccaggtggagggtgcactgggccctctgccaagcttcctgtggggacg

SEQ ID NO: 14176 - DNA, 2300 bp, Homo sapien
gtggctgttagtcttccaagtggagatagcaggtagccagttggagagattttggagtttggggagaaaggcatttaaaaccttgagccttgatgagatcaccaagggagtgaatgcagtacttaaagaagaccaaggactcagcccagggacattgcaacatcaagagacagagagaagagaaggaaccagtaaaggagactgaggaagaaaggtcaatgaggtaggaaaaccaagatagtggagtcttattcgggaagcaaaagtgaagagtgtttcaaggtggaaggagtggtcagctatgccaatgctgctcataggtcaagtaggatgagaacagagagttgacccttggatttagcattagtgaccttgaagagcagtttcagtgaaataggttgaaagagaaaaattgaagatagtgattataaaacactcttgaaaattttgcaggaaaggggagcaaagaaataggtgagagctggagagaaaaatgtggtggagatttttattgtttgagatgagaacaagagcagcgcgttcataagctgttggaaaagttccaatagagggtgaaaaatggatgaagtaggagagagaagggaaacttgccagagtgacttccttgagtaggtagaagggatgggctccagtgtacaagtggagggactggctttgcacaggaggaggaaaataaacctagaaagacatgggaaagggggtttgtggatgcaaatgtggctcagtggggagatgtgtcatgagaatctgtggaagtttcttctgattgcataaattttctcagtgaagtaggaggccaggatgtcagttgagagggcagaagggaggaggtagcgttaggatttgaggagagaggagaaaatgtgaaacagtcatttaggggagagagaaagagtaaatgaacctagagatgtgaagtatgatttgccaggcagcattaagggacccaacttgaaatttggtattataaaactaaagtcaggcagcatgggtggagggtgtgtgtgtgtgtgtgtgtgtgtgtgtgtgtgtgtgtgtgcgcgcgcgcgcgtgcgcgtgcatgcatgtagtaatcagttctgcttttgctaagcaaatgtatcacagcaagagagaggcaagggattcagtagtatatataagagattaattataatgattgaccatggaatttaagctaaaaagaggagagtggaagtcaattggagtgggtcagtaaaaagatggtagttttgagtcctggtgcagttgaaggataattgggttaaggtactataggaactgagagggacttggaaaaataggtgatgcatgaagttgagatgatggaggggttgtggttattggtaataataaggtctgggtatgaccctgggagtacatggctgcagcaatgtagaggacaacatccataaaatggaggaattcaataaactgagactcagattgctggaatggttgtctatatattgaacttgctaaaaattaagacacttgccttcaaatagtttgtgtgagaatatcagtaggctcctatattcagagattttaggaatgatttaatctagtgattctcaactgagacccaggggggtatggaaatacatatcacatgctatacaagccctctgaagacgttgattgcctggctcccattgagaatcacttaactattaagtgctattgctaagtggttggtagatgtgccctcaactgcactgggtagaaactgttaggaacttttgagctagtctattcatccagtacaggaatggcttctatagcatccttgccaggatcatccaccctttttggcggaatgctttaaataacagcaccttgtgaagcagtcctagaagcaattaattgcatagagaaatccaagaactgttttgttcattcttagcagatagaatatatttttatgctggtagcttaagcacttaaacaaggaaaggatatgtattttactttgtgtcataatgctgagaacagtggtgaaaattttatctgtcaatgatgtattttcccttgcttctaccttgttactagctttcattttgatgactctttttcctagtctccctaggaggtgaagaaagttccaacagaattgggaaaggtttacctcagggagactgaaatgaccaaggggatgggaagaatgggaattgtctaatataataaataagtgtggacaaaccagagctgagaagagatttagctggaatctgtattacagggtatgtataaggcagatatggacctgatttcccaaa

SEQ ID NO: 14177 - DNA, 2300 bp, Homo sapien
atcaaaaataaaaccttaaatttattttaaatttaatttttttgctaaaaaaagggccgaccttttattcttcagaagattcgttcctcttaactgcatgatgaaactttactaataaaaagaattcatgcatgtatatattcatacacacacactttatacataatgcctagcagtcttttggactaaataatttccccataactttatgttgagcaaaaatgatggcaacttttcaaatatataatgttagctctgggagttaaaatttaatttctagttttcagtgtcttgctaattatgagtttgaggcacatttcattaatacgtgttcatcttagtatgcattgacgaggagtttgtgactgtttttcattatattcttctgataagtcaattaatggcatgtcattttacttctataagctgattttccacatttgtataaagtggaggttatgggtatgggtgtgagagacgggagtttaggttggaacaacttctaacttctcttccagttgtaaatactgtataacataatggaagcaaaatgcttccatggctccataaccatgtctatattcatttgttcaccattgacttgtctcttactgtggggatttcctgttatatacatgctgcacatagatttccaaaagattcagttataatctaaaacatttatagtaatttgcttggctattacacatttaaaatttatcggaagtgtcttgatcaaacaagaatttaggttggctttcaaagaatgtgaacaaggctgaatataaataggattggggtcatttatcagtatccattcttttatttcattagctgaattaatgtctaagcattcagtccaagaaatatatgtagctcttctattttattaatggtttagccttaatcctatcttccttttagtttgcaataagtacaaaatagttacaaattctagaagattgttattgtctacctcctatgaagtacttaagcaatacaataaatagagctgtcattctttgtcttctacttgctcttttctggatatttggttatatgactgttttttcctttactactgtctaatctagttcacaatgatttttgtgttcttaaagagaaaatgtcaatgacttaaattatatcaccataacttttataatcagatgatcagagaatataggattaaagctaataaatgcagggtcctttgaaatcctcacataaaaggaaacagcaaaagtaccagctttatctggtatctgactgagaaaatcaaccaatgtatattggttttgcactttacatggtaatgttgtcatttatttttagatatccttggaacagaagatcttattgtggaagtgacttccaatgatgctgtgagattttatccctggaccattgataataaatactattcagcagacatcaatctatgtgtggtgccaaacaaatttcttgttactgcagagattgcagaatctgtccaagcatttgtggtttactttgacagcacacaagtaagactttgttttctatgaaggcttgaataagaaattattgcatgccttctttttttcccattacattttgtctgactatctcttttctgtttttgtttgtttatattttttgttccctctagaaatcgggccttgatagtgtctcctcatggcttccactggcaaaagcatggttacctgaggtgatgatcttggtctgcgatagagtgtctgaagatggtaaggcctgtggatgggacagtagttggtacatgcatttgccattccttgataaacagagtacatctgtttctttaacttaggacatacatcccatgtgactttatggctttatgaaaatattttcagctatttttctttggaatcttgtaatacttactttttttttaagaatggatacttcggggctgagaagtcattttctttttattattttagatgcctttagaataacattgacattaagggaaacacattgagatttgtgaagaatattgcaggaatagtcatgttttattttctttttacttatgaagattcttttgcatattattttaggtataaaccgacaaaaagctcaagaatggtgcatcaaacatggctttgaattggtagaacttagtccagaggagttgcctgaggaggatggtaagtgtttatgtgttaggagaaaatatggcacttagatatgagagattattttaattcagggaagaagaatcacagcaaaattcaagaaacttttttccccagctgtttcaaggatttaag

SEQ ID NO: 14178 - DNA, 2300 bp, Homo sapien
ggaaggagcactgcttaaaggtaagaaaatggcctaattagaccagttagtaaccacttagttaaatgctataattaagcttttaccctagcaaggaactttctaagtgatcacaaatgataactaagtcatataatatctgcactgaagggacatcttacctaattctgtcatttgacaggtgtagcaaagaaattataattatacaatgctttacagtttacaaagtgtgttcaaaatgtcacatcatctgtccttcaaatactcctgaaataggctcatatgccccattttaaggatcaggaaattgagggttacagagatagtaatgtgccttaataataatgtctatgatttatcaaatgtttactatgtgccagactcggggataagcacaatcttgcgaaaattatccctattttatagatagaaggtgaaggggccgggcgcggtggtgactcacacctgtaatcccagcactttgggtggcaaaggcaggcagatcacttgagcccgggagttccagaccagcctgggcaacatggccaaaccccgtatgacgggggggggggggggcaattagccgggcgtggtggcacacacctgtagtcccagatacttgggaggctgaggtagggggatggcttgagcccaggaggcagaggttgcagtgagccgagataacgccactgcactacagcctgggcagcagagtgagaccctatctcaaaacaaaaataaaaaaaaggagagaaaagagaaagtgaagggtagccaggcacagtggctcacgcctgtaatctcagcacttagggcggccaagacaggaggatcacttgaaaccacgagttggagaccagcctgagcaacatagcaagactctggctctacaaaaaataaaaaaattagccagggttcgtggtgtgagcctgcagtcccagttgctcgggagactgaggcaggaggatcgcttgagcccaggagttcgaggctgaagtgagctatgatcgcatcactgcactccagcccgggcgacagagcaagttcccgtctctttaaaaaaaaaaaaagaaaagaaggaaggaatgtaggtaggttaggtgacttgctcgagatcatacagctaagtcactgctctgattctaagccatacacttaaaacagaagtcttgagttacctataattcaacttcacagagccctttagtagagttggcttattatccagtcccatgttctctcttttaagagttagtaagtctgacagccattatgagggtctacaagcaaaagcactagcccaatcatacccaaaaactcatgttggcggagagcccatgcctcagatgaaaggcgtgaataactagagtggagcggacaaagctaacaagtcttataatgtacacattaagaagcagaataaacttcagagtaaatacgcagaataaacttcagaattcagagtaaacactctctcccggagcagcaaggataacaacatcacgatatcaacaattccagcaccttacactcctgtaacctagcgcaatttccggagagccttcaggttcatctcaacggatcctcgcaaaaacctgtggcctgggctgagcagagcgggaaatcagtctcactttacacaggaagccgaaaggaacgccgaagaaggccgagtgggcagaaaagcacgagattaagagataggggcagccacctggggagactgggcgcctccactgactggaggaagaacgcagggcccgctgcggggacaaggcccagagaggccgtggtgctgggtccgtcgcccgctgaggctcaggggccttggaggtcggcccaggcgcctatctactcacgttggaccagctggtctcctgagaagacggaggagcagctggtgactaacgcacagggtacgccagcagccatagctgcgctcgcgagccggttccgtcaggcagccgcttccgccttgggctgcaccacggccgccggcgcgagggggagacaggccggagagggcgttctcggaatgaccaggctggcctgaccccgcccctagacccccttccgctcccagcgtggaacaggccaggtcgcgcgcggtgttgccatggggacgagcggctccggctgaaggtttccgtgcttggaaaccgcgcctccgcggaggtagccgttccctgacctagccatggcacagaacactgaaaaccacgaccctgtcggatccatcttaatccaggtgggaaacgggcttcccccggccctgccctgcccagccgcgccacttccga

SEQ ID NO: 14179 - DNA, 2300 bp, Homo sapien
gatcaacatggatatgactattagctcttctgacccatctcacaagtcagtgtcaacagttatctattactataatgttgtatcctaggtaagagtctccattattgttctaattatttggaatctataaaaagagtgggtatgtgcagcaaagaattaaccttacccaaagaggggtccagtcttcgctcctggctactgggaggtgatctctaggcgcctgggatgtcctgcctgatagaagtgtctttgtctgtgggctttggccaccagacagtctatcaacatgatttataatgggtgttttgatccacgctgtatcagctcagacctctggagcagcgggaaactaaaagtattcaggaggggctggagattaatggtcaaccacaagggcagtgtgagattgagccccagtaaaaactctggacatcaaagcctcagataagcttctctagttgcaatattctatgcatattgtcacatatcatggctgggaggaagtaatgcaggtaatgacgtcaatgactccacagggataagatgaccaaaagctctatgtttgtacccctcctggactctgtcctattcatctctttccttggctgattaatttgtatgccttcactataataaaattggagatgtgagcacagcacttccctgagctctgcgaatagttctagtgaatcattgaatgtgagggtggtgatggggcccctaagtttgtacccagctggtctgaagtgaggtggttctggggacccctgaacttgcaggtagtgagtgttgaagttagggcagttttttgtggaccgttccctcagacttcgcagtttggctaaactcattgctgcgtgatggtgaaagtgagggtgagaaaagatcaggtaagattaggtatgattcttaatggggaagtctatgaaattggtgagttcaggggcttgtatttgggaaaaggtacatttagggaagtctctcctagatgggaggtaagagatcaaaattctgccagaaaaattagatccctttgacgagtaagacccacttcagaccaactgagtgacagtcctgacagagtgaccttagacaaatgacttcaagacttagtcaaatgcagctattatatatgtgatagttaaaaccgatgatatatgtggaaatatcttaaagttacctcacataaatgtgaaaacaaaatgccatgatcatttcagaaacatctgagtgcaactattacaaattgagctgtattggacaagactttcttgacatttcccctctcaaattaaaaaggtctttcactaagtttttaaatgtcacattttttcattccaagttatcttgatttttctgtgtgttctccaatgaggaacatttagatctaaaaaactggggtgtttaagaaaagcaattcacatatttcaatttgtctccaaatttcttatcacctcctagagtgtccgatttgtctctcctccactcccgacgtcatgggttcaaatttttcagaatataacatttaaaaatgatgcctcagcgtgaggttaatttttctgaagtaaaggttccgggtgaacggttttagagttttcccagaggcagaaagtcctgcttctggggcgtaacctacagggtaagtcaccgggagtgtgctgggccgtgggggaaggtctgggtgggcatttttgggagcctctcgcgagttggagggagtctaggggcggcgcaccaaatgggtgagcgtcggtgaatcggcgcgcgggacctcgctcggaagtggcgcggctgggcagggcagggccgggggaagcccgtttcccacctggattaagatggatccgacagggtcgtggttttcagtgttctgtgccatggctaggtcagggaacggctacctccgcggaggcgcggtttccaagcacggaaaccttcagccggagccgctcgtccccatggcaacaccgcgcgcgacctggcctgttccacgctgggagcggaagggggtctaggggcggggtcaggccagcctggtcattccgagaacgccctctccggcctgtctccccctcgcgccggcggccgtggtgcagcccaaggcggaagcggctgcctgacggaaccggctcgcgagcgcagctatggctgctggcgtaccctgtgcgttagtcaccagctgctcctccgtcttctcaggagaccagctggtccaacgtgagtagataggcgcctgggccgacctccaaggcccctgagcctcagcgggcgacggacccagcaccacggcctctctgggc

SEQ ID NO: 14180 - DNA, 2300 bp, Homo sapien
tttgagacggagtctcgctctgtcgctcaggctggagtgcagtggcacgatctcagctcactgcaacctctgcctcctgggtttaagtgattctcctgcctcagcctcccgagtagctgggactacaggcatgtgccaccacgcccggctaatttttctatttttagcagacacagggtttcgccatgttggccaggctggtctcggactcctgacctcagatgatccactggcctcggcctcccaaagtgctgggattacaggcgtgagccaccgtgcccggcctaaagcataagttttaaccaactttatatgttggggaccttcaacagatttcgtttgaaaaaggactccactctttttcaaaatttaatttggtcaggtgcagaagctcacacctgtaatcccaccactttgggaggccgaggcgggcggatcacttgagcccaagtgttcaagaccagcctgggcaacatggcaaaattccacctctacaaaaaataccaaaaaaagcagccgagtgtaggtggcacacacctgcagtcccagctacttgggaggctgagggtgggaggatctcttgagcccaggaggcagaagttgcagtgagccgagatcgagcagctgcactccagcctagacaacagtgagatcctttctaaaaaaaagaaaagaaaaagaaattctataaagttcaagttctataaggtaaagttcaacttcaaattctgtaaggtaaagttcaagattcggcatatgttggtgggtgctcaatgttcaataaaaactggggaataggcctggtgcagtggctcacgcctgtaatcccagcactttgggaggccgaggcaggtggatcacgaggtcatgagtttgagaccagcctggccaacatggtgaaaccccgtctctattaaaaatacaaaaattagccaggcgtggtggtgcacgcctgtaatcccagccactcgggaggctgaggcaggaaaatcacttgaacctgggaggcagaggttgcagtgagctgagattgcaccactgcactccagcctgggcaacagagtgagactccgtctcaaaaaaacaaaacaaaacaaaacaaaaaactggggaatataaaatttcgccatactatcctacatcccccttgagtttttagcaacgatagtaattgttatatgatgcttaacgcgtaattactgtacctcatttacataaggtggtttcagacacatcatcttgtttatgtatggcctctccaaacaaaatgagtttaggacaaaagaggaaatccttttctaaaagcagttttgtccgtaagttactgcctcaagaggccgcaaagtttgagcaaagcttttccgaaagtaatggattggtaatgggtgactgaggtccacaaagctcgataagaggctcctggtccgtctaccaggttcttagagggaggtgcctttgtgtgttcggacgctgcactgagacacgtgaggtttttaaataaacttttgattttgaaatctctgggactaattttaaacagtgaacccgacagcgaggacctacacacaaaagtgctcccggccttaccaaacaacgcagacccggggtcacgcctcgtcctgtttcaacaacaacacccaagggcttccctggagcccagggcgtgggagggagacttgggtttgagttctgcaccttgcggaggtggttagttatttaattgtcttccacctgaattttcctcaggcccaaattgatgagacctccccgaatccctcccctgcccgagttactaatgacggcgtgaggtcacacctggccactcaaaaccagctccttgacgcaggtgaccctccgcctcgcgcagctcacgcttcccatcccccggactccacccccagcgggaggccacggggccgctgtgcgcacgcgccgccgcacaccgggggctctcgggcacccgcgcggcgccggttggccttcccggcgctcgcccgggggcgcgcttgcgcgccagcggctgcggacaccagcctgcgtccccggcgcggcgggccatggaggccctgaggagggcccacgaggtcgcgctccgcctgctgctgtgtaggccgtgggcctcgcgcgccgccgcccgccccaagcccagcgcctcggaggtgctgacgcggcatctgctgcagcggcgcctgccgcactggacctccttctgcgtgccctacagcgccgtccgcaacgaccagttcggcctctcgcacttcaactggccggtgcagggcgccaactaccacgtcctgcgc

SEQ ID NO: 14181 - DNA, 2300 bp, Homo sapien
taaccagcaaccattagcagtgatgctgtttgacaggagatggagttatgatctgagtcagaaattctgtatttttttccccttgctgtctgtttatttaatgcagtcagactaatactcaaaatgggaaggtttgccacctatataacttatatattacaaaatctttgtagcacacatgctttgaagtctataagattctatgaaaaattcaattttttctgaaaaattaaatttatatctgaaacatgtaacatcaaaagaacctccaaatcagttctttgcataataattcactttgagtcagctgaacagtaggtaaaccactgtcaaattaagcactttaaaaaattagaattcctcagtaaatctcattcattccaatggtaagttgcttttcttaaatctcaatctacttctcagcaggatacctagactggtaaaccatcagtaaaatgtcagcttccattgaagggaagacggaggagaaaaggagcaaatgggtaaacagaaatctttattatttacaaaatggaaaaatgaatttggaagggaagaagaggaacaaaatcctaagtataatattaataggatatgtactttatcacccagagagacgattgtacctcacagaataggaaaggacctattatctaattcacatcccctctaccttcagacaaaaattaaaaataaacgttaccagatgtgttcaccactttaaaatattttttaattccctttatcagtatatcccaatttgtattaaagcatgcatgagcaaaaagttgtcctttttgcttaacttagaactcttactcccattttagcaggatttttagaatgtccaaaagaccatacagaccattaaatcactctcccacattaataaacaaaacaaaacaaaaaacactacaactgttgtttctttcaactttaaaaggttttacttttctatgtgtggaatgttctgagtatccactttttttggatgtcttaatctctaaatctaaaagagaggcccctaatcattaaggtgctcttaaacaaaatgtcaacactaaaaatgtgactttaaaggaaaaaaaggcatttggctcatggtttacctataactctcccgttatgcttttcctaacctattattctttagggaagaatgatttcttacttatgaaaaatgctaaaataaacttatacttctcgaatctagttaacactccagtctttccaaataatttcgaattgaatttcctaagtcacctcacccttcaacttcaaccaacctccaaagtagtgggcatgctctatacagtccatcagccaaataataagaggcatttttaaaggataacacgttgctaaacaattatctccttacaggacagtccagtggagtaacggctcaaaaagcccacgactgacatatgtgttattataagcacaaatacacagactatttttaaccttaatggacgatcagattatgtaatagtattagtagtacggctgcgcagggtttagttttaatcctggctttaaaaacctggctgggtaacatggttcattcagctccatggctagattttgaatcactgaaatctagattgattttatgccagctattagtaagttcaaaacatcttgaggccttctgttttcccctgacctataaaagatacacccatgtccatgttcgtacctccctcttctgtcattaaaccaaaagaaaataaacacctagtgacagtaaacatcctcagggcgtctccatgaaaatatacaaatattaaagatctttaaaaatcttttaggcctagcacctcaggaagctgttatgtctggtgaaaacctttggtgcttttagtaaaacgaacttgccgggaattcatacaaagaaaacaaaagaaacttaaaagagtagttccagttattgcaacataaacgcagctgcaaagtgatgttcacgggaatgagtcctgccatgcagtaggacggatgtcaacttcagagccactttctagggggcgtttcctgacgccccctggcttactgcccaggccaggggtctactctggttaacatgggcaggacaggagggcgacccgcccctccctaggcccgaggacgcgcccgcagcaggcgaacggcttcgggtgccaggagctcagcaagctggggaccccctgggcgaggagtacaaaggaccccaggcgaagccggcgccgggaggcagagctgactcccgcgggactctaccggcctgcgagcgttcgtcacgtgctcggtggctgaggggc

SEQ ID NO: 14182 - DNA, 2300 bp, Homo sapien
aaaaagtactaaatgcaaacttcttaagatcacatgcaacttcgatgttaaatactaaatattccttaaatttagacagtattcaatttggtaaagatcagaaagttatattttgtcatttatgatatcaagtggaatgtattatcagtgattatgatgcttctcgcaatgagagttataactttctggaaaaatccttgctcaaatcatcaaagttaagatttcttactacataaaggctatgaagagctgacgtgtaattatattggctctgcaaatattggaacagaaatatgagtttgccattagtgtaagaaaagcttcagaatatgtatgcaaatttggcaaattgagttggttttccccacggtacttcgaataaaagagacattttaacaaatcacaggttcatagaaaatctctagtttcgtggtctattttctaaaataataggaaatgaacttttaataaaagtacatgaggacttttgatgaacggtttatttttcacagaagtgaagtgcaggtgaaaaggggaaattcctagaatatctgaaggatctgactaaatgaatttctacctaagctattgatttacagtaacttaaaatgtgataatttatctcctacaatggcctttcaaattaaatataaaagtaactcagagtaaagtatgcagaaaaaattttggtattgtaactgaaaatgaccaacattaatttttttctctcacattaatcaagcaccttactgttagaagggaaactgacaagcctcctcaaccgagtttatacaaaattcaaccccagaaagtaaagccaattcgtgcaccttcataagaaagaaataaaggacgaacctacacattacaatttgtaaagaaacttctgtagaggcaccatcgttctacaaccttatgcactttaaaatctgaggtaacaaggcatttgaagataaccaaggttggccgggcgcggtggctcacacctgtaatccccccagcactttgggaggctgaggtgggcggatcacgaggtcaggagtttgagaccagcctggccaacatagtgaaacccagtctctactgaaaatacaaaaatgagcgggcacggatggcgcacgcctgtagtcccagttactcggcaggggttgggggctggtgggggtggtagtgctgaggcaggagaatcgcttgaatccgggaggctgaggttgtggtgagtagaggtcgcgccgttgcactccagcctgggcgacggagcgagactccgtctcaaaaaaaaaaaaaaaaaagataaccaaggtttattgctacttccgtgatatcaccatatcaccaactgcgtaagcagtgctatttagttgaaaatacatggactagaccgaatatttctgcaacagtttaataagagacgatgatgcgactactgcagctgtccccaggcaattaaactcttcggcgaatttctttactattgcttttgaacagggaactgtttgctattttagggcactcgtgcggtaaagaacttcactgaaaaatgcaaatatgttttgctaatgtgggagaaagatgatgatcctctgaacctgtgacttggaaggggggataaaaaagaactatttcttgaattcttgccttgctcttgctgattcgatgcacacaaccccacgaacattcagattcatggcttgacaaagtggggataaccgggagctgcagccccgtctttgaagcttttgtaaagacaaacggtctgcaatgttaagccttaaattggcttttggcggactccagccttttacccttcgtttggtagatgttttcacctcgctgtcattaagcagggtcaggaaatggaagggccgtgaccgggtcgccgcgggcgctctgtgggcgatgagggtctcctgagcgagcaagaccagtctctccccgactcgccacgcgccacgcgccgcgcgccgcgcgccggttcctcggcttcccacgccgggggcgcatcctcccgggagctgctgcccttttccaacatggcgccgcgggaggcgggtcccgctcgtcggctcccggggttccggcgccgcgcgttttggttccggagtaacagtgtcgccgccgccttcctcctcctcctctcgccgctaccgccgtcgccgccgccgcagccgccgccagtccgcgcggcctcgggtggccggagctcagcctgcgcgcgccgcgccctgtgtctccgggtggggcagaagactcgccccttgaacctcccgcggggactctccgtggtgtggcggccctgg

SEQ ID NO: 14183 - DNA, 2300 bp, Homo sapien
ttctttatccagtctaccagtgatgggcatttaggttgattccatgtctttgctattgcgaatagtgctgcaatgaccatttgcatgcgtgtgtctttataatagaatgctttatattcatttgggtatatacccagtaatgggattgctgggtcaaatggtatttctgtttttaggactttgaggaatcactgcactgtcttccacaatggttgaactaatttacactccttccaacagtatataagcattcctttttctccacaaccttgccagcatctgttattttttgactttttagtaatagccattctgactgatgtgagatggtatctcattgtggttttgatttacgtttctcaaatgatcagtgatgttgagcgtttttccataggattgttggcctcgtgtatatcttcttttgagaagtgtctgttcgtgtcctttgcccactttttaatggggttgtctttttcttacaaatttgtatagaccccttccttatacccctttactgcaaaaattaactcaaaattaaagacttaaatgtaaaacccaaagtacaaaaaccctggaaggcaacctaggaaataccattctggacataggagtgggataaagatttcatgatgaagacaccaaaagcgattgcaacaaaagcaaaaattgacaaatgggatctaattaaactaaagagctgcacagcaaaggaaattatcaacagggtgaacagacagcctacagaatgggagaaaaattttgcgaactatgcatctgacagagttctaatatccctttcttttccttacaccactctaatccagatgcttggcttctttcttgtcagacatgtataccagcttttgaattgttctcagtaaatagaagctaccatttattgatgatttatacaatgctaagcattttgcatgcattttttaaattaatgctcacaacattttgtaactcttactgattcctgttttacaaaagctgaggcacagagaagttaaataacttgcccaaggtcccacaactgataagtagtggagccaggatttaaacataggtagtcttgttctaagtgccggtgacccccctgccggcgctgctcactgctctcagatttggcttgccaagggtcatcctggtcacatttatttccctctcaaaagtcttcagaggcttcacgtcacttcccagataaactaaagactttagaggatggaattcaagatcctccacgacatgtcgtcagtctgcttttatagcattatcttacatgtttgaatcctgtgtgtcttttaagttgaactcgttgccttatctgaactcaggcactttctcacttcaacactttgattcacgtattcctctctaattagaatgctttcacccgttatctctacctatcaaaatctttaacacctttcaaggatcagctgaaaagcctgctccttcattgaacttttctggataagccctgtcacatatggtctatctctcactcactcattttcttctttgaacctctctagaattccctgtatatgtcttttaagggtgttatcaccaactgccttgtattttgctgttagtatacctgtacatttcccatattatattgaaaactctgtaagtggggaacagatcttatttatcttcttgccttactccgtgattcctgcagatccttgcatatagggtatagtacaaagcattacacataacgagtaagtgttcaatacataatttgttgagtgactgagtgaataaatttttgttcttctgtttgttctttagttcattcatcttttaaagtaacatcttgaaagcaggttcagctcacatacaaaatatctcatagcgttctttatatggaccattgctctcacccagaatatttcttagctttttttatattaaagggtgaaatggaaggttaagagttagaagcgtatttgatcttttcctgaccctctcctgacttttgtgtgacttcaagcatgtcacttgaacctcccagtgacctcagctgtgaaacggggctgcctgatgtcacagaggattgtgaagagcagcaaatcacagtccttgtccaaactgaatcacctgcagggtctgacgcctgcatggaatgatgagggaaatttaattttccaagcaaagtggtcagttggacccacactttgaatgtctatgggcacaattagatgagtccttgaaaatctgttgcttttcctactcaaaatgtttctcatgttatgcttctaaatgttcttattttttagacaaaaaag

SEQ ID NO: 14184 - DNA, 2300 bp, Homo sapien
tagtgtacaccactttgcccatctaatttttatatttttggtagagatggggttttgccgtgtctcctaggctggtctcaaactcctgacctcaagtgatcctccctccttggcctcccaaagtgctgggattacaggtgtgagccatcgtgcctggccaccttttaaatctttaacttctgaaacttcaaaggttcaggtcctctctgagctctgccatcagctgactcatggctttagctagaacattcacatcactgggactgtttttcccacctgtcaagtaaagttgctggactgatctttaatgtcctttcctgccctaatgtttgataggtctaacagttgccatttttgatagatctgtagaatagaaatgataataaaagagaaaaattaaaccaaccccttctgccatttttaacctgataagaattactgaattgcagaaaaagaactcatcaaacttaacaggaactcttaatcctgagtggatctgctacatcattttttcacctatgacgtttatctctaacggacatgaaaaggacaaaatgaatcagtgatggcacagagccagctgtgtaaagatttagccatatggatagttaaggaaagcgggtctaactgaggttaaaaaccagtgaaccacctcaaaattagattcctttttggcttcttctactgataatggtggtaaggtaatctttgttttttaggtttagcttgttgaaaccattgtccatttagttaattaggccctgatttatatccttggtaaaagtaaatctcctcttagaagttgttactggtacatgtggatgggttttcacctcctagttttgagtcattcaggtcattcacttcataagggattggtccagtaagctgcatttgtcagtcttccaaataccagcatgtaaagcttgatcttttttattctgtttatccttggtactgccaatttatctgaaagatcaatgagaacataaaacgtttttctgctgtattctcacttttattacatctataataaaaatgtaattttggtaaataagggtggttcagttcatatcagaagtgtctttttttcattatcttcccagtagcaccgagagccaaagtgtaatgtttagttacacagtggtttcccagtttcttgttccaatctgcaaactacaagcaaagtttaactaagagtgatcatttttctctatctgctttaaatgggataaatataaagccagtagccatatatatatatatatgcatgtgtctatatgcatatatatgtatacttgcatacatatgtttgtatatgaatacacgatttttttacagataaaaatattttctctgatgtttagctttatgaaaatttgacatatgaaaatattcacatttgcatttcggaagaatgacatacttcatgtttagtaccttatgaggcatacttatgaatcatccagtaataaagcattaaataagaatttttagcctctgataggaaaaaatatttgtcaaatactctggaatacaatttttttatagaactgaaagactatatacctcaatttgactcttaaagaaaggttattacatattgttaaaatagatctcataatcatatcattaatgagcaacgtagtggttctctgcatatattccagcttttgttggattaatgtgaaaattctaagatattaccctggtttacatttgagaaaagctgttacaaaagacaggcaactaaatgtttaatagtcatattgatctttataattttgtgtatgtatttaagtttacataaagtatagtttcttagcttgcccttgactagtttctttcagtttttcatgtatgtgactatacacttcagaataaaatggaaatatctagttatacttcatcaggaagtatgattatgttttagataacattggactaaaaagttttatactacacatccaatgcatgctgtaggaagtgtaaaaatgtattctcacagtgaacacacaggagaagcccagtgcattgttctggtaatttcatttgtagtaacatggcatgtttatctctacagggggatctttggatgtatataggaaaatgccagaacatgtccttggaagaattgcagtagcagtaagtatatggcttcagtgttaggaaatttgagtgatttaatccttctaatcaagctcattcttcttatattctcaatgttttttcttgttcttcaatcccagttggctcctaagaccttcttgattttctcctgttttgttcttcttttcata

SEQ ID NO: 14185 - DNA, 2300 bp, Homo sapien
aaaaaaaaaaaaaaaagtctttgaaaccagactcgcatccaaatcccaactactttaaccagtggcaggatcactggagcagatggtttaacctcccagagcctgtttgctaaactgcaaaatgggggaaatgataccatttaggttaagcgcctggctctttctaaatgttggctcaaacggtggtgacccttcccagacttccaccactactggaagtttgcgtcccaaagcagacaccctcatcgccttggctccgaatgcagagagctagttccgagaagccgaggggaagctgaaggcgcgccctggccaaccctccccacgatcccccgccgcaacccctgtcggccccttccagcccacagtgggtggccccaggcctcgctagggtcacgtctctcgggtccccgcgcagggaagggtccaaccagcgactcgcaaccttttcggggtcccgagtccaacacccgtgggaatcccatgggcaccatggcccctcgctccaaaaatgctttcgcgtcgcgcagacactgctcggtagtttcggggatcagcgtttgagtaagagcccgcgtctgaaccctccgcgccgccccggccccagtggaaagacgcgcaggcaaaacgcaccacgtgacggagcgtgaccgcgcgccgagcgcgcgccaaggtcgggcaggaagagggcctatttcccatgattccttcatatttgcatatacgatacaaggctgttagagagataattagaattaatttgactgtaaacacaaagatattagtacaaaatacgtgacgtagaaagtaataatttcttgggtagtttgcagttttaaaattatgttttaaaatggactatcatatgcttaccgtaacttgaaagtatttcgatttcttggctttatatatcttgtggaaaggacgaaacaccgtgctcgcttcggcagcacatatactaaaattggaacgatacagagaagattagcatggcccctgcgcaaggatgacacgcaaattcgtgaagcgttccatatttttacatcaggttgtttttctgtttttacatcaggttgtttttctgtttggttttttttttacaccacgtttatacgccggtgcacggtttaccactgaaaacacctttcatctacaggtgatatcttttaacacaaataaaatgtagtagtcctaggagacggaatagaaggaggtggggcctaggcagattcatctctgcggtgcattttgcctctggccctcgggccctagtttgcgatctttcccatcttgcctctgcttccctctgcacaatcctgagtattgcagtaccttacacttaaggaaatttcgtcttgccaaagttgatccatttcagctccgaaacataacaggaactagtgcaacgataaacgtatgaggaacttgcaataagagtgacagaatcctttgaatcaaaaaaaaaaaaaaagccaccacttaatgagtatctaccatatgtcaagggcttcaccaatatttcattgaaatattccagaccaaataaataaataataaaagaaaaaaagaaaagggggagggggcagaaaaataaaataatgtttaaaaaattcctgacagccccaccctgtgggttttactgttttactgtcatcattttacaccaatcactgagaggtaaagcctgataagacttacagaggcacagaccctgaaaagatcgggacccaggtctcaggtaattgagttacaaaaacacagtcccgagtggtaagacaaagaggaaacaaagtccaaccacgttcagatttcctgcgatgacttaggcaatgttttctgaaatatctttccaacagaaaaatggtgcaactgctttgctagtgcttcagcatgcacgtgggccctgcggccactgggacctcagtcgatctgccgggagcggccgcacagctcccagcctccaggcgcgccgcaggaggactgttaggctcgaagccccggagccacccagggacagcggcgggtactctaccagcgggcgctgggagctgccgggcagcattccattcaggactcattccttttctcttcagtggaagtgaaatgatcctttccaggtaacagccgagcataggggactgcgggacatctccgcctcttccttggctctgggccttcgatgtaaggcgttagaggacaatctttgttggctggatttctgttcttcccctagagatatctggttctttggaggccacttgggcaattgggtgagtagttttaaatgtctcccttgggat

SEQ ID NO: 14186 - DNA, 2300 bp, Homo sapien
ttttccaaaaaatggtaagagagatagccaattttccaaacagaagtttcaatctttaacaggcatgataatgaaatttcctgttttaatccttaaaatagaatacctgaagtaacccaatgttaaccaatcagttttctttctactgttctgtctccacgtctccaccttaaagaaaagtgactttgatataaccaatctgctttttgttgtttctgccttcttcagtctattttctgtctctaaagttaacatcctctgcttgattcattgcaacatttattctattttgtggaatgaagttttgtccaattctaggagtgcaataatgccaatgagatcttgaatctcaatttgttttacttttgtttcttgacaatggagaggtttaggctagagagcattttcaaagtcatgagcatatagacttcaagtcaaccagttagatgagatcacctggtgataaaatagagaagaatgcaaggaccgagccctggagcagtccaacatttaaagattgagccaaagaggagaaaccagcatatcaaaaaggaggcccagtgagggaacaggactatctgtgacgtgtaggtaagttcagggggaaaagtgtttcaaatcaaaggaaccatgtcaattattcgcgattctacagagaggtcaattgagatatggatagagaattggcaattgcctttggaaacaagatcattagtaatcttgataagtgatacagatgatggaagccaaagctcgatcagggtagactgagaagtgaatgtgaagtgagaggtaggaacaagcactattggagagatcttgaaaaacctttctaagaatttatgaagatagcagaaaaatagggcagttcctagaggcgattttggagtcaaaggaagtttattttagatgggagaaatttcaatatatttatatgctgataggagcaattcaattgagagggaaaaaactaacgatgctggagggtaggtaattgtaagagtaaaatccttaggaatgtgcgtgaaaaaaatccggtcactggtaaagggactggccttcctaggcgcagggacacttcattcatagcaacccaaatgttactatgcagataagggtggttttgatggtgagaagataagggagtttatttctgatatctttcattttttccatgagttatgaggcaaagttgattagtaaaagtgggggttggggaggaggtatatagaaggctttcagtagagacgaaaaggaatgaaataatccttccatcaagtctacttaaatgtcaatttagtggataaaaccctcccagaattaagtacatctcccaaaccctttctctctctcaatgaccttttgctcctttctggtactcactaacatttgcaattgtatctttgttcgttcacttctctgattccccattagagaactacagaagggcacggactttgatttcaaaatgtatatttagccgttagcacaaggcaagcagatggtcactaaataaatacttttttaaacaaaaatgttaatgaacaccttcaaaattttgtcttacgccacctcgttaaaatacttgtttgtgcaagtcacttttcctctctgagctttcatttctgaatctataccatgggaattatctcttccttgcctacctcccctcgttatcaagaggatctgagccaataatgatagaaatgcttcattaagggccccttaaatgtaatggatttctatttttagcccactggtagcctcgcaggtagcaggtgctgaaaaagccttgcttattgggggttgggggacagcattgtttctgtgaccgtaggcgtcgaagctatgcagaagcgttccgcggaccgcagagagatggggctcaggccagcatccctctcgctccggcccttcccgggaggagctggccgagctaggatggggggcagggagaccgagggggcagtaactgtcaaacctcgccgcttggcgccattatttaaatggaacgtgcctgtctcgcagctgtacgtgcccggggcggggcttcgagcgccctgagcggggcggaggctagaggcgggctgggaaggtggaggggcgggccggggcggggccaggccggctagaggggcgggtctagcggcggcccccggcgaagttcactgcgcttgcgctgacagacgcaagatggcggacagtgcggaactaaaggtaaagcgcagctcgaattcacttctaatattcggccgcggagacggcgccgctgctgccaggggggatgggtccgaccctgg

SEQ ID NO: 14187 - DNA, 2300 bp, Homo sapien
ttgaatctcaatttgttttacttttgtttcttgacaatggagaggtttaggctagagagcattttcaaagtcatgagcatatagacttcaagtcaaccagttagatgagatcacctggtgataaaatagagaagaatgcaaggaccgagccctggagcagtccaacatttaaagattgagccaaagaggagaaaccagcatatcaaaaaggaggcccagtgagggaacaggactatctgtgacgtgtaggtaagttcagggggaaaagtgtttcaaatcaaaggaaccatgtcaattattcgcgattctacagagaggtcaattgagatatggatagagaattggcaattgcctttggaaacaagatcattagtaatcttgataagtgatacagatgatggaagccaaagctcgatcagggtagactgagaagtgaatgtgaagtgagaggtaggaacaagcactattggagagatcttgaaaaacctttctaagaatttatgaagatagcagaaaaatagggcagttcctagaggcgattttggagtcaaaggaagtttattttagatgggagaaatttcaatatatttatatgctgataggagcaattcaattgagagggaaaaaactaacgatgctggagggtaggtaattgtaagagtaaaatccttaggaatgtgcgtgaaaaaaatccggtcactggtaaagggactggccttcctaggcgcagggacacttcattcatagcaacccaaatgttactatgcagataagggtggttttgatggtgagaagataagggagtttatttctgatatctttcattttttccatgagttatgaggcaaagttgattagtaaaagtgggggttggggaggaggtatatagaaggctttcagtagagacgaaaaggaatgaaataatccttccatcaagtctacttaaatgtcaatttagtggataaaaccctcccagaattaagtacatctcccaaaccctttctctctctcaatgaccttttgctcctttctggtactcactaacatttgcaattgtatctttgttcgttcacttctctgattccccattagagaactacagaagggcacggactttgatttcaaaatgtatatttagccgttagcacaaggcaagcagatggtcactaaataaatacttttttaaacaaaaatgttaatgaacaccttcaaaattttgtcttacgccacctcgttaaaatacttgtttgtgcaagtcacttttcctctctgagctttcatttctgaatctataccatgggaattatctcttccttgcctacctcccctcgttatcaagaggatctgagccaataatgatagaaatgcttcattaagggccccttaaatgtaatggatttctatttttagcccactggtagcctcgcaggtagcaggtgctgaaaaagccttgcttattgggggttgggggacagcattgtttctgtgaccgtaggcgtcgaagctatgcagaagcgttccgcggaccgcagagagatggggctcaggccagcatccctctcgctccggcccttcccgggaggagctggccgagctaggatggggggcagggagaccgagggggcagtaactgtcaaacctcgccgcttggcgccattatttaaatggaacgtgcctgtctcgcagctgtacgtgcccggggcggggcttcgagcgccctgagcggggcggaggctagaggcgggctgggaaggtggaggggcgggccggggcggggccaggccggctagaggggcgggtctagcggcggcccccggcgaagttcactgcgcttgcgctgacagacgcaagatggcggacagtgcggaactaaaggtaaagcgcagctcgaattcacttctaatattcggccgcggagacggcgccgctgctgccaggggggatgggtccgaccctggggggcctctcgggcctgactccacccgggcctggagttgtagggagagaggcgcgcccggtctcagcagagggggcccgcctgcggcgggccgcgggccccgggtgcctcgggggcgctgacgggtcgtccccggcgtgttattgttgtgggcgcctctggcgggggtggcgggggaagagatagggagtccggaggtaggggctgcagctgtctcatgggctcggctttttcaccttccagttagcctccctgccccccatggggagctggggctgggggcagggtgctctcgtaggggggattgggaaagctccccgtggccgcttcctcttcctccttt

SEQ ID NO: 14188 - DNA, 2300 bp, Homo sapien
gctcactgcaacttctgcctcccgggttcaagcaattctcctgcctcagcctcccaagtagctgggactacaggtgcccactgccacgcctggctcattttttgtattttcgtagagacagggtttcatcatgttgcccaggctggtcccaaaatcttgagctcaggcagtctgcccacctcggcctcccaaagtgctgggattacaagcgtgagccaccacgcctggcccattctttttcttcattcctgacagtgcttgcagcagaccccaatagctctgggcagagattagttattgtaattctttggcactactcttggctaaatttattaaaactgaaatgtaaataagctttagatgtgccaaagatggagatattacagtacaaaagaaaccgaatgttggatgtagtattataattaaatcactttaagataggtaaaaataaaaagcctgaattgttgaaaaaacaaataaattagtttattatctctatatgtcctttcaagataatctgcagttcctagaattttatttaaatgtttattttgaaactatatgtttgaataaaaactgaagactgtcctttttccattgtgtggttttgacagccttgtcagagatcatttggctatgtatgtgtgagggtttgtttctgggctcactattctgttccattggtctgtatgtctttatgtcaagaccacactgttttgattactgtagctttgtaatacgttttgaaataaggaagtgtgaggcttgcagttttgttctttttcaagattgtttttgcttttgggagtcccttgagattttatatcaactttaggattttttttttttttactatttttgcaaaagataccattgagattttgataaagattacattaaatctgtagattgctttgagtattatggacatttaaacaatattgtttttgattcatgagcattatccttttttttatatttttaatttctttcagaaatgttttgtagttttcagtgtacatgtcttttgcctctttggtcaagtttattcctaagtattttatccttcttgatgctactgaaaattgaattgttaagttccttttcagtgtgttcattgtttgtgtatggaaacaggactcattttttgtgtgtcgattttgtatcctgcagttttcctgtttgtttcttagttctaatattttttttcttttgcatgaaacttttagagttttctacatacgtcatgtcatctgtgaacagagattaattttacttctttttaaatttgaatgcctttcatttttttgtgtgtgtgtaattgctctggctagtacttctagtactatgttgagtagaagtggcaagaattgccttgttcctgatcttagaggaaaagctttcagtcattcaccattgaatgtgatgttagtggtgggtttttcatatatggtcttcattatgttgagatagtttccttccattcctagttgagtgttttttatcatgaaatgttgttgaaacttgtcaaatgtcttttctacatccattcagatgatcatgtagtttttttcattctgttaatgtggtgtattatattgaatttcatacactgaaccatccttgcattccaggaataaaccccacttgatcattatgtaaaacccttttcatatgctattgaatttgaagtgtagatattcttttcttgttccttaagaaaagcatcttgtctttcaccattaagtataatgttagctgtggattctttcatagatgcccttcctgttgagttttttaattataaaagcatgttgtaattaattaattaatttatttatttatttttgagacggagttttactcttgtcacccaggctggagtgcaatggcatgatctcagttcactgcaacctctgcctcctcagttcaagtgattcttctgcctcagcctcccaagtagctgggactacaggcacgcaccaccacgcccatctaatttttgtatttttattaaatgcggggtttccccacattggccaggctggtgtcgaactcctgagctcaggtgatctacctgcctcggcctcccaaagtgctgggattacaggtgtgagccaccgtgcccagcctgcatgttgtaatttattaaatgctttttcaacatctgatgagatgattgtatagtttttcccattattctattaatatggtgtctaacactgattgcttttcatatattaaaccagtagctgttggattttgtctgattccagatgacctatgctacctcctagagg

SEQ ID NO: 14189 - DNA, 2300 bp, Homo sapien
ccaggagctggaggcaccgcccactcccctggcattccagctttgcaggtgaccctcctctacccaaagctctgtccccctgctcccactccagaagaactgcggcacgcgcttcgggcagcctagccacaggctttgagcgcctgcattcctgggggctggagggtggggtgccaaaggccctgagcaaaagccagagctcctctcatcaaagcctttacaaggtgctgggcccagaggctttgccttgacagagtggcccagggtttcaagggaggaggaacctccccctacctaggacccttcctgtggggggtctacagagtcagggacagaagggaagggacccacaggaagtcacagtggtgcccagggatgtgtcagcccccagccacggggacgcgggattcaagaatgaagtaaatacagtcacagccccaagtggtgttagaggtgttttttgtcttttctccctttcgtgctgaggtgtagcacacacggtgcgccctacagcatggtgagttgctgtatcgtgaaccctcacgcagccattgccccacgctggtgttttccatctgtgcgtcacccccggagacacctacacacataaggagggagttggccggggcaccccagcacacactggcctaactccaaggaggcacctcatctcttctggagccccttcccacaggcaaggggattcagagggagcatgttggcctggccgccttcaggcttccagagtcccaagtgactttccttgatgtccttctctccatcctctgcacagaggcagccttccctcctcttatccctgccatggggtttgggagggggagcctcaaactctgacagggaggagtcggagtccccagctaaaattctctgggtctagaaacaggtgtaaagcgattctggggatgtgatttgggagaaaagcacactttccacacagaggcggtcaggaaaggagcggggaggggagagtggggcacaggcagcgcctcccgtctatgcgcctgtgtgcaaagtggcacaatgccccccttcctattggcagtgcagcccctggccagcaaccactcgcacctgggctgggggcctttgtgtagggcacacctgtgcagccacacctacttgtagagcctcatagactcagctgtggacaaaagcctcacgccccaaacagggaaatgggatctcaaggggaagaagctggggaggcctcacaccctgcccccatttcctcctatgtgggggaggggagcagcacgaactcctgaagacttgggagcgtcagcagcttctgcggaaggggtggggctgagggtggagagaggaagggaaggaagaaaaggggagccttcctggccagggtaaccggcactaagaggcctcactccaagcccccgaggagcctgtggtggggctggagacccggctcaggcccctccaccacccttaaagtcctcagaaggtgggaactgaactggcacaggatgggaaccggctgtgcgctggccacttgattttgccagctgccctgtaattcagctggtgaggaaactgaggcacagactgaggtagaatgattcgccagtcactcagcaagtcagcagacggggaggactgaatcccagcctgagagcaccgaagcttgtatccctgcaataccgagccccaagcctgcgagccccggtgcccatctctgagttaggccgtcttggaagggttcccttcctcctacaagatggtgtgtgaggagccttcaatacgacccggggtgtaaagtgtccaactctagtaggggcctgatggcatccccgccgagtcccaggagagagagagaagaccccttcctggagtccagggctcccgggaagaaacactggcatttgtccctttgcttcggcttctggaggcagagactctgagcccagggagagccttctgcagccccatttcctcaaaaatccaacctgcccaggtggcgggtcatgagctgtgctcaggaagctggaatctgaccctggtggcgtcgggcccagtctccatggcagccgagcatttattacccgggcctccacccagcttggcagactttagacttgaggctggaggaaagggaactgaacgcggttctgggagcagcaagcccacgggtagcagccgaggccccagaatggtgagtgtgagggtctgtgtcggcctggccagggctgggggcgtgaacctcaggtggagccctcccctgactgttttcctttctctgctgcaggccaagtttctttcccaag

SEQ ID NO: 14190 - DNA, 2300 bp, Homo sapien
agtacccgggtgtcatctacgtccctgagccctgggctttctacacccttcacgtcagcagtcggcactgagtccctggcaccaggctctggcgctctgctgggtgggagggtgggccatggagggcatctgaatacaggagtagggggggtgtgggtgtgtaaccagagaccgagagcatgagtggggtgtgcctcgtgtgcgtggattcgtgtgtgtgtgtgtgtgtgtcttgtatatgtgtgcgcagagtgcatcattttcagactctactatttccgtcaagtttctgtttgatttggatcatctcaggatcggattctgttttagagtgtttctgggccaggatccgggcccctgccctcctctgcacctgaccacactccctactcagggctagtctgttcttcccggacatcttctggtagccgtgcaggagagggctgggtggggcagaggccaggaggggacctggtgtgtcacctgcccaccacctggctcatccctcaggcccaccctgaccctacattacataggttacgtcagcctactgtggctgttgagcaaagcatttctcctttctgggcctcatttgcactagatgggcctgtggtcccaaagtaggtcagtaggttggggttgctgacaccccttgggtgcagctttgggacagatgagtggctctgtcctgtcactgccctctccctgcctgggggctatgtgcactccagacccctgcccaggctcaggcccatgaggtatggagacaccctggcccccaggagctggaggcaccgcccactcccctggcattccagctttgcaggtgaccctcctctacccaaagctctgtccccctgctcccactccagaagaactgcggcacgcgcttcgggcagcctagccacaggctttgagcgcctgcattcctgggggctggagggtggggtgccaaaggccctgagcaaaagccagagctcctctcatcaaagcctttacaaggtgctgggcccagaggctttgccttgacagagtggcccagggtttcaagggaggaggaacctccccctacctaggacccttcctgtggggggtctacagagtcagggacagaagggaagggacccacaggaagtcacagtggtgcccagggatgtgtcagcccccagccacggggacgcgggattcaagaatgaagtaaatacagtcacagccccaagtggtgttagaggtgttttttgtcttttctccctttcgtgctgaggtgtagcacacacggtgcgccctacagcatggtgagttgctgtatcgtgaaccctcacgcagccattgccccacgctggtgttttccatctgtgcgtcacccccggagacacctacacacataaggagggagttggccggggcaccccagcacacactggcctaactccaaggaggcacctcatctcttctggagccccttcccacaggcaaggggattcagagggagcatgttggcctggccgccttcaggcttccagagtcccaagtgactttccttgatgtccttctctccatcctctgcacagaggcagccttccctcctcttatccctgccatggggtttgggagggggagcctcaaactctgacagggaggagtcggagtccccagctaaaattctctgggtctagaaacaggtgtaaagcgattctggggatgtgatttgggagaaaagcacactttccacacagaggcggtcaggaaaggagcggggaggggagagtggggcacaggcagcgcctcccgtctatgcgcctgtgtgcaaagtggcacaatgccccccttcctattggcagtgcagcccctggccagcaaccactcgcacctgggctgggggcctttgtgtagggcacacctgtgcagccacacctacttgtagagcctcatagactcagctgtggacaaaagcctcacgccccaaacagggaaatgggatctcaaggggaagaagctggggaggcctcacaccctgcccccatttcctcctatgtgggggaggggagcagcacgaactcctgaagacttgggagcgtcagcagcttctgcggaaggggtggggctgagggtggagagaggaagggaaggaagaaaaggggagccttcctggccagggtaaccggcactaagaggcctcactccaagcccccgaggagcctgtggtggggctggagacccggctcaggcccctccaccacccttaaagtcctcagaaggtgggaactgaactggcacaggatgggaaccggctgtgcgct

SEQ ID NO: 14191 - DNA, 2300 bp, Homo sapien
aagagaggaagaagccaggtggcaggagaggcagcagcagcagctgaactccatcctctgccctggagagccctgagatgtcactgggagcactagcaggaactgctggctttgcactttgccaagtaaggcctttaaaactactataggttgagcatccctaatccaaaaatctgaaatctgaaatgctccaaaggagtctgaaattttttaagcactggcatgatactataagtagaaaactcggccaggcgcggtggctggagcctgtaatcccagcactttgggaggctgaggtgggtggatcacttgaggtcaggagcctggccaacatggtgaaacccccgtctccattaaaaatagaaaaaattggccaggcgcagtggctcatgcgtgtaatcccagcactttgggaggctgaggcgggcggatcacctgatgtcaggagttcgagaccagcctggccaacatggtgaaactccatctctactaaaaatacaaaaaaaagtagccgggcatgctggcaggcacctgtagtcccagctactcgggaggctgaggccagagaatcacttgaacccgggaggtagaggttgcagtgagccaagatcacgccattgcactccggcccgggcaagacagtgagacttcatctcaaaaaaaagaaaaagaaaaaaatacaaaaaacttagggccggcatggtggcttacgcctgtaagcccagcactctgggagcccaaggcaggcagatcacttgaggtcaggagttcgagaccagcctggccaacatggcaaaacctcatctccattaaaaatacaaaaaagttagccaggtgcggtggtgtgcgcctgcagtcccagctacttgggaggctgaggcaggagaatcacttgaatccaggaggtagaggttgcagtgagccgagattccaccaccgcactccagcctgggcgatggagcaacactctgtctcaaaaaagaaaattctacacatatgtacttaacacaaactttgtttcatgtacaaaattatttaaaatgttatataaaattaacttcaggctgtgtatgtaaagtatataggaaatataaatgaatttttccaggcatggtggctcacacctgtaatctcaatactttgggaggctgatacaggaggatcacttgaggccagtagtttgagaccagcctgggcaacatagtaagaccctatctctacaaaaaatttaaaaattagctgggcataatggtgcacacctgtagttccagctactctgggggctgaggtgggaggatctcttgagccactatactccagcctgagtgacagagtgagaccctgtctcaaagaaaaatgaaagaaatgaatttcatgtttagacttgcatatgcattcccaagatatctcattgtgtatatgcaaatattccaaaatctgaaatttgaaacatttcagataagggatgctcagcctgtatcaccatttactatcaccatcattttgtattgaagaaagatacttcaaatctccagaagtaggaggggtataatcccagaactccggtgtgttttcagttaaacagtggcatttcagaagcacctgcccccatccctgacattttcttcatgtttgctgggaccactcagaaatcagaaggtgccttcagcaggctgggccagccacccagggacacagccagggacagtgggagggctgggcctgagcctggactcctgcactgaaggctgggctgtcccctccagcctacagctcatgtgtgactttgggaaaggagttgggccctctggtctttttgctccctgggtaaagtcagcggggggtgctgctccacattccctccggggttcataggggtcacgggaggatctggaggctgggctggcctgctaaagggaccagccactttttggagtgacattccagctggaagcgtccatcccaccccaggtgtgaggggggaagcagagggtgtcacatactgtgacagaggtggggtcatgctgccaaccccactctgaaccccagctcatcgagcggtccccccgcaccctgccacgctccatcacgtacgtgagcatcatcatcttcatcatgggtgccagcatccacctggtgggtgactctgtcaaccaccgcctgctcttcagtggctaccagcaccacctgtctgtccgtgagaaccccatcatcaagaatctcaagccggagacgctggtgaggccacctcctgctccctgcctgtaagccctaggagcacagtctgtcctgggaggctg

SEQ ID NO: 14192 - DNA, 2300 bp, Homo sapien
tcatcttgttcattcagaaaggcccagccccctgccaggttggactcccctcccctcaaggggtagcagcggactccagaaaaaaggcagatgtgtttgtatttaagagattggaggattaaatgagctagagaggctccctccacacggcctcatcctctgatggctggaagcccacctctgagtgttattaaatcgatgatgacatcatgggcactgcatgcccctccctctggagcccagcaggcttgcaaagcctgcagaggataagaaattggggtcagagcgggaagcctcaatccttcttctctggtgtataccgagatcgatgtgtagatcagattcaccagaattaaatctggggccccgtctgagtgctgtccttggctgacccttgggcacagtacttcagctcagggcctaggtttttctctgctacaaaacagagacaatcacctgttctccttacgacctggtgtgtgtggatcaaatgaaacaaggaaagctttaaagcaaatgtgttcttcaggggaccaggggcggaggggggggattgaggtgtggcctgtgggctgctagagcccaggatggggctgatggaaaatgactcccaggcaggcagtcctagcctcccacagccaagaaaggacatgcaggttctgaccaaaggggaaagaaataaatccaataaacatctcccaagaagaaagacaggaaagaaaatagaatggaaataggcatagctcagacccctcatggtctgggaagcagaccaaggatactgggcaggggaatggcacattgcatttgcatctgaggcacatcccttccaagaggcacatcccttctgcagcggcttgagggctgggtgagaggagacaggactggagacctgcacatgtcgtgtgcgcctggtgtagcacgggggtggtggggagaatgggagttggttgcagttgttctagttagcggcctgggctgctgacagtgaccgtggggaggagagagtttgtgacattgacagtggtgtggaaggtaacctttctgtggagggaaacctcaggtctcgagacgggctattgtaaataacttagtccaccagtgctgggctctctgctaagagtttcatatagtcatcacaactccaatgtagtagatgcaataggcatcttcttgttacagatgagtaaactgaagctgtgaggggttgagccatttgcccgcatcacagctagttcaaagtggtaccactaatgaagtcctggcaatctgccctgcaggctgttctcaggtttgacctttggttctgtttttcacttgaggatgctgtccccttaggttctgtctgtcttgtatgctccggtgactcacgagcctgtccactgggttcccaggtctcgcctcagcttcagaccaccggtccaacagccttcctgacccacctcaagcttaatgcgttcaaagatgaatctttatttacacgaaatctgctctagcccacttcccggggggtgcctccactatccacccaggggcagaatccggccactgcctgaactcttctcccctcaccccccacatccagagtcccagtcaccatacctctcacacgactctagatgtcaccaactcgctccttcccactgtcaccgccagcccctcactagaacatctgcaacccacgtgctgcaccacgcgggtgctacacgtgcaggtctccagtcctgcctcctctcctccacccgtaagaacaagggaaatcccacagaaccctctgccccggggagcatttaaatcagcttagtctatctccaggtcgctaccccgccccagcccaacacccaggcctcagtcaccctagacagagattcccgtacccaggcaggcaagggaccctaacacatcccagcccgctggtggtcacgcgcgcagcccggacaggccagcagcccccgccccgcgaggacgccacactcgcagcgcccggccctcccctagcggagcccgccccgtctccctccgccccgcctccctccgctccgctccgctccgctccgccccgccccgggtccgcagccccgcctgttcctcccgagggccgcgcgctctcgccggcccgccccgaaccgccccgcgctgggaatttgcggcggcctccgccggggcagccgagctgaaccggtctcttcctcggaaaggcagggccgaggggcctgcggggcagccatggaggcgacgcggaggcggcagcacctgggagcgacgggcggcccaggcgcgcagctgggcgcctccttcct

SEQ ID NO: 14193 - DNA, 2300 bp, Homo sapien
gtagtcacctcatgtatagtgaccaggctatcataattctggagaatctaatgatttgacaaagttgcccctctccttcctattatctcagtaactgagattcttggagacagtagtcagatttgcagaaactaacatatctcccgggaggagaaagattgagatatactttctttccttttaaagtttgtggtagattgaaaaaattgccacaaattttctccatctatgtacatgagcccctttacaatgtaactttgtagcttctttcatcaagagatgaaatctatttctccaccctttgaggctgagcttggccctgtgacttgtgccggggtagtatgactttaaagcagaggtatgaagagctcttgcacactggggcttcccctgttgttgctctttggagacagcaaagtgaggcacactcagggctgcctagtggagcctgagagaccgcacagagcagagagttgggctttactagagttggccagatgggtattgtgaatggagacggggcaagggagttcagggtgtatccacaggaatgaccaaaatagttgacaatgaaatttaagccgggaaagaagggaagccaggatatatatgatatatatatatatcatatatatctatatctcatatatatcatatatatctcatatatcatatatgagatagatctcatatatatcatatatatcatatatgagatagatctcatatatatgatatacatatatgtatataatatatgtgagatatatgtatatacatatcatatatatctcatatatatcatatatcatatatagatcccatatatatcatatatagatctcatatatatcatatatatcatcatcatatatctatatatcatatatatcatatatatcatatgtatcatatatatctcatatatcatatatacatctcatatatatatcatatatatacatctcatatatatcatatatatacatctcatatatatatcatatatacacatctcatatatatcatatatacatctcatatatatataatatatatacatctcatatatatcatatatacatctcatatatatcatatatatacatctcatatatatcatatatatacatctcatatatatcatatatacgtctcatatatatcatatatacacatctcatatatatatcatatatacacatctcatatatatcatatatacatctcatatatatatcatatatacacatctcatatatatcatatatacatctcatatatatcatatatagatctcatatatatatcatatatctcatatatctatcatatatatatctcatatatctatcatatatatatctcatatatcatatatatctcatatatctatcatatatctcatatatctatcatatatatctcatatctatcatatatatctcatatatatatcatatctcatatatatctcatatatatctcatatatatctcctcatatatatatctcatatatatcatatatatatctcatatatatcatatatatatatgagatgaaggccagagaaaaggtggtaagatctattaattgtaggtcctattggaatcaaaagattgctggacttgtggtgctggacaacccaaaagtagtggtcagagcctggaatgcttgaaatttagattatggaagcaggactggctacataatttgtggacccggtgcaaaatgaggatgccttattcaaaaggcaagtaaaagcttttaccttgcttctagccttctctctctggactttttgtgctttttatatgctacttatgaaaatttctaaataaagaaaaaatacaattttaaattattagcacgaattttaccatttatgttcatattgtgcaatgtggaatcaccgagttacacaattcgtatgttacggcttgtccccagagggtgctctgactagccagaagagacaaacagcgcaacaaagactcaggaagcttgcaagcaggaaaacaagatcctccctccctcacgccgcccctcccccaagctcggagccagaggcgggcgcgctccctcgggcacgcgggtactctggggctggcgcaagccctcagcgacgccgggcgcgtgcgttccgctgcctccagcccctgggcaccgctgccgtgcgctcgctggcggggagaggcctgcagaagtcaggccaggtgtctctctttcccttgggcccgcggcccaaccgcatggcaccaggcagcccccagcggtattgcgacctctgcgtcagt

SEQ ID NO: 14194 - DNA, 2300 bp, Homo sapien
agcaatgagtctggatgaatcaggtctcccttagaaaacaaaactggaagaaggggcctgtgtctggacttttttacatcaccttcttcagaaagttggttcggaatagaatgtagaatgattcaggaacataatagggtaaaaggctatgaggagatggtttttctaaagagccaggcactcctccaggtcagcttgtgcccaggtaatcaaagtgtgttggcagaggagagggagggtggtagggagacggagttagagatatggagagacagagagagatagaaaggcagagaggagacagatggtagatgaggtgcatgcttgccgtatggagccagaaaaggaagtcatcacacatctgaatgtgtgaatccgagaccaaaaagcctgggtccctgtcaaacactgggttttttcatgaccctgaagtccccaaataaaccagccagcttcccccacttctctatcagctatttcagagacgctaccagtagaatcttaccttcagcccttattgccaatgctgtttttgtttatggtaaggagaaaaataactcgtgtttctgtagggatctgcaataagtgggtaaagctgagctgtagaatggagagaatttgagaagtgacccacacctccaccaatagctgcaatggaagtgaggcctttacctcctagaattggaatggtggggttcaaataaaataatgtatgtgaacttgttgagccgagcccagtcccttggagccacataaatgcatttgttctttctctatggtaaattttgtcctttggggaagggaggaagagggaggaagtcactttcatattgagttttttgagactgtcccagaagcttcatcacctaccattcactcctaccatcctaatccaaggcctgtccccctatctactcttgccttccagagtttattctccatacagcagccagagtgatctttttaaaaaacacaaatagcatcttgtcacttccctctttaaaacccttcaaatgcccccatcacagagtagacttaaaccctttgctatgggttattaggccctaacgtgtgttgcatcctctgacttcatctatcattcttactgtggcccactctgctgcagccacactgacctttctgtttccgagctcaccagactgttccctcctcaggacttttatattagctgtcccctttgcctagaataccgtctgttcttgtcacttgtcatagaggtcttgtctgatcacccaaactaaatgagtgcccccatcattctatttcatttgcttcagagcaaatggtaatgataccagttcaactgatcttgtctatcatttgttgacttatttgttccattactgaatccctagtgctaagcagagcctggcacgtagtcgacctctaatattcattggataaacgatcgtttcaaatcctaacaacaatcttgtgatgtctgtgagaaaacggaggttctgccggctcaggatgagattcctgctctgtctgaacgcgggactcgctttccttcccaggatacctcgctccttccaccgcgagcgcagctccccttcgctcccatctttctctcacacttaacccctttctccgggaaagtcaggccgtacttccagtcccttctcagagcctggtgttgtggctctcaagccctcccacatttcgggaactcagaaacgccgcccttttcctgaaatggaccctccgagtacgcgcaaccccttccctaaccccggctcaggggcagaagcaggacccgcaccgtctatagtaaaatagggtggtctccttagcccatcagcttagcgccctcactccgcccccactccctggctggagaccctcagggccgtttaggggccaggaggaggttccaggagtcaaggacattgaggacatccaggcccaaacgggatgggccaactacgcgcagcagaacctttctctaccgggcccgcgtgtgcccgccggtcggcttaggcggagacaccccacttagcgtccctcccgctcccgccctctcctcccggccctgtctgcgaaagctcgtcttcctccccgcccaagttccggcgccgctcttgcgggagcgttccgcatcgccccgggggcccctacgcgaggatctccggggccgttggcagcgcctggcacttctgagctcggcggacgagagcctgcaggtttcctccagtcagggacggcgaagggcggaaagcgcaggaggaggcagtgttaggccttaggccgggtgggccgggtcaggagagacgcgc

SEQ ID NO: 14195 - DNA, 2300 bp, Homo sapien
ttacacaaaagcacacagagtgatcctcaggacccccattccccaggcacctgtgaggacggtgaaggtgaatgaatggtagaattgttaccagcgagaccagcagcagcgcagctaggacagccactacagtgcgccccttcagcaagcagcatgcagactctgagcacaagctgcagaccacccacacgtcagaggtgcctggggcacccaccagcatgccctgatccttggggaatttgcattctttgcacgtgctccaggtcgttctgatgcacctggagatttgtgcaaggcaggaatgtgggctgcagcccattccctagctgtaggggtgttctacattcaactcagctggcttaaactcaactcagtgaagaggactcactgtcgtataactgataagtcccaaggggagtggggttaaggggtggcttcattcaggagttcaacaagatcctccattctgtcatccagtgtccacctcatctcaaggccagatcctccttccctaccctgaccctgtcaacttctgagcctacaaagttccttgtcccaggctgggagaggaggcaggagtgggagaggtgaggagagagagttagttcatttgtttgtttgttctaggggctcttttagaaaggcaagaaagcttgcttcccaaaaaaactttttcttttgtcatattgccctttctgaaacgatgggctgggaagggcaacatactgattcatttcagcctgaaccgcatgcctccttacacacacacacacacacacacacacaccagggacggaatcaccttccccgagtctgtggctgaatgggtgaggtgaagatgaagtaaaacccagatagccaaccgaaagatagtgaggttgggagacgagcacaagcccacttcacttatgtgaacctgggtcttctcaaactccagctcatcttcaggggccctgactgaacatcacctcctctgggaagcccttccaatacctcccagatagaaaactctatcctttgtgcacccacacaccacctgtactcacccatccatccacccgcccacctactttgttcctgggtgttaggggctgagtactccattgtgaaccagagatttctaccctgatggtgttttcagtctgcacaggagagaaaagttaaatgatcacaccaattgatgccttgcttctctactaagcacaatgaagagaaatgagggagagcgggctggggaatatcagcatgtgtctgggactcaacctggtggggacgggaagagggggtgaaggaagcctttcctgagaaagtgggggaagggcgctctgctgtggctttccctgcatcttggccttcctaccctctgcctcggcttcctccattgctggaaaagcctccacaagcgcggtggaggtccggggcctggatttaaagctcttgagataaatgtgcattgaatttaactaccagtgattagaagagggaaagaaggtggcagggttacaaagaagagcttcacgttaggttaagagggggtgcacggtgtccctgggtgctttggaatgcctcaggtgtggaggctcagggagtggcagtggaggcgaatctgcatgtattccagggtcagaagaaacactagcctctacaattcaagccgcagggtgcagggagacacggggatgtcttagaatggacctttgagggacatccactcacttggccaagggagacctgcgttccagcaggtgttcctgagccagcttgggtaccctctgagttttgtgaatctcttttcactgggaaatgggaataaaaaccacttttcctgaacagaatctgactgaggcggtgcggtgctacactggtgagggggttcccaggagcggttctctggagttttctccagaggctgacgtggggttggcggagaaggagcgctgcacaggcgcgtcgaggcagcgcgccgcctgcccaggtggcagagcggccgagactggcccagagcccgagccggagtggtgtccggcgcccctcccctccgctcgagccctcccacttcctctgaatgagccgcagctgtcagggagcccggcgccccgcgcagtgcaggctgcaggcgccgcgccgaggaggctgccgctctggcttgccgccccccgccgccgctgcacaccggacccagccgccgtgccgcgggccatggacctgcccaggggcctggtggtggcctgggcgctcagcctgtggccaggtaggtgcccaccctctgcctccccttgcctctcggagtccctccctgg

SEQ ID NO: 14196 - DNA, 2300 bp, Homo sapien
gagatttagtaagtccctggaactcccctggggaacgaatagctgcctacctatgtcctaagacacctgtgaaactcaaataaggcagcaagtaggaatggaccctgcagttcacggattcaaagcacaatgctgagcttgatttaagaagactttcattcaagtcctcgctctgtcactgtgtgctcttgggcaattcccttcccttctctaaatccgtttactcatcagcaaaatggggacggtaattctttcctcacactgttgcatttaggactcccaagaaaatgtggttaaaaatggcagggccgggggcggttgctcatgtctgtaatcccagcactttgggaggccgaggcgggtggatcacgaggtcaggagttcgagaccagcctggccaatacggtgaaaccccgtctctaataaaaataaaaaattagccgggcgtggtagcgcgttcctgtagtcccagatcctcggggggctgaggcagaagaatcgcttgaatccaggaggcggaggttgcagtgagccgagatcgcgccactgcactccagcctgggcgacagagtgagactactccggtctcaaaaaaaaaaaaaaaaaaaaaattgcacaatgacccacaaagcacttcctggaggctggttactctattattattgctccaatctagacactggtctcccggaaggcaggcatcccatctcctctctgttcccccagcactttccacagagcaggtgctcatatatgacgttgccttcgctgtccaggtgaattgcaccggtaattaccgtggagcaggaagccagcacttccgggcttgccaggctgtcctgcttggagaacccctctgcttccacctctgctaactcctcccctccaccctctccgcggttctgtatctgcggaaaccggttctgctcaggtgcttgggagggagactcctttctcaagacttgcgaggtcaccttcaggtgactgtccctcaaatctccgcagcagctccaggacacactgtgccccgagtcaggattggatcaacacacaggacgcacctgtgttatcactccaccagtagagcggcactcagtggtagtgtagacagtcctagggcagggcagcttctataacaagaggttccttagggagctagcggccgagtggaaagagcgggaggaacggctcgggcaggcaggtcctgtgctgtggtctaagtcacttcccacgtccgtcccactctgatcgtcagtttcctcctctgcaaaactcactaaggcggccttcgggcaagtcatcgcggcgggaattagattcgaaagagtgcttacacaaatccgtctggccaccctgtgccccgggccagcgcgaggtgggggtgcgggcagggctcccgggcttgcggctgccacgcccctcccagcccgccgcgccacactcacggcccacgggccgactttgcgagcctccagggggcgaacccgaccgccttctttgcccgcgcagcgcctcggccgtccagcctgtgacttcaccagcgtccccgggccagcgggacacccgagagcccggggcgccgcccgttctcccagccggcaggtgccgggagccagcctcgcccagccgcgtggcgtccgcaggcccgaaggggttaaggccgcggacccgggcgcccgtccggactccgggagcagcggtgcccggcggccggcgatcgagcgggaggctcggggcacggccgctggcgggctgcgcttcctcctcctcctccctccgcctcctcctttgtagcgagttcccggcccctcttcctccccccgccccccagcccgggccctctccctctctccctttcttcctgcctcgccttcctgcggcgaaggaggctcatctattataaatgcacattcggggctgacatcagcgacgagcggcgggcgagcgccgacgagcggtccctgcgcgctgcccgcccggagcgcagcccccaggctcggccgagccgccggcggggcgcggggagcgagccgggagctgccggacccccttccgccgccgccccgggccgccgccgccgcccccgcacgccgcgcccgcgcccccgctccgccgcggagtttctgcatgactgtcacaaaggtaagcgccgctcgcccgccgcgcccgggacccgccggcgcctgcatcccccgggctaggctgcggggggcgcgggggtgtgggtgtggggagggggcgccggtgccgggaaggtgcggcgcgcgcctctcttgctgccggatccgctcgagtcactc

SEQ ID NO: 14197 - DNA, 2300 bp, Homo sapien
aggggcacctctcatcaagggacttcttggccgtgtccacccagcctggaccctcatctccctctgcaggtgcggatctgggagatccccgagggcgggctgaagcggaacatgacggaggcgctcctggagctgcacgggcacagccggcgtgtggggctggtcgagtggcaccccaccaccaacaacatcctgttcagcgctggctacgactacaaggtatgcagtgggcaggcagctgggtggagagggattggggaagagaaaggggccttttgggtacccgtaggaagcactgttgcttcctaagcaaccaatatggcctcatctgttcatttgcttattcattcattcattcattcgctacacgcaactgagcaactcctgtgcaccctgtcattcctggggtccacagaggccggaggcatcttttctgccttctctggtggttgattggaggagaatgccccttccatgcccacaccctttgcctggccacttcttaaccaagaggtggcaaaaggggtaaccaaagctgctggagggcaaaaagtggagcctcagccccgagccccaggcatatcctcaaaaaaaggtgggctgaccacatgggacctgacaaggaacatgtatccttcttgctcttccataaactgagcccaggctggtgctgggatctgaccaaggatattgatggatttgtgtgccagggatgtatcagcctttccatatagaactcaatgaccccctcctgcaccccagcacaccccaggccctgcatggggcgcttctcccagggcagtcaagtgtgcactggggacaaacaccccaggaccctagcagccactgaccctgcctcccatgcatctgccctcgcaggtcctcatctggaacctggatgtgggtgagccggtgaagatgattgactgccacacggatgtgatcctctgcatgtccttcaacacggacggcagcctgctcaccaccacgtgcaaggacaagaagctgcgtgtgattgagccccgctctggccgtgttctgcaggtggaaccctacattttttgagattgaaggggaaggtattgagggctggggctcagctttcagcaggcctggaagaaaaaggctgtgccagcccccttctccagtgcatctcactgcacctctgttgaacaacctttctctctcctgggcccttctcagctcataggaaccctgccttgttctgggtggggagggacctcataccctttcctgtccccactgcaccccctacctccagacaggattcttctggcttgctctgggggctgaactggtgacacccttcagtgcatacatccccaggtgttacccaggtccaccacaggcacaggaggaggagacactggactcactgcccagccacttgataggatgagcctgagggaaatggctagggtgccaaggctgatggtgaacttagctccacttttggtctttgaatctcctgggtcttgggtttgaggaaggggttaagtgccatttggaagtaagaaattaccattttttgagcacctgctgtgtgctggtcatggggagagatggaatggaaaatatggatgatatctgaggtttgccttctacacaagaagggattaatgcttgatctgggtgtgtttaccttggaatagtccaatattacaagaccagaaagttttctagtactataggttgagcatcccaaatccaaaaatccaaaatccaaaagactccaaatccaaaactttttgagcactgacataacacccaaaggaaatgctcattggaacatttcagattttggatttggggatgtgggaagctcaactagtaggtataatgtgaatattctgacatcggaaacaatccaaaatctgaaacacttctgggcccaagcacttcagataagggctactcaacctgtaccactacaaataagaataatgagagttgcttagcatgattagtgttaactgacatctgctaagagctcactgtgtggcctgcactgtgcccggggctctgcacatcatctcatttaatcctcaggacaaccctctcagctgggtgctgttactcctctcatgtgatacgtgagaacacttaaccttagcgaagttgggagactcgaatctcacagttccaggaggagctaggattcaaacccagagcccatgccaagcagaaagaatgtttatgaacagagaacccccacctccaattcccaaatggggccatgagcccagggaaggtgaaggtcttctcttgggctacacttt

SEQ ID NO: 14198 - DNA, 2300 bp, Homo sapien
aatccaaaggggtcggttttaagcacaccattcctggttccccaacaggttaagaggcctcgtatttactataaggaagccgtacagacagcttagttgactcaaatctgctaacctgcccttcgtttccattcttgtgccttgactgtacgcaacagtaaagatagccatggaaaaaggggaaggcaagtggctttttccaagctggggatgctccaagtacattcttatttaatccaaccctaggtgatggacattatagtcactaaaggaaacggaagctcagaaaggtaagctgggctaaaaagaagaaaaattgaacttgagccagttctctcggactcgagagcctgccttctgtccacctttccttgttgcctcaggaagtactagaaaaagaaggagcagttcttactctaagcttccttctctctggtcctgtccttcaaagggctctgtttcaggcccaaactgtccactttaatcagggccagcttcacaggcatgtgacccgtgcagcacgcacttggtttaatgcgctgctgtcactgtcttggaattcttaatttttaagcaaggggctccgtgtttttcattttatgctgggccctctaagccagtcctggcttttgatatagtgtatctcctccgttggtccttctgggtccccctcatctgcctttagcatgcctgttctatctggtagaggcatttgaagaatgcaccctggcccggccccagtcctgctacctggcacactggactggagttgtttactggtggctgtctcctcccagccggccaccacacctcttgctggcaaggaccccgaccttggcttactgtttcttccgtgtctcctcagccaacagtgtcgcaggtgtgccccatgtggagagggctggagacctgcatgcagagcactgggtcattcaggtcagggggagtgtgcacagctgacctgcctctcaggggcttatgcttgtcttgggcacaagaaagactccaaaaaaccactggtgtttataaaagatagggttcattcaacatttattcgtcatactgttgaatacgtttcatgacagtttgactcacctctatattcccagcacctaatgttatacctggcgcaataaacaggacatttgttaagcagttgctctggtctccgctccctggtaggctgattacggaggacagtccctgacctctaggaggatcggatgcttaatacacgagtaaatgattcatgcagcagctgcccttggtgccccaggatgcacagagctgggttggagaaggcttcctgggaaggggaactggatttgtagggtaagagtgagagattgggggtgctgaggttggataaagaggagggagctccaagaatggagaaccttggaggtcatgtgtaggaacttgaatttttcccaaggcagtgagaagccaggaatgttttccaggctggagtttactctttataggttaaacagatctcatcatcccctttctacagaggcagaagcctgaggcctgggggagagagctgagatcatggagccagttgggtcgagccctctaggtcgaggcctgttcccagtaatccaggctgcctcttgaccacttccatcctcacagtcatagagacctggtgtggaggcaaaagcaggcttgaagtgactcgaggtgacagtgaccagtgctgcaacgttgggaacagaggggaaaggccaaatttgagagatctgtaaagacaagatttcagttttaaacaacaaattgttccttagagtaataacgtatttgtgtttatcatggaattttcaggtcccattggtgaaaaatgactgacaggtctttgctttggggacaagtttttcaggaagtacaggacccccagcaatctgacatcttgggaaccttcattgcctcctcactgacctctcttatgaatatgagggctccttttaggtgttcacttgaggaatgaagcattgggtcctgtgtaggtttctctttggggtgttggaaaagcttctgatacaagcagagtaatttcagttccactaggtagggtaaccacatttggatatttttaaatggtcagtggaattgggaaaaagtctacaaaagtacaaattttcagtttaattttaactttgcgcttcactcacacccaggacttggcaggggaagtgggccttggttttttttttttctttttaaagcagaacacaccctgggtggaaaagggatgttctctttgcatggaagggttagaaccaagtacagaggaaatg

SEQ ID NO: 14199 - DNA, 2300 bp, Homo sapien
atatctctgcatttgattggttggtttttaagggattactcctctggaaagacactgtctcatattgcattgctagcagcgtggtcttaactgtggttaaacttttaaattgaaaatgaacatttaccatcaaagagaacacaaacttcaggactcctatgttacacagatcatacacaccatattgacctgttttgataagagttctgtttgaatacaatcctaaacaccatatccagaaataacaactgtctcaatggcataaataggaaatttggggttcctcatgtattacaaagaagccaataaaacttagaataaattccaactatacaaataggcttcaataagattaacaaaatctgaggatgacaggcaagtcaacaagttaaataaattatactatttatacccagataaaataaaacaatgacttctaacttttatggtgcatttcccacctaatcagagtaaacatcagacttcaaattccatttatcattttatctgaaagaatttactgagtaaaatccttagttgcagggctttacacttgcaatccatcaggttgcaatattaaagttactacagcttcttccccagtgtaagcattctgtatgtgttttatttacattgtcactttttatttcctcctcaacttcgtatgtctaagaatgaaactggattgctattatgcaacagtattttaactttgcaacatacatactggcttatctctcctttgaactcctgttcctgaaaaataaacatatgtatccagaaaaactaccttgaggcgtgtggggaagagtgcagacatgtagaaacaaacactaaaatacagtcgtgtggaaaggtaaggatgtatctgtcctcgttgacaacaatccccgtggtttattaacagccacaggcagccaacttagtgccgtaagtcggtaacccagtgggcatcggggctttaaggtctcttaaaacttaatgtgattcaaaaatacccaaggcaaccacgccgaaaaaccaggagaaagggctccagttagagcctccttggcaacccaaaccgaaccgaatgactcaggtggacgattagaataaaccgtgcgccgttctctttcactaggtctataaagcccagaaattatgtttggtccagaaaaccaggagttatgagcaccttccttttccaccttttaatattctacatatctagcaacggttcttaatccatggtcttcattcatttattgcctaaacaagatcttgggtgtctcttggtgatcacttcttccaagctgacctaatatgacagcaaagtgaaaagcctcttcgtgggaagggtcgcgaccgcgcggtaagtcatccaaaagtggaagcatcttgcttttactgacttatgtatacgagggtggcgatggtggcggcctgacagggacgaggccggaggggaaggggcgcgcgggctgctgggcagccgcggtgggggtgacgggggcagccacgctccccagcgcgagccgccggacccgggacccgacgagcccctcccggcattgcaccctgacccctctcctccttccaggcctttcatctgccctcccgctgggcagcccgcggtccccggacctcaagccgcccgcctccttccgcaaccccgtcgcgccgccccgcgaagccctcggccgggcggggaccccgacccgacccctccggccgcgcccctccccctcgcagaacgcacctgcggccccgcccccggccgaacgctgaggcggcggctggctggcaaggccgggcggctcggccctcgaggcacagtcaccttcccttcccccgccattccgcccacccccctcactcagccacagagcagccgccgcgctcctcagccgccccgaaatctaaaggggtccgtctccggcaccactaccaaatggccgagcctccctggccggctgcgcagcccgcccattggtcccttcccccccccgccgccactgccattggctgttgcccggagaccctcggcggcgattggctcgggccgctgccgctcgtccatggggccgcagatcccgcctccacggcgatcaggttagtgtgcgccgcgggtgctgggggctcgagaaccgagcggagctggttgagccttcaaagtcctaaaacgcgcggccgtgggttcggggtttattgattgaattccgccggcgcgggagcctctgcagagagagagcgcgagagatggagatgggcagacggattcatttagagctgcggaacaggacgccctctgatgtgag

SEQ ID NO: 14200 - DNA, 2300 bp, Homo sapien
ccggtgggttcgtggtctcactggcttcaggagtgaagcggcagaccttcgcagcgagtgttacagcttataaaggcagtgtgggcccagagtaaacagcagcaagagttattgcaaaaagcgaaagaacaaaccttccacacgacagaaagagactccatagggttactactgctggctcgggcagcctgcttttattcccttatctggccccacccacatcctgctgattggttcactttacagagagctgattggtccgttttgacagggtgctgattggtgcatttacaatccctgagctagacacaaaagttctccaagtccccactagattagctagacacggggtgctgattggtgcatttacaaaccttgagctagacacagagtgcccattggtgcattcacaatcccttagctagacataaaggttctccaagtccccaccagactcaggagcccagctggcttcacccagtggatcccacacccaggcgcaggtggagctgcctgccagtccccggccctgcgcccgcactcctcagcccttgggcggtcgatgggactgggcgccgtggagcagggagcggcgctcctcagggaggctcaggcatggcaggctgcaggtcccgagccctgccctgcggggaggcagctaaggcctggcgagaaatcgagcacagcagctcctggcccaggtgctaagctccccccaactgcccgtggccagcggggacggccggccgcgctgagtgccgggcccaccgagcccgccgagcccacgcccacccggaactcgggctggcccgcaagcgccgtgcgcagtctcagtttccgccggcgcctctagtcttgcttccctccagtccattcttcatgctacaggaagagtgagttttctggaatacaaatctaatcacaaccgttcccagctcaaaacctagcagtactctagtactggtgcctcagactaaaatccaagccccttgcttcctgaggcagagatgagtgtacgtgaatttttaaaaataaccatacagaaaaacagattctttgggatgtgcagttctgcgaatttttatttttatttatttttttgaggtggagtcttgctctgtcgcccaggctggagtgcagtggcacgatctcggctcactgcaacctctgcttcccgggttcaagtgattctcctgcctcagtctcccaagtagctgggactacaggcgtgtgccaccacccacgcctggctaattttgtatttttagtagccacgaagtttcactatgttggtcaggctggtctcgaactcctgacctcaggtggtccgcccacctcggcctcccaaagtgctgggattacaggagtgagccaccgtgcccggccttctgtgaattttaacacatgtatagattcttgtggccactgccatctattagtccccaaaacaacctcatgctatcctttcatagtcgtactctccctcatccctacccctatctttttaagaaggtcaaagaaatggaatgtgatcttttgaaaaacaaaaacacccaagccccttagggcgtttttaatgcccttgcctacctctcctccctgtcctccaacaactgccctcccaagccccacaatgcaactcgccggaactatgctcagttcttggggtgctccaagctgtcctccacttagccaagctccccacccgcttccgggggtgggtttccactgtgcacaacagtacctagcgcttcccccactacagccccctttcacgctgtggtaattgccaggttatctgcctctcccattacagttccttcctcacagggaccgcgtttaaaccacggcggtatccctaccgcgcaggatgggccgagccccgcacgccccgaggcagcaccccgcacgcagtagccgggcgtcgaggcgttcccagcccacaccaggcgcggacctacgaaggcggagcgagcatgcgcactaggaaggggcggggcggggcgcgcgcgatcccccgccccctgcacgcggtcccaggaggggcgggccttggccgctcgctctcccctcccccatgccgctgcgcttgcgcgctggggacaaccgttgctgggtgtcccagggcctgaggcaggacggtactccgctgacaccttccctttcggccttgaggttcccagcctggtggccccaggacgttccggtcgcatggcagagtgctacggacgacgcctatgaagcccttagtccttctagttgcgcttttgctatggccttcgtctgtgccggcttatccg

SEQ ID NO: 14201 - DNA, 2300 bp, Homo sapien
gtttattacttccctttaaaaacttgcattttgtccagatactaggatatgaactagattgttgtcagaactttggcaagtattgatgtgttgctccattgcttagcattgcttactggcttcctagctcctaggtaatcctaggcctttagctctcttcctgccaaatttgtcatgacctgactcctgctccctgctccagttctgctttcaaatgtgtgcgtctccaggtcattacctgaactgcttatagttcccaggacacagaatgcattctcatttcatgcctttctacacgatcttctagctgcccagaatgtccttttccgtttccacctggcaaactcctactcatgttctaaaacccactacagatcagtcactttcactgggaagtctcctcggttctcccttcccaatgctgtctcacaacacacttctgtatcttcatttaccatgctggattatcttacttgtctctgtgtatacaatcagggcctggatatagtgtttcctaagtatttgttgaattgaggcaggtttattcattccacaaacatacatggaatgcccatgatatagtgagcactgtgctagtttcctgggattcaaaactaatgaggcacagatcttgcctttaggggctcacagtccagagggacagaaagagacacacacagatagttacaattacagtgggtaccggcagctctgtctcacatcttctcattcttgcttttttcccttaactggccataacttgaaagtataattcatatttactgcttggcttatttcctcaaaagaattttctgtttcctacatattattcctgaactgatttaatgaaatgtgtttgtatttctctctttactttgccaggaaaactattgaaacagtcaaagtagcctccaaaattgctgctctccaggcatgggagcaccccatttccagagattaccaaaagatcactgaaattctgtagaacttgtcttgggactggccccaaacaaatgagaactggctgaatctgtgggtagaaaaatatgtgagtgacagcaaagaggcttccagtgagcccctgctggttcagaagacttgacatggccagcaccaaaggatccctttagggtacccccaccatgagccacatactgggagaaatttcttgtagcactctgctttaaaacaaaaccataatgataactaatcatttccctgattttggaaattaaccagagacatctaaaatcaccactaggacatcccaatctgcaccagatggccagggttatcagccaaagctgatctctttccaggcaaaacaaaaagtataaacactttgaattttaatcgcagagcagtattacctaagtaattatacaatttcccttaagtttaaaacaaaatagcttgcaggtcccacttttttccctaggctctatgggctaggaacctctgcaggtgactgtttcaatatagttgtacacaatatgttgagactgagtatagctccatgggtggttaactatacaatctccacagtcagcccaatgtagttgtaaaatttgtgctgagcccactggacacattacttcacctctctgtttcacttccctaatcaatagaatgatgccaacacccaccagatagggctgtgttacgaattaaactgagcaatacgtgcaaagttcttagcacagtgcatggctcagagtaagtgcttaaacatttttgttgataattgatattattgttattggcgaagtcttgcttgacttataagcagggcctgcctggagttgttggtgatttttttcacagtatgttcctagataacctagcttcaccatagtatttttgaggaaaggaaagagaagatactgggccagatggaagacagctcatccttcctaataaaactcttgccccattgcattccatgcttcctggttgggatttttctagaccaactcagccaccagttttatgagggactgtgggtgtgagcaggtctttaggagtcaggaagaggaggagtcaggggggtggctacacagtgcaggcagctcaatggacagcagtctttctgggacctgtgatctagaagacaggagaagatgaacacatctggagacccagcccagacgggccctgaaggctgtagagggtgagtggctcatttgtccagctttccatgccagggacaagggaaaggtgggattatttgcctttgtgggatctacaaaaggtaactgtgtctgccttgggcagaaatcagaagatctgagctctattct

SEQ ID NO: 14202 - DNA, 2300 bp, Homo sapien
ctctctgacctgatccccacagtgtgggtccacctcactcgggccctgtcatttcagaacctaaagagaagcaagcctgggccagccaactcaggataagaggaagagactgaggcatagggaggaggagaaacggctgtgggaagctccaatccacagccagaactgattgacccgattcaactcagggaggctcagggccctagttagagcaaggcagaggccctgggaccaccatgagacctcataaggctttggccaccccaagcccataaacctgtttcctttgcctcccagcaccatgagtgccgaggaggatgccaggtggctccggtgggtgactcagcagtttaagaccattgcaggagaagatggggagatcagcctgcaagaattcaaagcagctctgcatgtgaaagaggcaagtgttgggccaaggtggaagccctgcatttatcgttatgtggcctggttctcagggcatagcccttacagggagggaaagggaactccctggggttcctgaggtctccaccttgtagcgggctggcgggatgtttatggcaccctcccattcctcttaatagtcatggcctcctgggtcttcaacacatgaagttggaagtcagtagcttgtcaaatcttaagcaatatgattaacctcacaatttccactaggctcatgggcagagctgatgctctgacttaagcttcctctcaagataagcttgtcaatggtctatacctattaaagtcctgtctgctgtggcacactgttcccagtcctccagactccatagctaccctgcccaccccacacagcctgcatgccctgacacacagaggagacatcagcacggaagggaggactgagtctgaaatgccagcctctcctagctgtccttgggactggcattgaatagtggcctggtccttgacagggactagccgatgagcatctgaatgccctgcttgaatcagaaggaccctcccctgctggtcctggggatactactaagaactctaacgccacgcctcctttcacagcaaatatggggaaggaaaaaatcccattctccctaatgatacaatcccatccaaatgggagggtgtaaaacatcttaagacaaagagcattcgggatggtagagagtgataaaggtactacccagggatcctggggatgaagaagaaagccaaggcaaggtggcagttttgtcagtccacagcggacttcggcctatacctcatacttgtgaacccctcatagttttattaagtcagacactagagctccacagggtcctccccctgccttgaggggagcatcccaggacacagcatctttgggacacccatcatccaagcctgtcttcttaatttctgtgctcccagggtctaacaccaggcctggcaggcagaggctacacagtacaagactgctcagtgaatgaatgagtgaactggtgattaagaacaagccttaagtataaaatgtaggcagccttaagaacaagcaaaagaaaggactcagatcttccagtggaatctataagtccttcccagattcactcatcccttgcgctcaccccaagtggggtgagacagggctggaaggagcctgcaggaggaccctctgtctgaccctttcccatgttggttaaggggccacccagaggctgggatttaaaggctgatgggggtgattgtatgtaggggacagagagcccatgcaaattacaaagtccagtgcctgaagggggcctgaagtccaaaccaagcccatccttactgcagggatcggaacaggtcttccattagagcagatcacgatgggtgttcaggcacctgagttctgcctgaataccgccactctgtggtgcacccccccaccaccaccccagacacagggagacagtgaacaaattcaaagcccaggccctgcggccacagttgtgctgtcttccacccttctcgcccacagtccttctttgcagagcgattctttgccctatttgactccgatagaagtggcaccatcaccctccaggagctgcaggaggcactgaccctgctcatccatggcagccccatggacaaactcaaattcctcttccaggtgtatgacatcgatggtaagggctcttcctgggtgtgggctggggtggggagatcagtgggcctcagtgagaactggccatttcaccttggcaggcctggaggtgccatcccggcctcctgagcccagcctgggactggtttctccaggtgaggctgacacttcctttcctcacatctct

SEQ ID NO: 14203 - DNA, 2300 bp, Homo sapien
ttttgaggaactgccatactgttttccacagtggctgcattattttacattcctaccagtaatgtacaggtggtccaagttctccacattcttgctaacacttgtaattttctgcttttttttttttttctgagatggagtctcactctgttgcccagactggagagcagtggcatgatctcagctcattgcagcctccacctcccaggttcaagtgattctccagcctcagtctcccgagtagctgggactacaggcacctaccaccatgcccactaatttttgtatttttcatagagatagggtttcaccatgttggccaggctcgtctcgaactcctggcctcaagtgatccacccgccttggcctcccaaagtgctgggattacaggcgtgagccactgtgctcagccttatattctgctttttgataatagccatcctaatgggtgtgaagtggtaactcactgtacttatagtgtcatttttagtggctgcattatactccactgtatgtatcatgcagcatcgtgtagtatttaagactctaagcacaagctacctaagttcaaatctcagttccatcacttattatatgatcttagactagttacttaacttctctgtacctcaatttatttatcaaataggaattatgataataatatttcatactcatggggttgagatgaaggttaaattagttaacttacgcgcgacggggagccatcaaagtgtgttgagcaagggattcgcagggatggacctgcattctgaaaagcttttcttcagcaatgttcattttgctgccctggtgccagagggcggaaaacaggtagctggcttcacccagggatgggatattcttagagtcagtagaatggaaggttagagggagaaggaaggagaatgtgcacatgagaattattgtgagggaggaccctggatttgaaattggccaacagagagattaaagcagatagaagaggccatgaaggggccagggggagactggtcctctggatgagtccagaaacctgctgtcatcttggctgttgactaggaaagcagaacaggcggtgtgactggagagtggtataatatactctaattgattctgcatcgtaatgtgatttgggccggaatgatgatcacaacaccaatgagaatttccatgtatatgcaatttccttctcccagatactgcgttaggtgttttaccattatcgagtttccttgagctagttctgagagggagaaatgattactctcattttagagatgagcaaagtgaggtccactaccccagaggacttagagcccactattgcacagttaaggaggggcaggagcaggatgccacactgggtgtgtccatatccaaagcaggccaagaaatcattaatcacgggctctgctgctcaggaagaataaaatacagaaaaatctcatctctgttggtagttttggcttccttatcccatcactttcaaccacccatgtttacataaggccacactgctgggctggaatgcctagctgtggcccctctcaagacaacatgataaacagagcatttgctccaagttgaacaacaaggcacactccctcagcgctaacccacatacagtgtgcctttggataactgaggctgtgggcacaccgccccttatagattaagtaagcaggtgtattttctgggcagatagtcttggaagttgagtagtacttagggagttaccgattctggagacaggcaaccactgaagccaaagattctccacccgtggggaggtgtccattgctgttgagctaggcagtcgggaacatggaaggtttctgagctgagggtgacatttggtccttcagttgcatggtctatacccccaaggaaagctgactggcagaaagctggaggtgggtaaacagaagaggcccaccacttcttgcagtgtgtgcacggcagggggcgtctgcaggtacagagtggggtgctggggcaggcccgcactgggcttcatccccactcgggacaggcagtggctccattgacccggatgagctgcgcactgtgctgcagtcgtgtctgcgcgagagcgccatctcgctgcctgacgagaagctggaccagctgacgctggcgctcttcgaatcggccgacgcggacggcaacggggccatcaccttcgaggagctccgggacgagctgcagcgcttccccggagtcatggagaacctgaccatcaggtacggccgggtctcgggcattggcactgtccacggcggcgttagactcctggt

SEQ ID NO: 14204 - DNA, 2300 bp, Homo sapien
agactgggtagtttataaagaaaagaggtttatttggctcatggttctgcaggctggatagcatgacactggcatctgctcggcttctggtgaggcctcaggaagcttttactcatggcagaaggcaaagggggagtaggcaggtcacatggcaggagagggagcaagagagggaggaagaggtgccaggctcttttatacaatcagatctcactctaactaatagagcaaaaactcactcattaccacagggagggcaccaagccatttatgagggacccactcccgtgacctaacacttctcaccagcccccgcctccaacactgggatcacacttcaacatgagatttggaggggagaaatatccacactatatcgggggcattaaaacaaagtttatgggagtcaccagtgaaggcacagaaaggaaccttgggggctctagggactttctccttcatggcttttcttaatgataacacctacctttacgagcatttgttatgttccaggcactatggatgcgagccattacatgtactatttcattccatcttcccaatggccctggaattttgcgctggtgttctcatcactctccaggtgagggaactgaagcccagcctgtcgtcatctgtctcagcactctgaaaggaagatccagttacagcagagtttctcgtggaatgcccagcctcaccaatagtatcttgcttgcagaaggcactcagtaagtatgtgccaacagagtgaagtggcagggatgggacatgaatgtagacagtctaactccagagcctgtacccttagcatttgccacaactttctcccagatagtccactccgttctccctgcttctcacccgaatagcatacgaaattcatgaaccactgactttgggaggctaaatgtcctccatcacagctcccttctcaatctccctgggtcagtaccaggaattagccagccagactgttccactctgtactgctagttttctatgtccagataccttttcccagttagtctgtaatgcctttgagggaaggcacagcatccatgcagagtctatggggggatgtatgagtccttttgaaattgcagtttctttctcaaaagcaagattatatctttgtgttttctattaatatgattgtggtaggtttttttcttgaattttatatcaatatccttcaccctgcccctagcaatagcacgtgaaggagattatgaagtcataagttaggggggcatcagattgatagctttttgaagattgataatatctagtgtgggcaaggatggaggaaatggatactcatacattgttggggaggctttcgaggaggcaaatcatcagtaagtaacagtggctgaaacaagataaaagctttattttatttttttctcatacaaaagtctaagctagtagaaagtcctggaaagaaggctggctcggctccacaaggttatacaaggacacaggttctttctgtacattgtaccaccatccccaggggtgttacctgcatcacctgctggaagctgactcccactaccacatctgttctctgaatagatttctccctggggaaagcagaagtacaacaaacagcgtattttaaggacctgattcagaaattgcacacaatgcttctcatcagtcataacttagttacacgtccccatgtagtagcaaggggggtggaaaatatattctcaactcatacccacctgaaactcaggagattcattgctaaaaggaagaaaagagaaaatggatagtagggggacagtgaacagtttctaatacaaacaggaggaattatcaaagttaaaagtgcatatattgctagacccagcaattccagttctagaaatgtattctaaggaaatagtcacacaactacacaaagattatgtataagggtaatactagtggttttaaaatatgttcacaaattctttgatacccttcccttcacaaaagggctacacttaatgacttactcctaatgaatagaatgtggccaaagtgacaatgtgtgacttcggaggctaggtcataaaaggccctatgcttctactttgctctctcgaatgactggctatgatggaaacagccaccatgttgtgaggacactcaattagccttgtggagagacccacatgggtgagaaactaagggctgccaccaacagcccacatccacttgccagctctgagagcaaatagatcctgcaggcctagtcaagcctcatttgactgacgcctcagtcaacatcttgactgcaagcc

SEQ ID NO: 14205 - DNA, 2300 bp, Homo sapien
tttttaacttttttttttgttgttgttgagacaaggtctcattctgttgctgcccaggctggagtgcagtggctcgatctcagctcactgcaacctttgcctgccaggctcaggcaatcctcttatctcaacctccctagtagctgggactacaggtacatgccaccacgcccagctaatttttttttttttttttttggtagagacagggtttcgccatgttgcccgggctggcctcaaactcctgagctcaagcgatccacctgcctcagcctcccaaagtgctaggattacagacataagccactgcactcaaccataattttttttaaactttttgtaaagacgatgtctcactatgttgcccaggctagtctcgaactcttgggctcatgcagtcctcccactctgacctaccaaaatgctgcaattacaggcatgagctactgcgcctggccagaacatgcattttagaactgattaaataagtaaggtaaatcagacacgaaggatatacagaataagccaaagagtagggtgtagggtgtagggagacttggaagaaggaaagtactgtgaagaggggacagcttgtgctgagaggtctggagggaagagggtggctgcttatagctcagtaagactgcagttagagcctgtgggctggaaggtgacagatgaggctggagatggaaacaagggccagatcatggcctgcctcataagtagatggccttagtcccagtttacatctgtagtgcatctttttgatcttaagtgccctgttggacaataaattatatgatcaccctactaataagccatttttagatatgtgctttttatcttaagagaaatgagaacaatggaagggttttaaacagacagtaacaaaatcagattgtgaaagtgtgtgtgtgttggaggcagggtgtgtattgcttaatttgaatgtttttgatgagctaatatgttcatacaagtcaaaactttaaaaaacacaaaagtgaaaaatctcccttccaccctggccctccttccaccccttccaccctacctcacggccaacccaattttcttccctaaaagcaactgatactatcaatttcttgtgtgccctttcagaattttgttttccttttctttgagatggagtctcactctgtttcctaagctggagtacagtggcgcgatttcggctcactgcaacctccacctcccagattcaagtcattttcctgcctcagcctccccgtagctgggactacaggtgtgtgtcagcgcgccagctaatttttgtatttttaatagagacggggtttcaccatgttggccaggctggtcttgaactcctgacttctagcgatccgcctgcctcggcctcccaaagtgctgggaatacaggcgtgagccaccatgcccggcccctttcagacatatttaatgcatataaaattaattcttctttgcctttcaaatgtacctattgttttctaattctttattttcatttagtttgcctccttttcttattcctctcactatctctcattgagtttccacagtatgtgttccccttttactgcttcagatttgaggcttcattttttaagagtgaaggttggatagttttctttttttctttcacttcttccccaagctctggcagctcaggattcatttcctcccactgtttcattacctcttccctcatctctcatgtgcgtgttttctttgtgggggaaattactttgctatgttttcttaattttctcgttaaaattgtcatctgctccatgacaatgttttttgatgaatcttctttacctgctgtttgctgtttgctttttcttttttcctcctttgtttcttgtcaaaactttgtatatattactcattattgaagaaggtaatgttttttcttccccgtggacctcaggtgtgagagaggccaagattgtcttccaggttggctaaattttccttatgacccagggttgatgtaaattcactgagccttgaattctttccaaccaatggcaaagattccccgaggcaaagtctctcctcccctgttgccacagaaacagaccatttcctacaactatggcttgtctgagtcctgagccagcagagctcaggccacagcacctgcacccgttttctgctgctgcacacaagggctctgtgcattccgcatccaggtgtgcccctcctcttctggaggattctttttcaggctgtcccagagactttgcagcacagcatccttgctctatttcttcctgcaacatctctgc

SEQ ID NO: 14206 - DNA, 2300 bp, Homo sapien
tcctcctctggactcttctaacagcttttgtctcagccacttattggcactcaaagtgtgcaactgtgtgtggccatttttcatattatgcacaaggtgtggctataagataaggagacataaatatgcaagttttcaaaccaggacaagggacagggaaaaaaaaaaaaaaaagaagagttgccaaagaatcaggagaatgtagttaggcagctactaagggaagagatgtcagcattgtcaataagctgagagaggtcatgagaaagataccccaaaatagaccattattctagaaggtaagaggtcttttgtaaccattgaaagaatagcagattgtgtgagcaaaagcaacgctgtagtgggaaaaataagagatgagaaagtggagacaacaagtatacttttatttatttatttagagacagggcctcaatctgtggcccaggctggagtgcagtggcttggtcacagtacactgcagcctcaacctcccacactcaagcgatcatcccatctcagcaccccgcctcccccaccgcgaatagctgggactataggtgtgtgccaccacacccggctagttttttattttttgcatataggggagccttattatgttcccagactggtttcaaactcctggcctcaagcaatcctcccaccttggcatcccaaggtgctgggattacaggcatgagccacagtgctcagcagcaaatataatgtttcccaagaagtgtgattcctaggagaaaggagaaggtagtttgggtggaagagattgggtggctttgttctgttcaaaggatgggcgagactatgtttgtgggagaaagatttaggttagaggaagaaattaataatggggaaagaaagaatagctgaataaaatctgggaatggctgggatccagggcacaggtgcaagatttaaccttgaggagaaagggcacttcttgctgtgggtgagggagtgaagagggtaagatgaatgaaggtacaggataggcataataatgaagagcctggatttaagggtgaagccactggctcacattatagaggaaaggctaggaaagccgaattttctggggccaggtccagatttaatatatttaagtataacagtcttaattcattcctttcaccttattcagtgccctgggtgtgccaaatactactgggcactggggtctacaaaggtacgacttttcatgtaatgttggaatttgttatgttggtaactcgagatttgcatatatttaacagtcttaattcattcctttcacattattcagtgccctgggtgtgccaaatactactgggcactggggtctataaaggtacgacttttcattaattttggaatttgttatgttggtaactcgagatttgcttttcattcttctggaaggctgtatgtagaaataaatacagtcatcagacgagttctttgtcagaccagatgtcctgggttggggtttggaaaacatgggcatcttaacaatggtgccctgtttgaggtggagagggaggagaggcccaaatcggggaaaggaattaaatggaggtttagacgcgggtaaccggagtgggtgggccttcaacctggaagatgggaatccccagcgcacttcgggcagcgctgtaaccaagggtaaccgcacctcggtttacaccggtgtgaagaccagcctcttccccaaaccaggtgtatctacggcggcctagcaggaccacacacaagccaagcacgtcacgtcattcgagctaccttaccgcgaaagtccactgcctcctactacttctggtcactactacctttgctcacagtttattaaggaggagcggagaagaagaggggcggagaaggggcggggagaatcacctttccttttttacaattggtcgtagtagactccgagtcctgccgcccgtcctgcagccgacaggctgccaggactgtcactcgaggagctgccgctaccgccccccgccgtggccccgccccttgccgtggctgggatctcgcgggaagagctgcgggcacggcggtggctcggtctcccggctgcgcgcggagcgggagggctctcctcacacaagcgcttccttgccgagaggctggagctgcggcaccgcaggcctgagccaccccttctctgctgtctccttctcttcctcagggctcccgtgtctgctcgccctccgacgctgctcaggttagaaagcccggagcgcgtctccgctgaggagcggtcggggagcggggacacggagcagccggagcaggcgggc

SEQ ID NO: 14207 - DNA, 2300 bp, Homo sapien
agaaggggggattaaaaacgataaaattagttgttgattcacaccatacaataaattacagagctcctgtggcaaacggcagttaaactactccctttactctcagcaggctgaaatgtatcatacattatatgtataactatccataatttcccatgtttcccaatcatcccagcaaaaagtaacccaggactacttgcattgcaatcacaacaggctcatacaccatatggccagaagaagcaacagcatcacattttcctcccatcaggactggaatgacatgatctgacttaaatttaagagcatcattctgactgctgtgttaagaatagacttgagggtggagtagtagggtaagcgtagaaggagagagaccagtttgaatataactgctgtgttccaggtgaaagatgacagtgattctgacagggtagtaacaatgtagttggtgaaaagaggtcagattctgggtataatttgaaggtagaaccaacagaatttcctgacttatgggatattgagtgaataagaaagggtcaagatttttagtctgagcagtaggaagggtggaacagattgaggaaaagattgggagttaagttttggatgttatttcagaaatctatttgacctccaaataaagatatatgtattggatatacgtatctgcagctctgaagaaagacctggcctggcgagagaatttggggatagtcagccttgtatttaaaggcatgaggttgggtgagatcaaagtgaatagactgaatagagataaagaagttcaaaagactggggccctaaggtactctaacatttaagaattagggagatgaaaaggaagactcaaagaagagaagaacagccagtgggattttaggagaaccaaaagagaatggtgccctagaaaccatgggaagaaaatgtttcaagaaggaaagagccattgactattttatgctgttaggaggtcaagtaggatgagcactaaaaattcattgttggatttagcaacatggatgttggtgtttaccttgaaaaggtctactgtgttttttcagacagctactaaggtgttaggacataaatacttgtacataagtagttatttggccctaactatttaataaatgctacatgttgagcatcccaagttcagaaatcgaaaatacaaaatgcttcaaaatcaagaactttttaagcatcaacgtgatgctctaaagaaatactcagtgaagcgtttcagattttagatctggggtgctgaactgttaagtgtaatgcagatattcccaaatctgagaaaaatccaaaatccaaaacccttctggtcccaagcattttgggtacagcatactcaaactgtattaggtatttcttttggcctagggggcattgtgaaaaattactgagataccaagggagccacaaactaagaaagtttgaacatctctgctttagaagcttgagctaactaaggatttcaccaaaaggaggaagcacctcttacctttttttgtgctgaaaagtttgagtttgcaattttaaatctgatccaaaattgtcctaatacagttgttcaacattaaaaaaaaaaaaagcaaagaaaactttatcctatgaaatgccggtagtacatctttgcatgattttttttcttcttgcctccataggtatggtctgaatatgcgttgcttggcagctcgggtcaactataagactttgattattatctgcgcactcttcactttggtcacagtacttttgtggaataagtgttccagtgacaaagcaatccagtttccacggcgttcgagtagtggcttcagagtggatgggtttgaaaaaagagcagcagcatctgagagtaacaactatatgaaccacgtggccaaacaacagtctgaggaagcattccctcaggaacagcagaaagcaccccctgttgttgggggcttcaatagcaatgtgggaagtaaggtgttagggctcaaatatgaagaaattgactgtctcataaatgatgaacacacaattaaagggagacgagaggggaacgaagtctttcttccattcacttgggttgagaaatattttgatgtttatggaaaggtggttcagtatgatggctatgatcggtttgaattctctcatagctattccaaagtctatgcacagagagccccctatcaccccgatggtgtgtttatgtcttttgaaggctacaatgtggaagtccgagacagagtcaagtgcataagtggggttgaaggttggtatctgtctgcttcacttgc

SEQ ID NO: 14208 - DNA, 2300 bp, Homo sapien
gtatcccagtccttcccacacttcaggtctccctcggctgcacaggaggctcaaatccagcatagattcctgaagtcctgggtccaagttctagctctgctactgacttcttgtgactgtgtgaccttgggcaggtcactttccctctctgggcctccatttcatcactatgaaataggagtgttgaacacaatactctaaatgcatctccatgtggtctaagtacccccctccccggcccctccctgcccttccccctcctctgatcatcctgtgtgctcaccatccacaatcccctctcctggctccacatcattctccaaagggttcatgttcaatcattcagttagactttaaactccctaagagcagaggagggtgattttggccaagatatgcagatcgattcatcagtaatccactgaccacctccatttaggttgggagcctctttatcttccctctttagtttcttcaaggtgcacacacagatacctacagcaggcaggaatccaggtggggcaccaggcatctctgctcaccttggctgctggtggtggggtgcctgcctgtgctgtgcatgctgcagctttggcagggtggccaatcagtccagtgccagcctttgcctcccagagaatgcttcacaccctattcttcccccaaacccatcactggcccagacatcaaaagcacacatccctgtgctattccccttcaaagagcttcatatctaatatctcactgagtcccccgactagccttggaaaggcaaagcagggattattaatctccattttgtagatggtgagggtcttgtccaaggctactctgaattcagcatagagctgggactgggctccactcttgtgtccagtcattcttgtcaaactctggtctgtggaatatacatgcctgcctctgtgtaggccccagtctctttccctttaagaacttgggtctgagaggacaagcgcatgtcgcacgcacacacacacgcacatgcatacacacccttacaagatgcacagccaccaaaaagcctaataaagcaaggtgcccaagaccacggttcaggatccgtaaaaatggccggagataattgactgcaacctattcactgcaaatggggcaacttgggcccacaaagggccagagacttgacccgagtcacagagtagactagagcccaggtctctggactcccagtcctgtgctctctccactgtgtgtgccctcagcaaacaaggcaaggcagggaggagcaggagctcagagagcctggggctgaagggtgggaggaaagagcctggtgggggacttcggtccacaggtgtggatgttccaacctttctctggcagggtcggggtgggggcaccaggtagctgcaacctgttccttcagcacctgggaggagacacagagtctggttccctgaagccaaatgtttcttctttgtcctctgtgtcccttcatctcttatagctgtgtccactgagtggcagaggtccaggcccagcgccttccagtctaggagcctgtgacctgggacaggatccctggggaaagggtgagggctggcaaagggcccgccaccctgagcactccaagagacaggggtggaactcacttcaaggattcagggcggcgaggatcctctcccaccggcgaagcggacaccgcggtggggctgcgagtacccagttgttgtttttttctccttccctgttctccaccccatgcacttttccgaggggcaagctccgcagttctcccatcaaggaggctctccaggctccctgccggccttcggctcctggggtggaggtgggcgtggggtacatgggccctaggagaatggggtgtgagagactcccctgggcttatggctttggtggcacctcaggctgtggaatggggtggcgagtctttggaagtcacagagcccagggtcggtggcacgtgatgaggcgcaggcctggctcagggggtggtgcccacggccctcggctcctcccccggggccgccccgccccgcgcgggaggggacgggcggggaccggcatgggtaggcgcggcgacccgcagggccaggtgcagggcccgcgagtccggggtcgccgcagcccgggaggagtgtctggtctccggcctgcctgtgctgtccccgcgccctgtccactggactcccgagacccttggaacccaggtaacccggggcgggactccccgccgcgcgccgcctccccacctcccggtccacgcgcacccgccctccgcggcagccccagccgccctg

SEQ ID NO: 14209 - DNA, 2300 bp, Homo sapien
gtggtaactccttctgggggctcagagtggggcttgaaggtgcctatgatgaaggacctagatgtgtgttccaaccttgcattaggtccaacttgactgttgctatacagtaaaccccctaccctgctaccttttggttaccacattaacaaaaccccattcctggctgagctcaatcatctgactttgcccttcaaccctggcaaaagtcatcctcttctctctcttctgcttgtcacagcagcgggggaacttcgctcccatctgaagtgagcctcagccctcttggtgccttcttcctccccatgaaaaccccccttctcctgtccagtccccccgtcccccaggatcagctgcccatacctggtgactgcttctgactttccaggggcatttgacttgagaaataaaaaaaagaaactggaaaaccgaaaagtctttaaagcatgaagacttgagcaatactggttggatggtgggtgatggcattgcagtactgaagcctgaggccctgttccacactgcctcaaatcacagagactcttttttgggggtggggatttgcctgttctaataatgctggcctaggtcacagtcctatgtgctataaatcagtaaatccatgggaagttcacgaacacatgcacctattgggcgattcctcatgctaccttgggatttctcttgtatcgttgcttacacagttatttacctttttgagagtggaatttgtggggaagtcatctcatattcagcaagtgcttgcctagttctcacgaaccctgaactgggtcaggtggcatggatcttaaacctttgttgtatgtgttttacctccccagtaaagaccctgtcacgactccctgatatgccctatagtccccattgccaatgcagagaataagggaacccagccaggcacagtgtctcatgcccgtaaaatccaaacactttcagaggccaaggagggaggatcccctgagctgaagcgtttgagaccagcctgggcaacatagtgagacccccatttttacaaaattttaaaaattagctgggcatggtggtgtgtgcctgtagttccagctactcaagggggctgaggtggaaggatcacttgggcccagggagctgaagctgcagtgagctgtgattgcaccactgcactccagcctgggcaacagagtgagactctgtctcaaaaacagcggcaacaacaaccaaataaataaataaataaataaagggaacctagatgggctgtggttggcagagaagatttcttgaaaaaaggaagagctcgagcagacagtatgtctagaaaaggtaggaaaggggaaggaagagaaaaggaagtccaccagggaggccccatttccggcactctacagagccaggtgttcccgagaggaggttgagtgtcagcccttcagggtggccagtggatggcgactggtcaccctggggtgggggggtgacaggtgagcaggtgagccgcctaagaaggaaagggacaggaggcaatggagttcctgccaacagtgagggtggggatctgtgaatgttgccccctctctgccagctggggagtcctgggggggctgcaagctggatgggcagggtggggagtgggtggactcagggaccttgcctttctgtgagggactgaagttccttcacagccgcctccccaagcgcccagggaacaactgttctcccagatcagggctcactaatgcctcctgcctggaatcctggcttgctgaaagggagtgatagggagcagggagttctgagaggagggcttccgtttctgaaatagaggatgccaattgttcatttcttcgatgtctttggtacacgtcctctctagaacctgactaatcattttttacaaattgtaagtggaaaaaaaaaaaggaaattgtgtgcaggaggatgaaaactttggcttaagcgtgggcttaaccaagcaggaagggaaagtggctggcccagctgcccttctccctcctgtccctcctagtctggtttggtttaatcttacctttgtcctagaggcagttccagatgcccagttgctggaacattacttctgggtgtagcttaacaagaccatggcctctggacccgcgatcagctcgctgtgtggtcctgagcagccacccaacatctctgggccttggattcctacctggcctttcttctggatgcatcatttttgcctttaggtatctggaccattcccccccatggatgataaagtctttgcttcacaccctcaggattaccttaaaggcctg

SEQ ID NO: 14210 - DNA, 2300 bp, Homo sapien
aatatgaacacagttgatagagaaggaatcaaaagggctctaaaatatatgaatagacaacatttatctgaaaataaatgaaaaatttaactacatgttttttctcaccaattgatatgagatatcaatagattggtagctactgaaaagtttgataacactttgagaattgtggagaaataggcactctcatacaggctggtgggagtgtacatttggacagcttttatggagaatgatttgcaatatctgtgaaatgttacacatatgtatactctttgactcagcaattctgtttctagaaatgtttcctacatatttacctgcattgtataaatttccacattcattcactatagctgtatctgtaataggaaaagttggaaccatcctaatgtgcaatgtaggggtggaaaaggtgtgatacttttctttacccatcttaagggtcacagctgacactaccataacaaaaaacaggttagcaagataaatggataacttattgaatcacagttttatgggatgtaagtgccttcagaaatgaagacccaaagacccagggaaagctgtccatttttatgcttagatgagatgaagaatggacagctgtgtagaaatgtgattgtacaaaaggagtatgatctaatagtaacagactgaaggaggaatccagcaagtcctgtctgttcagattcttcttggcctctctgtgcagctttccttcttcctgagtgtagggcaagacccttttggaacgagggtcttatgacaaggtacatcaaagaatgtctttatggccagctcttacacaaaaaggtgggggaaggctagattaatatttctaggtttttctagaataatgtttctggcttgcttgggagaaaaggggttctagtttccatgacccgccttggggaacagaaattctggtttctattatttgctttaggagacacagaggggtgggagacaagagggcaggagaaagtcagagacagactttgcttttaaggcttctctgaggcactttcagtcttctttagttcaaagcactcagtgtgccaaagagccatactctggggtgtcgtttcctgagcaccaacaatattggccaaggacattgtgactatccttaccagtgctgtggtcctttaggaagttgagaaggggctagagttccatgagagcccaggtgtagatgtgtatttggtagtcatcggcttagggtcaaagacagaagtgatatagaatcagttcatctaaggcaagagtaggttcaaaaggttgccccttaagggtaaggaccaaattttattcatctccgtaaggccaggatcaaacacaatcaagatttgataaaacaggccgggcgcagtggctcacgcctgtaatcccagcactttgggaggccaaggtaggcagatcaccttaagtcaggagttctagaccaccctggccaatatggtgaaacctcatctctactaaaaatacaaaaattagctgggcgtggtggtgcgcgcctgtaatcccagctactcgggaggctgaggcaagagaattgcttgaacctaggaggtggaggttgcagtgagctgaagactgcagtccaggctgggcgacagagcaactccacctcaaaaaataaaaaaggaaaaaaaaaagatttgataaaataatgtacatataggacagagctggagggaaacccaggaaaggtgaatcagagagagaaaagacgccaagataatgtggtgacttgggagccagagagacggagcctgagacttggagcagggcacagcacaggaatacaacacttttcaccagaacgacattccgacctctgaatcaaccctggaaaggcccttccattgaacttcttgtgatggaggaaaagaaaccctcagtttcgtcatcgcaaggcggaagagtttaaataccatacctcaagatctccctccagccctgacacgcgactccgcggccctttcagcgtcggtcgcctaggagacaagcgccacttccggcagcgaagtcacttccgcggaggtcctgcctctccctgcggacgggcgctgattggcccgtttgaaatgcgccaggcgggagctcacctgggctcttagcgtcgccgccggcttcgcagagcaccgcgccttagccgcgaagttctagttcttgctgccggtcctaacgtcccgcagtcttcgccagccagccgtcccgcatgcgcgtttgggcggcgtggagcctgctgccatgaagtcagcgtgagtacgaggccgccgagcagggag

SEQ ID NO: 14211 - DNA, 2300 bp, Homo sapien
acagagctggagggaaacccaggaaaggtgaatcagagagagaaaagacgccaagataatgtggtgacttgggagccagagagacggagcctgagacttggagcagggcacagcacaggaatacaacacttttcaccagaacgacattccgacctctgaatcaaccctggaaaggcccttccattgaacttcttgtgatggaggaaaagaaaccctcagtttcgtcatcgcaaggcggaagagtttaaataccatacctcaagatctccctccagccctgacacgcgactccgcggccctttcagcgtcggtcgcctaggagacaagcgccacttccggcagcgaagtcacttccgcggaggtcctgcctctccctgcggacgggcgctgattggcccgtttgaaatgcgccaggcgggagctcacctgggctcttagcgtcgccgccggcttcgcagagcaccgcgccttagccgcgaagttctagttcttgctgccggtcctaacgtcccgcagtcttcgccagccagccgtcccgcatgcgcgtttgggcggcgtggagcctgctgccatgaagtcagcgtgagtacgaggccgccgagcagggagagagggcggacgggggccgaggcctcggggctgggggcaggcgtctccactcaggccgcggccgtacgcgggcagcgcggacagcatcccgcccggtgctgctgcggccgcgaccccaaagtgggaacctccacgtgtggccgctccgcgggagcctgggcgcggagacccctgccgcgtcgccccccgccgccccgcctgggcctccaaggggccaggaagggtcggcccggagccggggttgttttacgccgcacccggttcccgggggcggggcagtcctcctcggggtcccgggacagcctttcccttctccctcgctggctgccgccgcctccagagtgcagttggccaacttagtgcgggtcggaggtggtctcgtgtgtggagcagagcgagtgtgctgggcattggttagatgggctccgtttctggagagccctggcaccggtgatcgccgctagcttttttttcagccgagcaccctgtccttgaggccgagcccatccgcttacacaggccagttacttctgctgtattttgtggccgcagagaacctccgcccacattcctaagctaatattttcggcgcagcatcattcctgggtaaagaaatatttgtcgtgcaaaggagaggattggctttattaccatttagggagtcgtttgcaaaagacaacttgtttattaagaggccgaagtcaaaatctttagatgaaaaaaattatatataagaaatatacgttgagtttaacttaagcccaccacaaagtattttgcactgaataacacgaatttgcttgtgtttcatctgagaatatgtttggaaaaatatttttaaactacagtcgaagccaataatcttacttaattttaatgtgttaaatgtatatctagcctatagataaatgtgaagggaaaaagatgagatgctagagaaatggtgaaatcaatcaaaataactttttgattgcccctacttaagaaaccaagaaattggcagtttgggaccagattttgtttggagacaaagagtaatgttttgagcattcaatgactggttgttccttgaaagtacaggcgtaacccttgacgaaagaatggtttcctccatgtgcatttttatagtgtattgaagttaatcgcttgtcagtctgtaaagtgtgggcagttataatttgtagtgcctctgttaaattgttgctcaagaaaatatgcaagccattttaagtatagaactaatcagagaataagtaggtagctttggtaccaaaaatgtattctaaagcaaattttaattacttttggattacgcatgccacaaacactctgctactatgattattaatgttatttgggatgcagtgttttgcaactgctaagggataatttacagataacctagaaagattgtataagttttaggtgaggcttttgtattcgtgttgaactgaaaaaaaagttattattattttttaatctatgaccaggagagctaagacaccccggaaacctaccgtgaaaaaagggtcccaaacgaaccttaaagacccagttggggtaaggtatccctgtaaatttatgtgtggtgtttaagaaacttatctcttcagtcctttctgtcttatgtgtatgcttggaagggaaagaagaagacatgtggaagtataatcaaagaacatttagttaaa

SEQ ID NO: 14212 - DNA, 2300 bp, Homo sapien
actattatattgtacacaaataatagttatactactactaatatctctaaaagtcaacaacatgtcacacgagatttttaaaactgttagaatttcttggaaatggatgtcaatttaaaaacttgtcagcttaacccaacatttaatatacaaagacatttttatttatttatttatttagagacagagtttctctcttgtcacccaggctggagtgcaatggcatgatctcagctcactgcaacctcctgggttcaagcaattctcctgcctcagcctcccgagtagctgggattacaggcacccaccaccacacccagctaatttttgtaattttagtagagacagggtttcgccatgttggccaggctggtctcgaactcctgacctcaggtgatccacccgcctcagcctcccaaagtgctgggattacagatgtgagccaccgcacccagcctacagagacatttttgaaagcaggggagggggcttgaggaaaactcattcagctgtgtgcaaagcacccggttcccttaactcagagccagggacccactccagtggcaacgagggatagatttaaaatacctcagagcaaagaaccctttttgtttgccatttgttgttttgttttaaaattcttattctttttgcctgcttcattttttcttcataatttaactgaattaaacttggtcccaagaagtttggaactctcctcatgccatcagttactgtatggcatgaactcagttcatattctctgggatgaatatgaacccagttggagatttttaattatctaactctccaaattataattacagaaggtatgcagttgacaaccaaagacttcattttactggactaatttaattaatcttatagagaaaatttcacagctagcactagttttacacaatgtagtacatccatttaactaaatgttctttgattatacttccacatgtcttcttctttcccttccaagcatacacataagacagaaaggactgaagagataagtttcttaaacaccacacataaatttacagggataccttaccccaactgggtctttaaggttcgtttgggacccttttttcacggtaggtttccggggtgtcttagctctcctggtcatagattaaaaaataataataacttttttttcagttcaacacgaatacaaaagcctcacctaaaacttatacaatctttctaggttatctgtaaattatcccttagcagttgcaaaacactgcatcccaaataacattaataatcatagtagcagagtgtttgtggcatgcgtaatccaaaagtaattaaaatttgctttagaatacatttttggtaccaaagctacctacttattctctgattagttctatacttaaaatggcttgcatattttcttgagcaacaatttaacagaggcactacaaattataactgcccacactttacagactgacaagcgattaacttcaatacactataaaaatgcacatggaggaaaccattctttcgtcaagggttacgcctgtactttcaaggaacaaccagtcattgaatgctcaaaacattactctttgtctccaaacaaaatctggtcccaaactgccaatttcttggtttcttaagtaggggcaatcaaaaagttattttgattgatttcaccatttctctagcatctcatctttttcccttcacatttatctataggctagatatacatttaacacattaaaattaagtaagattattggcttcgactgtagtttaaaaatatttttccaaacatattctcagatgaaacacaagcaaattcgtgttattcagtgcaaaatactttgtggtgggcttaagttaaactcaacgtatatttcttatatataatttttttcatctaaagattttgacttcggcctcttaataaacaagttgtcttttgcaaacgactccctaaatggtaataaagccaatcctctcctttgcacgacaaatatttctttacccaggaatgatgctgcgccgaaaatattagcttaggaatgtgggcggaggttctctgcggccacaaaatacagcagaagtaactggcctgtgtaagcggatgggctcggcctcaaggacagggtgctcggctgaaaaaaaagctagcggcgatcaccggtgccagggctctccagaaacggagcccatctaaccaatgcccagcacactcgctctgctccacacacgagaccacctccgacccgcactaagttggccaactgcactctggaggcggcggc

SEQ ID NO: 14213 - DNA, 2300 bp, Homo sapien
gagttcgagaccagcctggccaacatggtgaaaccctgtttctactaaaaatacaaaaaattagctgggcatggtggcacacgcctataatctcagttactctggaggctgtggcaggagaatcgcttgaacctgggaggtggaagttgcagtgagccgagatcgtgccattgcactccagcctggggaacaagagtgaaactccgtctcagaaaaaaaaaattttttttaatggcttattgcatagtattttcaaaatattaataggaaatttttactacgataggagaatatggggcagtggaatttgtctgaagtaactgttgaatccactaagtccttcatcaacacaaaaggaaatgcatgagtactgatgttttgcttaactacttctcttgaatagctgtggttagtgcttactgtttgataccctgtaaaaagtattatctataatatatagatggagaagaagattatttcctcaatgaccacaaagtgccacttgtcaaccagatcagttttgtttttttgagagggagttttgctcttgttgcccaagccggagtgcaatggcacaatctcagcgcaatgcaacctccgcctcctgggttcaagcgattctcctgcttcagccgccctagtagctgggattacaggtgcccgccaccacgcccagctaaattttttgtatttttaatagagacaaggtttcactatgttggccaggctggtctcgaactgctgacctcaggctatccacccgcctcagcctcccaaagggttgggattgcaggcgtgagccaccgcacccggcagatcagttttttatgtacactgctggacaaacagtattttggactgactcattgtagctttggaaatgtttggattttttaatagctttaacctttcttgaccaaaattccactataatggctgcttagatttggatgaaaactcaacagctttattttttaaaagtttgatagctttataaatgcttttttaaaaaattccggatgtgaaaatatttatgtttgtagttaagattgacccaagtgggactctagatcggtggattccaacagaaatgtttcttcagagatgattattaaataatgggatggactaaacaaagaaggtgccccccccccaccaaaaaaaaagatatatatacatagaactaactttccggtaaactaagcaaattccacgaggaatgcaaagatgaccatttttgaaggtaggaatttaaattgggtttagataacaaataacgggttgtagacagcttacccataatccctccttcccccaagcactaggcagtgaagttagacttctggattccacctccacgctcaccgcgcggcactatgcaatcttcggttagttaccaggtctaagttaggcttctggattccaactccacgctccaccgcgcggaactatgcaatcttgagttagctaccgggtctaagttaggcttctagattccaaatccacgctccactgcgcggtaactacataatcttgggctagtttaccagctctaagacttaattttgccatatgcaagatggagataacatccaactcctggtgtgtgaggattacgtgaatccttgcagaatgtggctcagtgcctgggacatagtaagcgctctacggcttctgctagcataacgctgttagtttctctcatcctcctacatctacctatctcaaccaaggtcctgcgctaagcaggggcctccaagctgggacgcagcccttactctcagggtcagcgccggctgggaaggccgcgacctaaccaggagattacgaacaatgtcaccagggccacagcggagctcctgccaagtcaagcaactcatggaaccaacggaggcgaagtccgaatacctaggcaaccctaacctaaaagtgtttttaacgttctcaggtcctataatttacccaaataaagtgggaccgtatttgcaggcgctgagaaactttctcaacagtaagaaccaatcaggcgcagtgcgcaggcgccttcagtgggtcctgggtccgcctcttccgcccggtgcgggcgccgattggtccgcgtggacacataagaggctgcgtataggcgcgagagcccctttcctcagctgccgccaaggtgctcggtccttccgaggaagctaaggctgcgttggggtgaggccctcacttcatccggcgactagcaccgcgtccggcagcgccagccctacactcgcccgcgccatggcctctgtctccgagctcgcctgcatctactc

SEQ ID NO: 14214 - DNA, 2300 bp, Homo sapien
ggaagctgatgcaggtgggagaaaggaccagacgcatggaccatgctgttaagggaacagggacagagtgggttttaatctggttcacccatccacttactagtttgtaacctgagagcttccacttccccatccccaacatggggacatactgtcatgggactgttgtgaagaatgacatgccacacagatgagcagtcctagctaatgttagctgttaatgggtgaaggaaaagcaggcacttaacatgtggatataggctatcccttatctttgtcttgtgacaccatcctcactagttcacaattgccctttcgtacaggctaagcatcccttatccgaaatgcttggaaccatttgtgtttcagatttctacttttttccagacttcggaatatttgtatatacttaaggtttttatgtatactttatgatcttagataattttagacagggtcctgctctgtcacccagtcttgagtgtaatgatacaaacacggctcactgaagccacaggtacatgccaccacactgcactaatttaaaacaaaatttcttgtagaggctgggataggtttaagcaatcctcctgcctcagcctcccaaagtgcaggaatcgcaggcatgaaccaccatgcctggcctatggttttaatatacaggttgggcattccttacctgaaaatccaaaacgttccaatgagcatttcctttgcgtgtcacgtttacgttttgggttttgggtaagggatgctcaagccatgtattaaaaacacaaaactagccaggcatggtggctcatacttgcaatctcccagcacttcgggaggtcaaggcgtgcagatcacttaacaccaggagattgaggttttcctacaaaaaattagccaggcatggtggcatgcctgtagtcccagctacttgagggtggctgaggtgggatgaccgatttgagcctgggagtttgaagctgcagtaagccatggctgcaccactgcactccagcctgggccacagcaaaagaacccctctcaaaaaacttaaaacataaaactctaatactgacacctacatactcctacccattgtcaactccaccttgctcaaggtcctaaattgttcactatcccgtctttggtatttattactcttagcagatgcatatatttaatgtcttttttgagcttatgagaagccccaagtgttgctttgaacattcccaggcatgtatcctatgtccacatgtagtttctcttgagtaatgcctcaaagtagaactgccattttccccaagtagttgtagtaacttacacaaatggtctttttcacattgacacgaggagtcccggctagaagtcacgcttttcatcactgaatgtcttcatctactaaatgctaatggaggtaaggataagactcattcatgtgcctggcatgtcattagctgctctgaacacacaatacccacggtttattatataaatccaagcctgaaaagttgaaaattccattcatggtattattaattggcaaacaaaaaaagctcttagtttttggaacacaggtttgaatctttttttttttccactttgtgtaactggagaccttaataaactattaagtaaactttctgcactccttcagtgttaccataaaactcccaaacatttggtgagacattacatagctaagtcttgtttttttacaaccttgggatgtagcagtcaacattcagcatacgtcaaagttcgttcttaggcagggttgtatagggtaaatacccaggaggctttctaaagctggtctgtattaccctccacccccagtgtaggggacacaccttataatcatcaagtttacacaggtaacctggacaaagcatctgctctgatccttcctcctgccaccccagtgcagttttcaacactgtaccatgaggtgccttcttgttagcatcaggattgtctaaatctcacatccggcaatggtggcagggaaaatccagcctgtgtcatggcagaataggctgaaagccaacattacaaaacagaccatttttgcagagcacattccaaaactatggacaagaccaacagcagtaaagttcagctttttattgaacatgttataaaagaggtttagtcaaaaagaccaaagcccatgtcatcatcagactcctcggattcttctttctttgcttccactttcttctcctcagctagaaaaaaaaagtcaatcaggtgttaggatttccatacttcatatacttgtgaaaaattaatggcaattttgtctataa

SEQ ID NO: 14215 - DNA, 2300 bp, Homo sapien
ctgcttggccgaaggatgagtgagtcagtccacaccttagtaaggaaagcatgtttgtgtgccctcccatgacccagccaagaggaaaccaagagcactttaatatggtcttccctcccttgtaatttacttagcacgcttcactttgcctctgcaaatgctcaagttcatttcttgtttaaaaacaaagaaagatgtcactgaatcactgtgcaatctggtgcacccttggttttcctcaaaggttgttggaagaaaaggccacatgaaaaccatttctgcttttgccagaaaacttgagcaggctcttatattgttatggtctcctaaataaggtctcatgtgaaaaattcttgtaaaatttaggggcaggagaaagtttgtgtcctctggggcattagtctgcatcctcctgtatgataacgagagctctgtgacttcacactctctcttctctgcttcagctgctgagaaattcagtaccagaccaggtgcccaatctcagtaattaaattaacccaaatggataaggtgtttacctcctcctccttttcttggtactgatttttaaaataaaaattttggcagcttttttattgactttactgcatcgttgtactttgatctatactcaaattcttttgagaaagaggaaaggaattcacaaattaaatgaaaaattgaatattggaaggtttttttctggtggcacgttaaatgagatattaagttagtggttgtacttgggttttgagactaacaagcttataggtccaagatttcaggtcataatttttctttacttgggaaaatgagaacctcatgcatatcaggccatcaaagaagttgtgaggtgtggtgaaaagacagaaagcagttcaggcttgttttttgtttgtttgtttgtttggagatggagtctctctgtcacccaggctggagtgcagtggcatgatctcgtctcactacaacctccgcctcctgagttccagcgattctcctgcctcagcctcccgagtagctgggactataggcgcgcaccaccacacccggctgatttttgtagttttagtagagacggggtttcaccacgaggcttgttttttatccactgtcaccaaggataatattgaatcagtgtgaacattcagagaccgaaaaagctagaagccctattcggacccaaaatattttccctctgctgtcatttcagacatgccaccattagggcttcatttccctgcagtcttctttaaataccaaaactgccctgggaaggataagacatcagtttcttcatacttcagagcaaatgggattgattcccaggacctcctttctgtggactgggtttttgcctcctcaccaagagactgggctccctgggcgagcagaggctgctgggtaagagagatttagttctgtttcaacaagctgtggggccttcgacaagccccctgacctctctggcccctggtgtcctcacgttgccatgaagggcttttgaggatgctccagctcccacatggccaatcccgactcccctcccagggcccctgttgggccctgcggcaggtgccagtggagtcaccttccagcccggcggggcccattagctccttgctctgttgactctcaggtaaaacctttcttgtgtttactcagcaaagattcttttaagacgggctaagcacacggtttactctgctaacaagccttggcatttattgtgaggacctgtgttgacttattctcgagtctccattgacactcactgagaaacgttaacgcaaacacaaggagacatcctgggagctctgaggcccgacattgtgctggggaaggagctccagaaagggccatcctttctgttttggttagaatcaccttgagagttaaaaataacaataatataggcaccataagagattctaatgatctccttttactttttaggttcagtatctgaacacttttgctaaaggtctctggaaagctccctgtgttaattctcgatgagactacgtctgtgccggccgcttcctgagcctccttccatgtgcataggcctgctgcatgctggagacctgcggcacagctgccaagtgccccgtgtggttctgtgatcttgggacagtcacttcctctctgtggttgtcagtcttctcatccctaaggtaaggggacgctgtctccacgctcatctcctcagctagactggggcctcaggcctgagcccagggcctaagagccctaaaaaatgtttgctgaataaatgaatgaataagccacattagcca

SEQ ID NO: 14216 - DNA, 2300 bp, Homo sapien
cgcactgaggggcagtccctccaggggtattgtttccatttcacagggagaagtgttgttgaagttcagagaagttaggtaacctgcctaaggcctcacagcaccacgagtggcagagctgggattctaccccaggcacttagctctgaagcccgagctcctgaccactttgcctgtatcctttcataaatgtaatctttaagctgcggctgttccctgttaagcccctgtttaaagatctatcaaagtagatgcctcctctgagttgcagccttctctgattctccttatcatcatgagagcagataccaagaggtagagatggccaaaaggttttaagttccctctattctcttgtacaatgcagtgccaagtaataccctggggttactcacactgctatggcctctagttgaagataggagtgctgtggtttttttcttggcaagaaattgtggaccaggggtgatatccaatcacagtcctctggcctcatttgagacacagagggcaagtatttttttaaccctattattttacaaaaatattaaaaggcaagcaactggacatggtggctcatgctgtaatcccattgtttatgggaagctgaggtgggaggaccacttgaggccaggaattcgagatcagcctggacaacatggtgagaccccatctctacaaaaaaaaaatatatatatagtcaagtgtggtagtgcacacctgtagtcccagctacttgagagactgaggcaggaggattgcttgaatccaggagcttaaagctgcagtgagttatgatcgtcccactgcactccagcctgtgtgacagagcacgattctgttagactgggtaacagagtgagaccctgtctcaaaaataacagcaagtaagcaatcatgattttttgacttttcaaggaatttgcaaacaacatgtattccctttgcccatctagcttttgggaaaggacacccaaattccaacagtcacctacctagaaaaatagataaccacagccatggtccattccattgcgacttggtgatgtcagaaggtctcaggctcaggaggggcatctcccagggtctctcagcaaatatcccgattccttaaactgggacagtgttttctgtctgcagagtgtgctcccaccttggaatgggcttgtctggcctgaccctgaatatgcccagcagggactgcatccctcagttcatagatacagaggttgaaggtcagggaggtgaagacagaaggggcagccagtcagagccagcagctgcagcaggacccagatttcttgattctgagtccaggattctttccactccaccagctctcttgtatggacagctcaggggtcagagaaagcacctttatttctgaatttccttcttctctcctgtagccttatgaccagtgttcagaagatttatctctttctagcttgggacttgcacccagcaagtttccatgcaaggcagctgcctttaagaagaacagaagagtcccagttgggcttatggggaatgaaatcagtcccaagccccgatctctctgaaaagttgttattaaattctgtgcctggccctgacctggatttaaagatttgcaagaagacaaattccaaacagatgcccattagggccgtgacagccgcagcttaaagataacatttacattctgccggggtttgtatctctctgttccccactcggcccctctctttcctccggtgggatcaatacctcggttgaggttacgtggaggtggccacattcttttaagctgtttgctcagtgcttggtttgctctgctaacacgctgggcacttcttccaacagccctgtttgcccagcattagggctgtttgttgaaacacctagcccaatccgagggggctcagctttctaaacagttggtccccgaatctgtcaatcaataacaccaattgggttcctgatacgaacagcaagtgtggccaagtccaatatttgcccaaacactgcctcctccccctgcacctgactgtcccccagcttgactaaaaggacgatcaccaggcgcatgggctgctgggaagatacaatgttggcaaacagggagctggttccaggaaagaagggcacatgagcaaacatgatggcccctttatgagaggtaatttactgaaatgcacagcgattacctgctcacccagccctgatgtaattaaaaatggcaggctaggggctctgtttcccccggctctggcagagaaacctgggtttcgacttgtgaagcttgaggttggatgtgg

SEQ ID NO: 14217 - DNA, 2300 bp, Homo sapien
gtgggtcattggagcctccaagctgtcttcctgtgttttcctcacaataatactccttccccagctgccagcaagcttatgctctagtgcaaccctaacccttctagagagggtggaaagcttcatatcctagagtctgagggatgtgaagttggggattcacctttgaaagcagtagcaagaagagggcaatgcttaacccaaagggacaccttgaaactagaacatcagaccccactgcaggccactgagggacctcagcccacatggcacgtaaactactcgtgcacagctggagataccatttatgctctgtggcgaggcttctcggccttctcctccgtaagatcatattactgcacttattttcatctcagtgacctgccagactgtgagctccttgaggacagtgattcctctgatgtgtctgcatctgagacacagcaggtgctcactacttattttaagtgagcaagagaagggagatgccccgatgtgatgggaagaattcatggcgagatggggaggagagccagagctcagacaggaaagagtgggagggaacagctgacggtgggaaaagtcctgggatgctcctttctctgattcaagacaacataaactgaaccaactcccagtccctgcagcctggcccttcttgtgtgtgcagcttgtaggccctgaggtggatgtttagggaatgagtcctcaaagcatatacgttggcaagggtggcagagcgctgtgggagaaggagaagcatgtgcagaaagaggaggccaggggaccttatggctcctttgtccatccacaaagcattagtttatttattcactcattttttcatccaatattttttagcatctgctatgtattatgttctgtgttaggtgctgggtgttcaaggaggtaaatgagagctgtggtccctgcaaaggccaagagcactctgaggaaacatcagtacctggggaggcagtgtgtggtacccagcggagtgtgtgatgggtgatgggcatgggcggaacactcacacagaagtggcagcgtgccacaggggtggctgcaggggtggccatgcctggggaaacgcgactgcctggtttgtcagtgggccctgtaggacagcagtgaggcacctcccaggcagctctgcaagtggcactccaaaggagagctggagaatagaggagggaaaaatgggaattccttgagtcataattgggtagagctttagaaggggttgaaggtcataagtgggaaacatgagcctagaaaatattgcttacacatgaaaaaatggcaggcaggatcaaacagcaaattgcaacctgacatgcatgctagggtcatgtctgtgaaaattctacctttgggaggtaatgtgccaaaagaaaaaaaaaaagagacaagagagaagactgttgattgaatgatgggggtaagcttatgggtgatttgttagatggttttaaatgtttaatcttattatgtagtagctataatcttatcattacagtagtaatactaaaattgaggagtagaacaatgatagagtttggggggatgagagatgttttcttgagattcatttcacatagtaaaagaaaacccaataaaagtaagatggaatgaatcccctctacatcttcttctgtgactgggtcaggcagctgtgagcagctaagagaagccctgatcttacaggtgattcagctccacttccacttctttttgggactcactggggattatttgtttctcttaatgggcaacaattagctaataccccaccactacaagcaaagtaaaaactgggcctgtgttaacagttctctttttgatggggtcattggtgtaacagataacttctagctgcattaggactggtagcacatcaacattgcctctctgttgtgaaaggaaaatagaaacggctaagtcaaccatatataaaggcttatatttgctcttcaaaagttttttttttttttcaacatatctttgctggggttgggccatagcttgatgggtatttgttgaatgactaattattgacttataggctaacagcctcctttgaagtaggctgagcaaacaaaccattaagtggaacatggtgtctaggttacacagctcactcatctgctaatcactggggcacactgctggttattattacctgagaccctgaaaggaagcactaaagaaatgaagacagaggaataccaggagagaaaggaggtccagttagacctaaaggtgggcaagaagaagaagaagaggtgagatcctcagta

SEQ ID NO: 14218 - DNA, 2300 bp, Homo sapien
ttcccccccactttgttttcctgtgtagcattgatcaccactgcatatactaattacttgtttgatagtttgttgtctgtcagtctgtctccctctatgacaatattctccttatctcttgccaggtaacatacttcctagaaatttagcagcttaaaacagccagcattttattgtttctcacagtgctgtgagtgaggaatccaggcacatcccagctagtggcttttctgttccacatgctgttagtggaggttgctctgtggcgttgggccagtggctgggctgggacattcaggatggcctcaccggtctgtctgatgctttgatgaggacagcaggaaggctggggctcagctggactacagcacctacacatggcctctccagcacacctggagtcagactttttccatggaggcccagggctcctagagccagtgttttcagaggtacaggcagaagctacaagtgacctagcttcagaacatcacttcttcctcattctattggtcacaaaagtcacgaagaccagcctggattcaaggggaacagagtagaccccacctctcaatgggaggaatgtcaaaggatttgtggctatcttaaagctaccatcacacgcttcaccagggcggggtctttggagtgttttatgcactgctagtttccaagcacctagcacagagtaggtgctcaataaacatatattgactgagtgaatgaatgaaaaaatgtaatttttacagtccatgccaagcccacctctccctggaagtcctctacacctaccccaggccatgggtcctttcccagcctagcctccacccctcacctgccctgccgtccctctgggccttgggctctttccccctttatagatgaccctacaaacaaagcattgagttccctgggggcaggtgtgtgttctgcaccgtgcagataggcttcaacaggagttcctaactgtatgcatggcataggtgcattttatatgtataatggttcacaaatcacaaccacccatcaggtaaccatcgctatcccatttacagaagagaaaactggggcccagagaagttgaatcatttgcctcaggtcacccagccagcccgagtctagctcagtgtctccgcagcagcaggtgctcagtggctctgtggactgactgttccatccctacgctgtgcatatgaacatgaggtgcccaagacttccccttgaggttccagagcccactaaagcagggctttggggcctcactttacctttctcttccctggagaccactgaaatgcactggcgagagagatgggtttaatattcatgaaccagccaggcatgagtgattagctgactcctgttggaggaagaggaataattgaatacggtatttacataataagttaatgctgccacccgcctgtggggctcctttgtgggtctgtcctccacctccctacttgcccacattgtgtttctcctcacctgccttggatggcctaggaggaagtgcagtggctttgcacccctctgcaatttgggctgccgtctaaatgataacattatttagggaacagaactccagtgcctgggagagcctgtaatgggctggtcggtggcctgcccggggggctggacccctaaacaaaacccttctgcagactctgagaaatgacaaggggaagctgagaagctgagactgggtttttgacatgggccttcttgccccaaaccttcaggagaccttgagcacattccatcccattttttggcttctctccttttctgcaacacgcagggccccagcccgaccctctgtggtctaggactgcattccagctgcctggttgaaggcagcaggcaaggggagaagcaggagtgtggggccattcaaaagagaactgctcttttgtggctgcaaaggggaggtaaggcagtttccatgccttcctcaagagctgcctttggggttacccctggtcagtgctcacttggggtcctggaatcaaaggttcttagctcataatcacctcattcatggctggctgggaggtgtgctgtgtgcatgtctgaccctgggcgtgaggaacaccagccaagtccttctggctgcggttaaaagggctcaccagcctctccctgaaggtgaagtgcaaagatgggctggggatttttaaggggagtgggaagtattaatcgttggggtgctagctccactgtaaatacactaaagccagcatttttttatgtctctggaatggtggatggtgtccggcaagggccagaatagcctggtt

SEQ ID NO: 14219 - DNA, 2300 bp, Homo sapien
tctcttcccacagacaggccaacaaccccatgctgctgtcatggtgctgccggaatcccacttggctctaaggggctgctcccagtgacccccaaaatgtggaccctatagtcctctcagttggcctgaggcatgcactcacttggccacccagtcatggcttttactagccttttaatgggatgcccccggcacgtgagaccctagtggaagcatggctgttgtgtttcccctgtgtcaggctgtgcagggctgagagctgggacagagggaaggggaggatatggtgcagggcctcagcggtcttgcacccagccctcttcagccacatggctgctgtgtggctttggacacattgagcacccaaaggacactcagctgtgtttctgtgagaggaggcaagttactatcccacacagatgggtgggaatgaccaggtgagagcagcacactgactgtgaaggatggtggatgtaaaaccagctgggaagaaggttctggcttcagagagaagcagaagggcaggctgtgggggcaggggcttagaactgctatgatggagcgggtgtcagtgcggctgcccagtgggtacaggagtggagtaacccggggcctgggctaggggacagcctcacggggagaccgtgttgagctggagtggagcctgttgaagggcagggctggagtagaaagcatggactttggggtttggcctggcttcaggtcctggccagtagaaggacagggtggtttgggctcagtcaggggtggggaaagtgtggcctcttactgaccagttggcttctctcttggttgcaggacagtgatggagacaagagtgatgatctggtggtggatgtttccaatgaggtatgggcaggcccggtcgcaagggggctcttggtttggcatggtttggaattattcctccccagggtgggatctattctgtctgttctagtattactggcagcctgagcagggagacaaggcctccagtcttggggtctcagggggtcaagaggagcagggcagggctttgctgcatggtgtctgggcatttatgggcctggagggcctcctgcaatgggtctccagagagacacccccaaagatcccaggtaggggccatcttctattccccgtgatcctccgtccccccagggtctcagcctcaggggcctgaggaggagctggagagcatctacatttggccaaacccagccatgctgattgaagtcctgaacttgtgtttgacattgggaagaccatccttccaccctccctaggcctcagtcagaccagatggttaagagctagtttttcctcactgtggggcccccagtctttcagccaagctcgtcttcccatcgcccatgccctctctcttcccactcccagagcagggaagcctcgaggctggctgttgctttcagtgcatctctgcatcacttgtgttttcaggaccccgcaacgccccgggtcagcccggcacactcccctcctgaaaatgggctggacaaggcccgtagcctgaaaaaagatgcccccaccagccctgcctcggtggcctcttccagtagcacaccttcctccaagaccaaagaccttggtcatgtatgtggggtctgggtggaagggagtgggaagggagcggcagggactggagctggggtggtgccgattggcaggcagaggggtggagtgggagaagctgggtgggtgattggccccggtttaccttctgtgcctgctgggcctgtgctaatgagttaacgtttctgagcctcggttgctacgtctgtaaaatgggagtgatcaccccagtccctgccaaacaaggttgggcaaggattgagaggctgttcggcagaagcttcataagggtctggctctgggcttcacgttgggaccggcaccagttgtgcccggctcctaggagaatggaagcctcatggcctcccttgttctgcatctcccctcttcagaacgacaaatcctccacccctgggctcaagtccaacacaccaaccccaaggaacgacgccccaactccaggcaccagcacgaccccagggctcaggtcgatgccgggtaaacctccgggcatggacccgataggtataatgggtaggcaccatgggctgggttaatctgattggggggagggggtctgctcttggccagggcaggggtgacacacacgcatgggatagagcacaggcagtgtctcccagggcctgcccctggggacttcacggtcagatttgaggaggtgacaccagggtttctgggacccc

SEQ ID NO: 14220 - DNA, 2300 bp, Homo sapien
ctcgggctcggctcccccctcccccgcacctccccggcccgggctctcggcgcttccacgctctcggaatcacgacccctccctgccatgtatccgcagggcagacatccggtgagtaattgcaactcggtttatttaagcatctatcatggcagggtaaacgaggcagtttatctggcacctccattttgcttgttgctacctttatggtgtgtgtgtttgtgtgtgtgctctcacacaaagggggatgcggccggggggcgccgttgagagaggaggttaattccgcgcgagtggcgcggggggctgcttgtgttccagggggagctgttcacgcggtccccggccccgctctgaagtctcccaactcacccggcttgtctcccgcccccgccttactggggagagggaggcccttggtgaaaggcatgggagccccgctgccgacggggagagatggggcgccccccctccgccccgtcggagagctgagaaacttgctgggaaggttctgggctgagggtggcctcttttggttgggcgccgttggggaggggccggggccgctctgagcgcggtctcatgcccccgccccctcccctgtcttgtcttcgcgggctccaggctccccatcaacccgggcagccgggatttaaattcacggtggctgagtcttgtgacaggatcaaagacgaattccagttcctgcaagctcagtatcacaggtaaggccggtgggggccgccccggggctggcggggaggggtgggtcccctgcgcggctcctgccatcccccgcggggacggagggggctcccgacctaggggcggcggggcagcccgggcctccgccttttgtttcccctttccgagcgcgccgccttaaccctttactgcccgcagcagcccggctcccagcgccgcccgtggggtccccgaatgagggtctaggtcgcggcgagcgggttcactccgggttctgggtgtcgggagccagcgtcagggtcctactcccctgctgccgtgataagtcctttggctcgcgggaagtttcgaattgtttcacatccccctccccacggcggggacccaaatccccccgcgtccccaggctgtgggataatgggggcgcccccgggggggtgtcaggaaagtggaaaagtggctctagaggcccttgggtcggggcctcagaggaggctgtccaggcgccacgcctgagccggctcctcctgccctcgcagcctcaaagtggagtacgacaagctggcaaacgagaagacggagatgcagcgccattatgtgatggtgagatgcggccgcgggcctggggggcggttggggcgccgaccccggccgggggcgcggcgtggatctggggagatgagcgccaggtccccaccaccgcccagccgcagggcggccctgagagagggcataatctggtcttgccctccccttccccagcttccattgccggggccacttggaggagggtgagtgaggggaggggcagaaagagaaaccccgattccaggccggagacttctgtactatctttatgtgcctttaatttgtgttttgaaagtttcccaggggctgattgccattgccctatcttggctagtaagataggattggaccagcccatgtgaaattagggttggtaaaaatctctcttagtgacctcctgggagtgtttggaaacttttctgctttgcagctgggatctagccagagtaggacagaagccctccttccccagggtgttgtgaggagtggagaggccttgtaaagctctctctgcctccactcccctcctcagggatcccccagctgggtatcttctccacgctggggcagtaggcagactgtcttccttttgcccagcaagttttaatcttcatttgtgagagggcacggctccctgcactgctttccacataagaggccttcgacacagtgctaaataactctcagaggacaagagggtcccagtgtacacacgattccctgttgaacctgaaccttgtataaacaggatatagggcacatgtggtgcttgtgggagggaaggcccagctccccttactaccacataatataacgttctgttgagatgagaggaacgctcgcccttgtcagctcttaaaccgctctgtaagctggctttggggtttgatttaaacttctttagcaaatgtatcgtaaaagtatgatttggccaaaacctttccaagaaaaaactgattttgaaaaatgaccagatttctgtgttgtctgttaatagccattctttt

SEQ ID NO: 14221 - DNA, 2300 bp, Homo sapien
ccgggagcaggctgagcaaaccaggtgggaactcggagttcccgggcctcggccgagcagggtcccgaccccatccccaaccccctcagcctggggatgcagtgaggagcccgcgcggcgaggctgcgtcgagggtgaagttgtgcccacggggaaggcgccccgaatggggccagccgtggctgagcctgttgtccacgggcagccgggcccttccatctgcgctgcccgcctagccagagtccctcagacttctcctcgcaggcagccgccgcacatcaaaggagctgtttatttggctttctgaaaagaagggcgagtgaacaaaggagagctgggggctaatgtgggggaggcgggcagaagaaggggtgaagaaaaggggacatcctgagttccgagcaaatttttaaaggtcggaggcaactttaggagccaccgttttatcagtcctaaatcttttgaagtgaaaacattaaagtgacaaagtgattgtttgttttatagtatctaattgggctgctttgcagacctaatgagattagagggaggaatcgttcgccgccgctgcagaataaactgatacattactaccagccacaggttttgaagattgtacagcttgtcttattttcttttgttgttattcctctgtcttccctctttcctcctcccgctaaataattatttgctagtagaccgtgggaaaaaaaaggaggaaaaaaactcgagcagcccaggactataatatatatctatttattatatgtctttcggttaattcctgatctgaggagcgctgtttttcactcccatgcgaaagtcaccagcgggtagggcctgattgctacttttcatgcatagttttagacacaagagggcattgtgacgtcgcgcccagcggcacccagtcgtaggccgagtcccgcagccccacgtgggggccccgcgctcccattggccagcgccggacgaagctgccacattattttgttacttttcagtccctatttggaactgctctcgcggcagttcagacctcgtgctcgtccccttcgcctgtctgtgtgtggtatccgtaggtccggggcacttttttttttggtgtgtgtgtgtgtgcgtgcgcgcgtgtgtgtgtgttgggtgtgtgtgttttgggggtttgccggggcgcggagaggagagccgggccgaggggaaggaaggaagccgtagagctccccggtctcgggctgcgtctcccctccagcgctctcctgcctgtgcgctccgacgcggcagcggcggtggcgctgagcgctcctcggtggggacgcggtgctcaagctgggagcagcgagaaccctttgcggaggcttcccgtgcccgctggacttaggatgccagggcgtttgatttgcacctactgagcccggagttcctccccggccctgggaagggcttgcagcggcggcggcggcggcggcagcggcagtagcagacggaacagcaggctctcctctccgagggggggcgtcgaagcgcccgcgccgggctcccgccctcaccctccggcgctcctgcggccccaagccaccacctcgtagcccgcctccttcctcttctcgccgcgagccccaggcccggacgcctctaggatcggacccgcgcgccccggatgcttggggctgccccggcgcgcccccctacaggcgcgacccgctgagtgacccggagggggcccgagctcgccccaggaggggcccccggcctcgggaccccgcgccggacctgctggggagccgacgatgtccgcgcagtcccaggcattgacgcgctcgacgcagcccagggaaggcggccggccgctgcccgccgagccctaggcgcacaaagcccgcgcccgccgcccggccccggcgcccgccgacgactttgccgcctgctccgcggctctttgtctccacttggggcgggcgcccgactctgggatttcgctgcgagaacgagctgggggggccgggggcgagctctcggtttcccggccgccccccgctcgggctcggctcccccctcccccgcacctccccggcccgggctctcggcgcttccacgctctcggaatcacgacccctccctgccatgtatccgcagggcagacatccggtgagtaattgcaactcggtttatttaagcatctatcatggcagggtaaacgaggcagtttatctggcacctccattttgcttgttgctacctttatggtgtgtgtgtttgtgtgtgtgctctcacacaaagggggatgcggccggggggcgccg

SEQ ID NO: 14222 - DNA, 2300 bp, Homo sapien
attactagggagaaaaataaaatattcctttgatacacaaaatcaaattgatatttagcctctgcttacttttttatgcatggctcctttataccacatggtagtgacagattgtttgagctggaaggaaaagccattcaaagctaattaagcagccattccaagcactatttgcaagcgggaggctcagaagcctcggcatttgtcagcgctcccccaccccgcgtggttttgactgacagctctggccgcggactgacagggcccagcagctccgccaatcagcaacgaagagccccttcggcggtccgtgattggtgactcgcaccttgctcggaggcgtggtcggcgtcccccacgtggggctggagcgagaaatgggcggggcgagtaagaagcgggtgcgcccacccgtgacgtaagggggagggcagagaagggggagggggaaaggaagcgccaaagaggagccattttgtttctaatgaatgctgcggccagatgctcgcatctgtcgagccgggcttctccctcccccgtcttcggtgcgcgccgaaacacgatttatgtttttatttaggagaataaataaatgaagaggggagcgcggttcggggctggcggccggagcgggcgcggggaggttcagttctgaggcgggtgctcacgtgtaactccccgcgctccggcctccgagcgcccgctagctctcagctcctcattaagatgcaaaagcgaacctccggctcctaatgaggggaaaatatagatccggggacgcgcggccggctcgcgcgcgggctcgcggacttgccggggagggccccgggggtcccgccttggccgtccaccgggcggtgcgcgctttgaggtccactccctgcttgctcgtctgccccgccgtaaccccgagcgcgggagggcgaggccatcggtttgcgggcaagctggccccggagtcgagtggcctgtgcgaccaagcggggggtccggggggcccggggccggggcgagcgagcgggggagcgtccgcgtccctcggagtgtccaggctagcgaccgagacacctacaggcttccgccaacgccgtggcactgccgggagcaggctgagcaaaccaggtgggaactcggagttcccgggcctcggccgagcagggtcccgaccccatccccaaccccctcagcctggggatgcagtgaggagcccgcgcggcgaggctgcgtcgagggtgaagttgtgcccacggggaaggcgccccgaatggggccagccgtggctgagcctgttgtccacgggcagccgggcccttccatctgcgctgcccgcctagccagagtccctcagacttctcctcgcaggcagccgccgcacatcaaaggagctgtttatttggctttctgaaaagaagggcgagtgaacaaaggagagctgggggctaatgtgggggaggcgggcagaagaaggggtgaagaaaaggggacatcctgagttccgagcaaatttttaaaggtcggaggcaactttaggagccaccgttttatcagtcctaaatcttttgaagtgaaaacattaaagtgacaaagtgattgtttgttttatagtatctaattgggctgctttgcagacctaatgagattagagggaggaatcgttcgccgccgctgcagaataaactgatacattactaccagccacaggttttgaagattgtacagcttgtcttattttcttttgttgttattcctctgtcttccctctttcctcctcccgctaaataattatttgctagtagaccgtgggaaaaaaaaggaggaaaaaaactcgagcagcccaggactataatatatatctatttattatatgtctttcggttaattcctgatctgaggagcgctgtttttcactcccatgcgaaagtcaccagcgggtagggcctgattgctacttttcatgcatagttttagacacaagagggcattgtgacgtcgcgcccagcggcacccagtcgtaggccgagtcccgcagccccacgtgggggccccgcgctcccattggccagcgccggacgaagctgccacattattttgttacttttcagtccctatttggaactgctctcgcggcagttcagacctcgtgctcgtccccttcgcctgtctgtgtgtggtatccgtaggtccggggcacttttttttttggtgtgtgtgtgtgtgcgtgcgcgcgtgtgtgtgtgttgggtgtgtgtgttttgggggtttgccggggcgcggagaggagagccgggccgaggggaagg

SEQ ID NO: 14223 - DNA, 2300 bp, Homo sapien
ttcctattgctgctataacaaattaccacaagtttcgtggcttaaagcaacacacatttattctcttaaatgctggaggtcagaagtccaaaatgagtctcacagggctaatatcaaggtgttaacagaggtggttctttctgagggccccagaggagaacctgttccttggctcttctagcatctaaggtggttggcagcattccttggctcctggccacaactctccagtgtcttcttttgatgtcacattgccgtcctctgttctgcagtcaagtctctctctttgaaggatacctgtgattacaggtacagtcttcctggataatccaggataatcacctgttcttgaaattctgaatttgatcacatctgcaaagtcccttttgccatgtaagatgatactcatgaattctggagattaggatgtggatatccttgggggccattattcagcctacttcagggacagactgaggcagcgagaggaaatttagacacttttttggagtagagggtaaagggcaggaaacccagcacaatctatctaatctggcctcactcttgaagcctttgagaggagacacagtagagaaagcccaagggcctgggaggggacaggcctggatttgcatttcttctctgttagctaccagctgtgtggccttaggcaagttagtttaccttcctgagtctgtcttttaaaccaaggaaagtcatgctaacttccttggctactgtaaagatgaacaataacccatgaaaactgtttggcacagtgcctggcacctagcaacgcctggtggctgcaagtattatcataaactccctatccggtacctttgtgagtgaaccagagcatcgatgggggaggtgcaggcagagtggagattccagcagggacccacatcagcaaggggtggaggcaggtcacatccagcagcaaggatggctccatcatttctgagcaggagtcctgtgaagggcctggctgtaactgtccagagctacagaggcagaacctgtgaatgggaggcattgtctgcaaaaagcagggacaggaggatcctgaaagggggagtcgtctggagcaaggtcccagcacccactcccccactggctccattttcgggaaactgcgatcaggactgcagagcaatgctggggcaaagacctagtgctgggctcaatgttcataagctatgaaagtctctcattcacctcctgctggtgtattcttgccatgctctagacttctcttaggctgagaacaaatctccagcgaaatgtttaagagaatgggctctggagcctgtctgcttacatttttttgtttgttcgtttgtttgtttttttgagatagaatctcactctgtcacccaggctggagggcagtggcgcaatctcggctcagtgcaatctctacctcccgggttcaagcaattctcctgcctcagccttccaagtagctgggattacaggcacctgccaccatgcctggctaatttttgtatttttagtagagacggggtttcaccatgttggccgggctggtcttgaactcctgacctcaagtgatcctcccgccttggcctcccaaagtgctgggattacaggcatgagccactgtgcttggcctatctgattacatttaattcacagctctgccacttactagacctatgacttgagaaagctacttagctgctccatgcctcagtttccccacctgtaaattgagggtaatagtgacagccatctcctagaatcattgtgaagactctgagtattaacacagaaagtggaaaggctgtttcagggccctgtgaccccctagatcacaggctctgtgcactccccacccataccaactccagaggagaggagtgagtcacatccaagtcatcacctaaatgaaccaacttctagatcagtttattatcaaaacacagtataaatattgtttttatgctcaataaacagttcctcagctctgcaaaatgaaatattcctttcattatgaaactgagaagccatttatcccgtgtcttaagtggtatagatagactgtgcagcagccagcggagggataatgacactgtttattttcactagctcaggatgggctgacacagtatgtatgccggggaagcgagcacggctcctggaaggggactcgaaaatctgtcattctcgccaagaacaaggtgctaggcatctgtttttgggctccacttgccaggcctgaggaaggcggaaaaaatgttgggattccacctggcacctcgaggagccagcgc

SEQ ID NO: 14224 - DNA, 2300 bp, Homo sapien
tttagctgggcttattgtcttcctgaacaaaatcaagattctatcattaaagatgacttggaaaatggctgttgggtgggcaattggccgtgtctactgcaaactcatctaaactagaactaagtgggctgggagatcccaggaatcatctgggttatatgaataagacagcacttgaggacttcacaatttagaagggaagacagataagtaattggaacaacaagaacactgaattacgttttaatataatgtggttagaggaagcaatcgaagcaagcacaggaggctttgaagcagaggtggggtggggaggaggcacaggagcaggagttaatcacaggacagtgtgtctatcgcatgaggtggggtggggagggaagaggacgtcctctgcaaaggggaccctgtaagtgagggatagtgtgtggaatcacaagccgttttgtattatggggaccagtctaaggtgggaagggatggggtgtgaagttggagacatccgcaggggtcgatggtcaaggttctctctgcctgggtacgaaccttggccttcattctgaaggctgaggcactgaagggtttgaagcagggagtggcctggtctgaactgtgttttgcatagccattccggcagcgatgtgggggtggctttgcttagacagaaggcagagaggtagggggtggggaggcatctctgaagactctcaggatgtagcaggagagtctatactgcctgtcccagctctgtagtctgggtgatgaggtttggtggtgctctttactaatttagtccaggaggaggggcaggggcatccctgggcaaggggaatagggatgcgtgctcctagttctgtatggagtttggagagtgaactggaatgaggagtgccagacccaagcagatcttctccgtttttaaagaggaggaaatagctctgagtgggacaactgaattgtccaacgtaggtcacgctgagaggtgacagcgtgctggcagtcctcacagccctcgctcgctctcggcgcctcctctgcctgggctctcactttggcggcacttgaggagcccttcagcccacccctgcactatgggagcccctttctgggctggccaaggccagagccggctccctcagcttgcgcgagggagaggcgcgagcgggaaccggggctgcgtgcagcacttgcgggccagctggagttccgggtgggcgtgggcttggagggccccgcactcggagcagccggacggccctgccggccccgggcactgaggggcttagcacccgggccagcggctgcggagggtgtactgggtcccccagcagtgctggcccaccggcgcgctgcgcttgatttctcgccgggccttagctgccttcccacggggcagggctcgagacctgcagcccgccatgcctgagcctcccaccccctccatgggctcctgtgcggcccaagcctccccgacgagcgctgccccctgctccagtgcccagtcccatcgaccgcccaagggctgaggagtgcgagcgcatggcgcaggactggcaggcagctccacctgcagccctggtgcgggatccactgggtgaagccagctggattcctgagtctggtggggacgtggagagtctttatgtctagctcagggattgtaaatacaccaattggcactctgtatctagctcaaggtttgtaaacacaccaatcagcaccctgtgtctagctcagggtttgtgagtgcaccaatccacactccctatctagctgctctggtggggccttggagaacctttatgtctagctcagggattgtaaatacaccaatcggcactctgtgtctagctcagggtttgtgaatgcaccaatcaacactctgtatctagctattctggtggggccttggagaacctttgtgtccacgctctgtatctagctaatctagcggggaggtggagaacctttgtgtctagctcagggattgtaaacgcaccaatcagcgccctgtcaaaacagaccactgggctctaccaatcagcaggatgtgggtggggccagataagagaataaaagcaggctgcgcgagccagcactggcaaccagttgggggtccactgccgcagtgtgggaggtttgttctttcgctctttgcaataaatcttgttactgctcaccctgggtccacactgcttttgtgagttgtaacactcactgggaaggtctgcagcttcactcctcaagcccgggagaccgcgagcccaccgggagaaacgaacaactctagacgcgccgcc

SEQ ID NO: 14225 - DNA, 2300 bp, Homo sapien
tgagaacatgcagtgtttggttttttgtcgttgcgatagtttgctgagaatgatggtttccagcttcatccatgtccctacaaaggacatgaactcatccttttttatcactgcatagtattccatggtgtatatgtgccacattttcttaatccagtctatcattgttggacatttgggttggttccaagtccttgctattgtgaacagtgccgcaataaacatatgtgtctttatagcagcatgtgtctttatagcagcatgatctataatcctttgggtatatacccagtaatgggatggctgggtcaaatggtatttctactttgagatccctgaggaatcgccacactgacttccacaatagttgaactagtttacagtcccaccaacagtgtaaaagtgttcctatttctccacatcctctccagcacctgttgtttcctgactttttaatgattgccattctaactggtgtgagatggtatctcactgtggttttgatttgcatttctctgacggccagtgatgatgagcattttttcatgtgtcttttggctgcataaatgtcttcttttgagaagtgtctgttcatatccttcgcccacttgttgatggggttgtttttttcttgtaaatgtgtttgagttcattgtagattctggatattagccctttgtcagatgagtggattgcaaaaatgttctcccattctgtaggttgcctgttcactctgatggtagtttcttttgctgtgcagaagctctttagtttaattagatcccatttgtcaattttggcttttgttgccattgcttttggtgttttagacatgaagtccttgcccatgcctatgtcctgaatggtattgcctaggttttcttctagggtttttatggttttaggtataacatttaagtctttaatccatcttgaattaatttttgtataaggtgtaaggaagggatccagtttcagctttctgcgtatggctagccagttttcccagcaccatttattaaatagggaatggtttccccatttcttgtttttgtcaggtttgtcaaagatcagatagttgtagatatgtggcattatttctgagggctctgttctgttccattggtctgtatctctgttttggtaccagtagcatgctgttttggttactgtagccttgtagtatagtttgaagttaggtagcatgatgcctccagctttgttcttttgacttaggattgacttggcgatgcaggctcttttttggttccatatgaactttaaagtagttttttccaattctgtgaagaaagtcattggtagcttgatggggatggcattgaatctataaattaccttgggcagtatagccattttcatgacattgattcttcctacccatgagcatggaatgttctcccatttgtttgtatcctcttttatttcattgagcagtggtttgtagtttgccatgaagaggtccttcacatctcttgtaagttggattcctaggtattttattctctttgaagcaatcgtgaatgggagttcactcatgatttggctctctgtttgtctgttattggtgtataagaatgcttgtgatttttgcacattgattttgtaccctgagactttgctcaagttgcttatcagcttaagaagattttgggctgagatgatggggttttctagatatacaatgatgtcatctgcaaacagggacaatttgacttcctcttttcctaattgaataccttttatttccttctcctgcctgattgccctggccagaacttccaatactatgttgaataggagtggcgagagagggcatccctgtcttgtgccagttttcaaagggaatgcttccagtttttgcccattcagtatgatattggctgtgggtttgtcatagatagctcttattattttgagatacgtcccatcaatacctaatttattgagagtttttagcatgaaaagttgttgaattttgtcaaaagatggggtcttctatgtggcttaggcttgtctccaatggggtcttgctataggctgatctcctgggctcaagtgatcctactgcctcagcttcctgagtatctgggactatgcttttaattatgcactaatacacattgaaatgctaagtaaaacggcccagtcacatgtaaattgttgctgatgtttccctatttcatagaattgtttgagttattttttaatagaagaaaggttttttgttttgtttcttttttagtgtttattttttaacactgtaggcctacagattaagg

SEQ ID NO: 14226 - DNA, 2300 bp, Homo sapien
gaccatgagcagtaggatctgtttgctcagttgcaatcagctgaaccactcatgggctaactgccctcatctcaggtcaatagatacttgttatctgaatgtggatagtttactggggaacaatgttgctggtaaatgtgtgttacagatctagcctatttaacaatttagtccaagaggaaagaggattcatgaagcagatgtggattctggttcttaagatgggtgagaatctagtgactgactaccaagttacttattgaaaaattagttttatagtttcaaaccagacacagaagaaaccttagatatagtcaaattagaggggagctgaggagacaggcagtaagctaataaacagataaacatctgatgtaatggcagatactgatgagctccctgcagaaaagtaaaacggtgcaaggataaagagtggtggggtagagtgggacacggggccgtttagatgtagaggtctgagaagccctctctgaggaagtgacattggagaagaacctgaaagtaggggagggaagaaccttataggtacaggggacagcaaaggtgggaatttgcgtagggctcttgggaaatagctatgaaggaaggtgtgaaagcaggcacagaagattaagccacagaggctggggaggtggcaggcagctcaggacatccataatactaggacacacaatcctatctcctgaacatgggccgctccttatatggctttagttatttgttactgttttccctcttccttcgcctttgctgtcctatttctagaaagaatgtgcttgctttgttacccaaaggacaaggtctgagttctaacaaagatttcctcaaagaatggtgacacagactgggcggagtctctgggtttagccaaatgaatccattgtgatatctcgtggtttgggggaaaaaacaatcattgtttcaaaaatgagatatggtatatgacccttatatattttataattagaatatgggcctaatgttgtaaatttagtaggaaacagatttcttgtggaagtacatagcagaatttttaactggcagcatgatctataatatagcagctacttccttcctgtaaacacttgtgttggaatgttttgcattcccatgaaacaattttcacaaatgtgtctttttagaggaagtgtaaattattctcatgctattgtggtaatgagaacatggttaaaaaacaacaacaacagccaccacaaaaaaaccaccctgaatttgcaccggccttggtaatgtaagaaatgttgatacaagtatgctatcgtagagaatgcagagaagttatctgctttgtccccaaatggagatttttttaatagtctagctcgttgtctaatgtgtatttgcctcctttagtgtttaaccagttttttttttcatccagtgaatccaggtaatttgacttttcactgataaaatatttacttgttatattaggcagggtgctaaacttggaaactaaaagtacagagttaaatttaaaatttgttgaaaagtatgcatcactatgtattctatttaatgttttggcagtgcctctggctcttctcatttaacatgctaggagacagactggcagcagttgtaagctgaaacctggttgtatgcagagagactgataggggtacaaaataaaatggagaaaatttgaaagtgttactgtgtgtgcgtttccttaaattaaaatgtgacacgtttgcttaaaatagaattttatattctgtttgtcagggctattataacttcatgttagatgatcctaagactgaaactggttttaaatattgttctgtggaataaccaaatttgtctcttaaaatgttgtcattatgtcacacaattggtttttatataataagcatgttttacaatatgtttgagtcattttccccagtagacctgaaatttattactcagaggaaaagcatgcatttacaatatattcttagctgctcctttctatcattcagctgtcaagtcctatggaatctaaagtagaactcaaccaatgggagacaggctccacgctgtttaccggacaattcggatgtggacagttttatcatgcactgcagcgtctgtgttgcagtgttgaggcagcaggatgcagagtgctgttcaagttttccagtggggtccctcaaagggacaactttgaaagatagctagcttccaaagaataagaaatagatagagttactgtacctgacttggggctgctcttaatcaagttctgcattgcaaggaagataatattcgag

SEQ ID NO: 14227 - DNA, 2300 bp, Homo sapien
caaatatatgtcagttattccccaattttaagtaaattgaagtccagtaatgaaataaggtttgctcagctcatatgtgttagtatcatatgagaggtataattgctgtaactatttggaggatggagagatcacttccagttacttgatcagggaaggttctatagagaggagggcacttggaagggacatacacttaaaaacaaactttttgttaaagcataacacacacataaaagagaatatattgcatacagtacaggctcattgaattttcacaatctgaaaacactagatatgtaaccagcacccacagagaatagtacagtattccagaagcccccgacatcccctaccaatcactcttgggggagtaggattttctgagatgaatgtagacagacagaagattattgggggagggatcagtatgcataaagatgtggaagttgaaagccatgacccatgtttggagaatgggctgaagagtaattcgcttggggtgttggctagagaacagggtcgcgtccacgttatacagctttaaatgcaaagaattagattttattcgttagctgctgaaggcttttgagcaagaggagtatttttgtaagacttattgatgatggctgataatttattggtgatgggacaattaagagactgaaggttgggagactggctgggaagcttctgtaataatagtccgggtatgaggtaattttggctctgcagtggcagtgagaacagagtaactgaccatacacagacactttaaagagccaacaagaactaaatgactggagatctagaggaagggggaggaatcaaagaaaattttcttccaaagatctaatcaagatgaaatttaataatatttttgggtagttagttgttatttacttgttgtatagggttaacacagtctttgaatgctgcctctccaagaaattctgaaaactttcttacagtatttgaagaaaaccttgcgttactataaagaaactctaaagagagcaactgacctttcagacaaaaaagagtcctttgttagtcagaaaatgtggaccgtttgtcttttcaaatggatgcatgctacgataaacgttttgctggggggaaaaatgactccaaagaagacttttgaagatgtcacccgaacagcaaattattgggtgctgagcaccttcctgtttcttcatcctcttaaataatttttactaacccagatttctaggtaagatgatttaacttcatcgtatacgtttacatgtaatgtgtttctacagaaaacaaaaaacctttttgaagaaaaaagggcgtaactttttttgacaacttaaatcactggctgtgggagtcatttttaattgatggcacctcttctcctccctccccgcccccattccgtccctttgcttccaatacggcggattcttcactcaacaaataaacgagcacgtaacttgtactgtaacttactataacgtctttcaaggtctttcttaactgtacgtttttctgcacaatcagcaccttatttcttagagactgtttatttctggaatttttgatgcgtgtggtggtttccaggcaccaggatttggtagtaaaacaggagactgaaaagaagttgctcctgaaagctgttctgtgtgcaggtaaccaagagtcatttctaagaccagacggaagggaaggaactttacttggtaaagagcgcgtgggtggaaagaggaggggagtccgggaagatgagaggtggcaaaggcgggaccccgtgctctctctagatcttaagctccgggtgggcgggcgccggtggcctggagcccggcctgcgcgcatctccacgcctctggccgcccacctcctccgccccttcccgggctaaagttcccaaacttttcctccagctgggagaggaagggtgttactcagtttaaaagggaagtcccgccccattcccgcattccgattggtcgcggtttgccacgcccccgccagggcagcgggtcaattggctacgggaggggagccccgcctcaggcctgtcgacgtctgctgcccggggcccgcaggtggcaggcaggtggggctggtacagcccgcgccgcctctgctgcagccgctgccgtctactccttgcgcgctggcactccgcagcctttaaggttcgcgcgggggccaggcaagagttagccatgaagagcctcaagtcccgcctgaggaggcaggacgtgcccggccccgcgtcgtctggcgccgccgccgccagcgcggtgagtcccgcggtccgg

SEQ ID NO: 14228 - DNA, 2300 bp, Homo sapien
atgaagtatttaaggtataatcttgtgtaaaacatacctcaaatggttcggggaaaacacatacattgtatatccattcaccaaatatggcaaaatgttgtgttaaatctagatgatgggtatatgaatgctcatagtactattttttcatattttctttatgtttgaaaatttttatgttaaaaaggtgagaataaaaggaaaggcatctttttaatgaaggagatgtggggagatgatcaataacattttagaggctgtaaagacttttctttattgttcatttattctgttcccttatataagctaggtattaggctaggtatggaaatacaaaaaggaataagataaggcagctgccttcaaggatctcactgtctagggaaggggaaacacaaatatctcaacaccattgagtgagtgtgatgatagagatacgcattcagtcaacaaacatgtcctatgtgctgggtgctgtgctaggtgctgaagatacaatgaacgaagcaagcatggtccttgaattcaccgagctcctattcctgtgagggagacacaatgatagaatcacaattgtggaaggtgctaggcataaaatgtacagagtactacagcaacagagaagaaaggaaacacagccagctctggggtggggattgggggtggtggagaagaggcagcgaagttttaaaggctgactagaaatcagtcaatcagaggacctagaggtgggggtgcagaggcatgtagacacaaaatagccccctatgctcagggaactagctggaatcacgggagcgtgaactgttgacagcgtgaactgttgaggcaatgggctgaggagatgatgtgagtgggtgtcacatcttaatgagcagattgaggaatctgggttttctcctgtaggctccaggagctgagaacattcacatcgggtgatggctgctgccatgcgagcctgggtccaaacaggggatagtgtggatcctgttcttggctacatctcctcctgctctgggtgcctgcccactgggctctgtcagctcaccgaagaaccccagggattttctggggtcaactctatgccagtgggcagcaggaagggcttcagactgaacacttgctgagactcaagccacgggagctgggcagttctggaggaagagcaagaggggttcaggcaagaggcctacccatactgaggcttggtttctcctagacctccataggggatctttccaggccttaaacataagtagagctttaatcctggctaatgatacaatctcacaaatttagccctcaggatagggatggctatttgccactgccacaggaaaataaagttataaggataaaccacttggggctattttacatactctgatattgtctgactaggggactgccttctcgagactgtgagctgtcagtgactaagggttcatcatttttatgctctcggtacttggcacagagctaaacgaatcaggccttgcattataaagcactgatctatctactttgtcatacactatggtccagctttcctgccctaccctggtgggctgacttttctcccctaacaactgtctctactggtctgccccgaatctctgggtccagaagtctgaccctttaacctggggaagggtgagccagtaatagagaatggctctgggcccagtattcttccacccttgagttgagtattctcccagtgaagtagatatacgcttgccaggacaatcctgcagaaccttaacagctaaacgcctgggacagggtcctagaagaaagagagctcctaataagtgcctgttggcatccaccagaatgtgcaagttctgtcatttccccactctcatgtctatgtctatgttttatctcctttcaacagcaggaacaaaacaccagtccttaagggcctgggcattagtggacaggagccaaggtgcctgaggacaaagctcgggacccgggacaaggttaaacaagtgccatagcagctccaaactacccaaaacccaggaacaccccccccccgccccccgcaaggcagcaagatgatgcaaacataaaggtctggtgggaaaggctgtgtgaaaatgggaatcccccagggcggaggaagtaaagcagcaagtcctctatccgtctcaaattaccttgaaatcccacctcctggaatcccccatcagcaagtgtccgctgtacctggcctgctaccacctaaagactgagcgcagccagcaggactgggaaaggcagggcgatgatggcagtgaagggtaagcggg

SEQ ID NO: 14229 - DNA, 2300 bp, Homo sapien
tttctttttttcaaaactctcaccaagtaaaacgcttctacagcccagattcacccaccaactgtcagttttcaaactgtattttcagaatctatattttaagaaaagtccccaggggactcttatgatcaggcatttggaaaccctgaaaagacatgtatgaattgttcataaactataaaacctgagatgaatgtgagccatcattgtgggtaaggataacaacccctgatgtctttgccacacgagatggcttaaatgagatagataatgggtatcactttgtgaaattcaggaaccgaaattatcaaactggaaggcatggtggctgctgcagctctttccttctgagcctcatcacaggtgtttgcagaggatctatagccctggagggaggcacagctggctggaaaaagacactgtcagcctcttgcctcttcctttcccagtagctcagatccagggctgtgagctgttctggtgcagaaacagcaatagcaccaaaggtctctctctcttcctttacttacttattttaggacctcttctatcaaaacagaggtccgacaaagaaagggacacagattctagtgtccttaagaagaggggctgtcctcgctgggcccctgggtctctccccagccctgcccagacacccaggaccctatacatggtgttcttttacaaggacactgccctccaggagacctcatttcctaagcctatcctaacttgtctttctatatcaaaacaaatgtattggtccagggttctgttgttttggggtcccagtgtggcaaattaatatgataaattatgtttaaggctctaaataaagtgctacatgaaagcagattcaggtcttattcatttctttttcttctttccttctttctttttttttctttttcttttttttttttttgagacggagtctcgctctgttgcccaggctggagtgcagtggcacaatctcggctcaccacaacctctgcttcccaggttcaagtgattctcctgcctcagcctcccgagtagctgggattacaggcacgtgccaccacgtccagctaatttttgtattttttttagtaaagacagggtttcaccatgttggccaggatggtctcgatctcttgacctcgtgatccgcccgcctgggcctcccaaagtgctgagattacaggcttgagccactgcgcccggccggtcttattcatttctatgctcctgtccctagtttctgggtcacatttggagaggtgagatggaactcaatttgaagttacacgtgaaaaggtggcagtgttttagaacatcctgacatttcaatagctccctttattcattcaacaaacatctgagtgcatactatgtgcagggcatactctataggccatcggctttcgaacttttgtgaacttcagcatcacctagaggccttgttaaaacacaaagttctgaatcatagattctgattcaggaggtctggatgagccctgagaattcaatttctaacaagttccccggtgcagctgatgctcctggtctgggaaccacacttggagaaaaactgatacagggcaaggcaggagccaagcccctgacctcctaagacgcggtctagggtggttattatgtcaaggagactaacgatggaaattttctgatcttggcaggccagtgggggagacacgcaggaggcctggaagcccctggagctgtggtctctggctgccacccccggagtcaagcacaaacagaagtcagctgtgctgcgcccatccctgcggcgccgtgaaagaaggcgcaggaggagggagccctgacacctcctctcgggctggggccccacagcggcgaaaagacggagggagtgatcgggggtcgcggggatccttccgggacgggcctccgtcggaggagctccggaaagccgccctccacctccgaggccccgcctgcgcgggcgctccactagcggtcggggtggtggcggcggcggcggcggcggcggcggcgcggggcggggcgccgcgacccctgtccctcccctgggccgagcggcaggcgcgctcgcaccgcccccgccccctcgtcgcagtcgctgccgaccggctggctgggccttgcggcgtgaggaccccggcggcgccgcagtcccgcgagccatggcccagtccggcggggaggctcggcccgggcccaagacggcggtgcagatccgcgtcgccatccaggaggccgaggacgtggacgagttggaggacgaggaggagggggcggagactcggggcgcc

SEQ ID NO: 14230 - DNA, 2300 bp, Homo sapien
gacaggtatacagcttggtgaggagggaaactggcagataattgaaaattcaattataatgcaaaaatttgttcttatagtcatgtaatcattccataaatatttattgaattacttaaatttgtaaaatattgttttaggcactgcaatacaatggcaaagaaatcagacatgatcctagctctcatggagcttacattctaatatgagaaacaaatattaagcaaactacacaattatttcatggcaattatggtaagtgctactgaagtatctgtgctattgaatcacatggagtacacgaagaatgagagtacataactaagggatcaaggggaaagatgtttagctgatttttaagggaaaaagacttaattggcaatgatgggagtgggaggggcatagttccaggatattataatacatgcaacaactgagcaaagtcttgttggtaggaagtaatatagtatagtatgtccaagaactgaaaggtcagcatgatggtacacagtgagcaacagggacagtggccttggttagggctagtgtggtatgcagggggaaaaaacatgcagggccatgtaaattgggttaataattttgctctttatcttaataattgcaagatgccattaaagggtcttaaatacccaccccaatgtaggaagcaggttagtactgcagaaagagtgttggtctggcaaccggacctaagtaaggattacagacccctgaggaaattactaacctcttgctataatttaatctgtgtaatggtggcaaggctgaagtttatcacaaggaaggctggaaagttttctttaaaatggtacgtggggaagaaggtagtagtaaccagatgcaaaatgagtgcaaacaatgtttagaaggaacagaaaagtaggcagaagagagcaagatggggaaagtcagctcactagggatactgaacttaaaggcagctggagctagttatcagtcataaaggaagcttggggtgggaagggatttattagcaagctccatcatcttcatctgtagctccacatctccttcgccccatcatttgtgacacaaataagggactttcctcaagcttatgtaatgttatgcaacacagtttcaagcactccaatcctggagatttgctcaaattaaaccctttctatttaaaaactctggagcagcgagtgaaagcaactcactactctgcaggacaagactctgtgtgtgtgtgtgtgtgtgtgtgtgtgtgtgtgtgtgtgtgtgtgtgtgtgagttttgggggaggagcagttagaaggaattaactgggtcacttaattccaaagtgttaatgataagtgggaccttggagatcacctctaaagcacacccctaactttgcagattagaaaacaggaactttcgagatgaggtgcctttcccaaggtgacactaagtggaggagcccagccagagtccaggggtccttacacaaccttcggtggtctctctttacctgtgaagctgcagcctgcttcccagctcgggggcgtgtacaggagactggacctggggcagcctcagaatgcctggctgcctggagctctcctcgcgtgtccaggcggcctgcttggtctccctcctctcccctcttaggtgccggggcgggcacccggtgcagggtgggcacggcgcctgccaccagcctcaggcgctgggagaagcgcaggttcttctggataaccgaagagacgtcaaaacaggctggggcaaagtggtcagagcagatgaccgagcggtcattgcctccgtaccagtcggcgcggcaaccccgcacgaagcggtcccagagcagccgcacggcccggtccttgggaaagcggaacagcgacttcccagacttggtggtgttgccgcagtgggcggccacacaacgggccggcatggcggccgtcttcggtgcgcgggagccgggttccctggaccttcgcccttgggcacgctcctcgcagcggcctcggcgaggcaagtcctcccctcctcacctgtccactccgggtcgggattgtttccttccctacctctggtcaccggaagtggcgatctggggcccccaatgggagggctctttgatatcttcctcctcctcctccctgcgctgctccccaggagccagtggacacaagcagagggatacaaatttcgcgcgggcagcgctgaggtgggccgtaaagaggaacggaccggaagtggtggtggttatagcaaccagtgtggccagcctcttccccagcttatcctcctcccaatactcc

SEQ ID NO: 14231 - DNA, 2300 bp, Homo sapien
aaattaaatcaaaagccagaaattctagaaatgctagagacattatggggaaataatcttggggaaaaaaatctcatattcatatcgtaacttctaaataacgttaagtctaacatgtgtccactgctaacctatttttttcttccctgattttaaatgggatgtgtggatatgccctcccaattaccattttatctaaggtgtcattagtagtaagacataccattattttaccctctattaagaaagaaaaaaaacctccccaattaaactatgacatgccatcaattttaagaaggctcctgatttcagaaatgtgtaaatatcactgggtgcggtggctgttgcctgtaatcccagcactttgggaggccaaagcaagcggattgcttcagctcaggagctcgagaacagcctgggcaacatggtgaaacctgtctctacaaaaaatacaaaaatattagccgggcgtggtggcatgcacctgtggtcccagctattcaggaggctgaggtgggaggatcgcttgagcctgggaggcagaggttgcagtgagccaaaattgtgccactgcaccccagcgccccagcctgggtgatacagctagaccctgtctcaagaaaaaaaaaagtgtaaatgtcaaaaaaaaaaaacaaaaaaacccttacccttttgtaatcaataaaatcacattaagttttttaaagagggctattttagctttatgtaggcagaaagtaagaactagctttaaactggaaatcaaagcaaatctacttaaatttttcagtttagaatctatctacactttaagtcatgctgctatttgtgtagaatttaaaacaatcttcaatttaaatgccaaccttcttaaatcttactttgtttttttcaggaagcgatgatgtttgaataaccagatgaagcccgcagttcacctgaaatgtaaaaattaaaccataaaatttgctcttaatacacaaacacatatttccaaaaaaaaaaaaggtacaaacagaaatacaacaaaaaaatagaacacaatgctctatttctgtttctggtaaatgatcttgttctgaggatttgctgaaaacaataaaatcacatctaagaattaaaaggtttcactgatttattttccaaaatgtcggcagcaatttaaccctctagttagtacctcaggctttcgacatttgccattcaggtctaaataaacatctcaatgagacaggtgaaggaggtgggagtccctaatgataaattctcttcacagttaaaaggaaaagaaaagaaaaaggaattgactggccaaaggaatttaaataaacccaagcctttcacagcagaccagctccaccttctggggagcccagatcctggacaagactttgagtacccatcatacaatattaaattgtgccttggtccagcccacgaacctcaaaccctggtcagacaatagcttgagtagacccagcggtgccggtcctaataatacagcccatctcctaggacaaagacgccagtcagaaagagtaccagtgggaagaaagagaaagtagaaggcccaacttacgttgttcgcagcccggccagaaacagagcgatatttcccgggaatcatgataggagacagtccaggttctctgttagatctgccttccaggtgacgctacagcggagattcaaagagacccgaaagaggtcatctcccaggcaacctgctcagggttaccatggaaacgaccatttccggtctggacctctcccgaatcgatagagccacacagtcgttgcagcttctagttgtattcgtgagagcccagtgcgtcaccacttcctcgttctattttcccagcctcataaaaacagagcgggagtattgggaggaggataagctggggaagaggctggccacactggttgctataaccaccaccacttccggtccgttcctctttacggcccacctcagcgctgcccgcgcgaaatttgtatccctctgcttgtgtccactggctcctggggagcagcgcagggaggaggaggaggaagatatcaaagagccctcccattgggggccccagatcgccacttccggtgaccagaggtagggaaggaaacaatcccgacccggagtggacaggtgaggaggggaggacttgcctcgccgaggccgctgcgaggagcgtgcccaagggcgaaggtccagggaacccggctcccgcgcaccgaagacggccgccatgccggcccgttgtgtggccgcccactgcggcaacaccaccaagtctggg

SEQ ID NO: 14232 - DNA, 2300 bp, Homo sapien
ttgtgtattaagagcaaattttatggtttaatttttacatttcaggtgaactgcgggcttcatctggttattcaaacatcatcgcttcctgaaaaaaacaaagtaagatttaagaaggttggcatttaaattgaagattgttttaaattctacacaaatagcagcatgacttaaagtgtagatagattctaaactgaaaaatttaagtagatttgctttgatttccagtttaaagctagttcttactttctgcctacataaagctaaaatagccctctttaaaaaacttaatgtgattttattgattacaaaagggtaagggtttttttgttttttttttttgacatttacacttttttttttcttgagacagggtctagctgtatcacccaggctggggcgctggggtgcagtggcacaattttggctcactgcaacctctgcctcccaggctcaagcgatcctcccacctcagcctcctgaatagctgggaccacaggtgcatgccaccacgcccggctaatatttttgtattttttgtagagacaggtttcaccatgttgcccaggctgttctcgagctcctgagctgaagcaatccgcttgctttggcctcccaaagtgctgggattacaggcaacagccaccgcacccagtgatatttacacatttctgaaatcaggagccttcttaaaattgatggcatgtcatagtttaattggggaggttttttttctttcttaatagagggtaaaataatggtatgtcttactactaatgacaccttagataaaatggtaattgggagggcatatccacacatcccatttaaaatcagggaagaaaaaaataggttagcagtggacacatgttagacttaacgttatttagaagttacgatatgaatatgagatttttttccccaagattatttccccataatgtctctagcatttctagaatttctggcttttgatttaatttttgagattttgagataaacatgtttttctttcctttctgtctcacctcagcatttatacttacctactttctacacactatgtctcaagacacaacatgatttttcctcctttgaccaagttggaaacctctaaccatcacaattcaggtgtgtcctaaaaagttattaaataggcgtcactggaagaactctaaagtgaagggcagagttcacacataacagcatgaagaagggtaagaaaaggcatgaggaaggtaaatggaaggacatcgttagtcaaggaggcagctgttgattacattatatatgaatatgaaaatggtaaacactcagaaaatagacaatttgatcatctcaaataaacagcagttagattaattgaaaatattatttattataattgagcataatggattctctccagagctttcctaattgatttctctggacaaatccttttccaccattataatgtttctagagctgtgtgcctcatctaaatattttttccaaaccattcactttctcttgtgtggacatctattctgagaaaatacctttaggtcatataattcctaaggatataatgcaaatgccaacataatgtttatagtatggatacattagaagtatcttaattaattcaagatacatatttggggttttttgtggctaatcataagaagttgttctggttttgtttttctcagtcctcccaccagataattattttagatcagttttagatcaagtgaaaacctttcttagaaggcttaaatatacaattttattatattataataggacatttaaaaggattataatgatcaaaacagtgattttttcaacagcattttatttatattgtgtgtttttttttgaagcaaatgattcttttaatcattgtatttgtggtgagagcgtggagggattggaagtgtctcagcttggaatatcttgtatctgacctcataaaattgatcctgattttgtgggtggtaaaatacaatgatagaggtgcagccatcacctctatctagttccagaattttttcatcattccaaatggaatccctgtacccattaagcagttacttcccattccctgcttcccttaaatgcctggaagccacaaatatgctttccatctctatggatttgccaatgtggtattttgtgtcagttttctttcacttggcatgatgttttcaaggttcatccacattgtaccatgtgtatcagttattatatgtttttttaatttatcttcactgcttggtgttaaatttgtctccaaatatttttttctttaataa

SEQ ID NO: 14233 - DNA, 2300 bp, Homo sapien
cacatcgccaagtcaatcctaagccagaagaacaaagctggaggcatcacactacctgacttcaaactatactacaaggctacagtcaccaaaacagcatggtactggtaccaaaacagagatatagatcaatggaacagaacagagccctcagaaataatgccgcatatctacaactatctgatctttgacaaacctgagaaaaacaagcaatggggaaaggattccctatttaataaatggtgctgggaaaactggctagccatatgtagaaagctgaaactggatcccttccttacaccttatacaaaaatcaattcaagatggattaaggacttaaacgttagacctaacatcataaaaaccctagaagaaaacctaggcattaccattcaggacataggcatgggcaaggacttcatgtctaaaacaccaaaagcaatggcaacaaaagccaaaattgacaaatgggatctaattaaactaaagagcttctgcacagcaaaagaaactaccatcagagtgaacaggcaacctacaaaatgggagaaaattttcgcaacctactcatcggacaaagggctaatatccagaatctacaatgaactcaaacaaatttacaagaaaaaaacaaacaaccccatcaaaaagtgggtgaaggacatgaacagacacttctcaaaagaagacatttatgcagccaaaaaacacatgaaaaaatgctcatcatcactggccatcagagaaatgcaaatcaaaaccacaatgagataccatctcacaccagttagaatggcaatcattaaaaagtcaggaaacaacaggtgctggagaggatgtggagaaataggaacacttttacactgttggtgggactgtaaactagttcaaccattgtggaagtcagtgtggcgattcctcagggatctggaactggaaataccatttgacccagccatcccattaatgggtatatacccaaaggactataaatcatgctgctataaagacacatgcacacgtatgtttattgcggcattattcacaatagcaaagacttggaaccaacccaaatgtccaacaatgatagactggattaagaaaatgtggcacatatacaccatggaatactatgcagccataaaaaatgatgagttcatgtcctttgtagggacatggatgaaattggaaatcatcattctcagtaaactattgcaagaacaaaaaaccaaacaccgcatattctcactcataggtgggaattgaacaatgagatcacatggtcacaggaaggggaatatcacgctctggggactgttgtggggtggagggaggggggagggatagcattgggagatatacctaatgctagatgacgagttagtgggtgcagcgcaccagcatggcacatgtatacatatgtaactaacctgcacaatgtgcacatgtaccctaaaacttaaagtataataaaaaaaatggcaaaaaaaaaaattttcttttatattagcactaaccattaccatttcaatataatcccctaaggtaattacaatatacatttgatcctgcttggtttccaacccagtccctctagtctgtgccctcctacctctctggggacttttctccatatttaaaaacaaaccaacaaaaaatcatctcttgaccctgagtttctctctcaacctgtatctagatgagtataaatgcaatacctttcattttctcccacctcctttatactctaaccctgttgtaatctggccttctagcatttccacatttttgtgtttcagactagatggaagagctgctgtaacctcactcagtgtggttcacaataggctcagatgagctaagccattccgaacatcatatttctaaggaaagccaactggttttttaagaagcaaactgattccaagttggttaaaacctgcttacattgattctaatcaggtcaagccaaccttcctgggtcatattgggtaaagccagctcaaacaggataaaacagtcccaaactgacacatcagattccaagcagttcctgctgatcgagaccagataagcctgcatctaacttgtccttactggatcagaccaacgtgaattgaatcacagcagttcagaaagaggaaactggattcaggcaagtgatattgctttatattaggggaaaacagtgtaaagtgattcttagtagagcaaacagatcctaatgaaattaaaatggtttaaagtcacatttgtcaaaataggctgattcaaactggatcaaatcagctctgatttca

SEQ ID NO: 14234 - DNA, 2300 bp, Homo sapien
gggaatggagacaggtaaataattcctcagatatcacaaaagaatgtggaagagattttgcgatgaatgagctataaatgtgggggacagaatgggagtgttgggaacatttaaacattgagactcccagcaattaggataaaagtggtaccatggagagaaatgtgggggatggagaagacggcaatacacagcctctgtgtaggataactgattgcaatctccacaagtttttcgaggcaaaaacaaaaacaaactccaagtcaaaaatctccccacccctgatcttcctcccaaactctgggctgtatttttctttcgctaacagccagtaagaaatatttctttatggcataggagactaaaaagaaggtaatgccaagctggtgccccgcccagtgctgggcacagaggagatcacatgagttccactggccagcctccccacaagaaaccaacccagttgcttattcagaaggggctccagtatcctgatcacccaaactcatttcccaggcccagacctctgggaaatccctgctccagccctgcagagatttataggaaagtcccaggacgcccatctgcttgcttcctcacattaatttcagggctaggattttgttttctaaaggaattcaactatgatgccaacaaaaatctataggaattgaagagttccgtattttaagtcacatttttaaaatgtttgcttctttgtatattgagacccagtaagaccctagtaagcccagttactccatcacctccaacaatattaatcaagtagaagacacgcggattttaaaagctgtgtgatccttgaaaaatcttcagactgtcaggggtcctgggtgcctccaactgtgaaaggagggttggacaaggcgattccttagatctctctcgggtatctatttctctaattccaaattccaacaggcatccaatgattgctacccacgtccaagctttagactcatagcccgaaaagggcgaagcgcagcgtggtagagatcgcaaaggagacaggaagagaagcaagcatgcacttttagtaagacggcaaaggaggctgggaggtacggtgctgggtgcggactgcttaaaaaacttactagaccacaaattccagatacttaggtgggcccgagaacgccctaaaatccccttcccaagtgagggctgatgttatttcaaataaaaagaaaacttaacttccagatctgtagagctccaaggtgagctcgctgtgcaaaagctacttctgtaagtgcgccaaggggccgcaggtacttaggctgcacttgaggaagtgtccagagttggcggaaacaacccatccactcgggctccaggcgctcgctgggttgcagcaactaaactgagacagacagacacacagatccgaggccccaggccaggactcaaggagcgctgaccgagacttgcccggctctcgggccccaggcgggagggaggcgaggctgaggtggggggcgcacgggctgggtgtgcactcgccggtcccctccgacccgacccggggagcacggggccccgacccggggacgactgaggtggattgtccctagagtttaagactgtccctagagtcgagggtggagggatgagcgccggcgccagcacagagcaagactcccagcaaggaagagaaccagagaaggaggcgcagccgtccgcacggaccaggcgcgcgctggctccccgagcccggagcggcgcagcccgcggcgccccggacacacccactgggtagcccgcgccagcccgccccgccggccagagagcgggagccggagcctgggcagcggaagccgggtcggggccgcgcgggcggcgcgcaggggacgcggggcgcgcggctctgctcacctggcggtccgcgtcccggagcgaccggcggccgcctcgcctcgcctcgcccccgcgtggttcccggcgccgggcagccccgagcgccgccgcatggacggccgccaccgccgcccagccgccccgcgcccgccctgcacgggctcccgctgtgccccgattccgcgtcgggctgcgcgggcggccagcggttcaggcgcgcgcggagagctctggctcagagtttgcgatccgagagcgggatccgcgctccctcggtccttcctccctcccctcttgcggcctcccgctgtcatctggagccgctcctgccgccccctggcggcgaccgcgggaagggccggcccccatccgcacccctgaccccggaggtcaacaacgggatggtccctgggtcccagggg

SEQ ID NO: 14235 - DNA, 2300 bp, Homo sapien
gaggttagtaaaggacacagagaaggaatggagaggaagcagaaaaattacgttcccaggaacagagagagtgatcaacagagtcggatgattcagggagaacaaagagaagaattgctgtttagggtgtgttggtgacttccacaaagagcaatttagtaaagcatgagtggcagccatgaagggggacgcgagtctaaatttgggagggctggcactgagcagagaggaaaaccatggggctgagagttggggagtctctgtgtgaaaacgtttcctctcgatgggaccttctgcattccaaaattcacaaaaggtaagaaagcgaggggagtgacaccttctgctgttagagacgaattttttgggaactgctccagaaaaatggttcctttctagctattctaggacagtggctaccacccatttcagcctcctgtcaggaagcctctgagacaaaaatggtgtcaacaggcctttggctgcttctcctttctattctgtttgtcagaaaaataaagagatgcatagaagaaaaggggatgctctgcaaggggaatcttcagcgacaggacaggagttagcaactagttttagagtttgcacagcttctagcaaccccctcagtccgatagctgtcagccctaaccgtaccttagaatcacctgtaatgctcataaagctgctagcagctggagcccacctcagacatggaagggagcccaatagtctggttttctttttgttttgaatttcctaggtgattctaatgtgcagccaatgtcaagaaccactccccagggggttccctctcatgaacaattaaggcacacgttccacaaacaaacagaatttttcaatgactgattttggaagtgtcggttagaatgtctagcttagcaaacaataaaaggtttggcttgtgagccaacaccatttgattggtatgggcaggctacagagagatgagagggaccttgagccaggactcagttaaaaagagcacagtggtcagtaaatgatgtctaccccaggtttcgaggaaggggggatggctcatatgtagccatcccgggtctagctcttctaatcctagcatgccctccacaaaatagactcaaaccatctgagcatgcagagtccaggagccttccaccccagcagtgcgtgggcgggatgagcatcagcagcctctcccgcagcagttctgagtatcctcctcagagtagcagtatggaatgcaatgcttaggcccaccagaggcctcctgcatcagacactcaaggggtggaagcccagaatctgtgttttaacaatggatacatactgtggttgaagaactattactctagcggacttaaaaaaacaatgcacagattcttaagctccaccaggagccactaaaacagaacatttggggcacagagcccagaaacatgtatttttttttttttgagacggagtcttgctctgtcgcccagactggagtgcagtggcgcgatctcggctcactgtaagctccacctcccgggttcacgccattctcctgcctcagcctcccgagtagctgggactgcaggtgcccgccactgcgcctggctaattttttgtatttttagtagagacggggtttcactgtgttagccaggatggtctcgatctcctgaccttgtgatccacctgcctcggcctcccaaagtgctgggattacaggcgtgagccaccgcacccagccagaaacgtattttttaagcacctggtgctgaaatggtgctaatgcacagtcaggcttgaataccactgacctagtattgctctctgttggtttcatttcctcaacagcattactagaaataatcaaactattcatagagacctgcttgatgtaattaccctggcaaggtgctcaacaatgcatatagctggtcacctccagcagttctcctaccctctcagaagcttattttcttcatctgcaaaatgaagatgctctgatctcacgagactgggttgctgtggcaaccacggagtaagagcagctggcttagggtgtgtccatatgttgagtactcaatgattctagttgaaagaaagaaaaaaggaaggaagaaaggaggaagaggcaggcacaagacaaaatgaatctctccgctgtgcacatggagccttagctctgattccagttgagcaaaattatgaagaagatgattccccatatggatgacagataaacaccctgtggcgagtcactcactcccgaaaggccctctgaaggatcgcgcatgtcctgactgcacagc

SEQ ID NO: 14236 - DNA, 2300 bp, Homo sapien
taataggtcagaatccgaggaagcaagccagacatctgtgttagttagctttcttattttgcaagcaacagacaccaattttggctaagtcaaacacaaaaggattttatcaggaggatatccaatagctcagagacccaacaggaagtgtggagaagtaggcttggtaaaggatggaaactgggaagccctgggcttccaggtggacagaactcacagtctcattagtgtgctgctgctgcaatggaaaattccagcaggtttctccatctaagagtcaaagtcctggtaacaagggttggattggcttagcttaggccacatcccacaccttggccagggggagctgggacaccctgagtgacagtctcgccaagactacacacagaggggagaagtaattttcaaataagaaatctagaaagaagggaaagtggatatgggatggacaaaaatgattggtgtctgtgactgaaactcatgacatgtcagggtagccacctggctcatcaactgtcatttcatcattcagctggtagggcttcctgacacctttgggggaattgttgaaattgaaatgtaacacgcaagtatcattcattcctccttcttgttgtgtttgcatttctgaagattgtacagacaagacctgtgtagatcccctctgatcccaaatgtgatgctggtgtaattcaggttgaccagtgtgtatttacacaggcgcatgggccactgcatcataagggggcatgaccttaggatgggagtgaggaatgattccctcctccctgattcctataatcctggttgctggtctagttcttctcccaccactgctgccaagtaggagtatatgtgtgaaatgtctctgggacaggcctccttctcacacccacaccatgtttctctctctagctaaagaggaaggagaatgcaggatggggcaaatggttattacctacctctgtaagtctttccactggaaaatgtaggatatgagaaaggaaagattgagggagaaaattgcctctattctagggtattctagcaggtgtaaatgattctttaaaaagctgtttctttcctggcacttgaacccatgtcattctgggtagttagtaaagaaaagcctcagggtgtatttcaacatctaatgagcagattagactaaataggaatgattttaaggacttgaaaccaagcatagagcttaaactcactgcaaaatattaaatactgagacccgatcctattgtttctctcttccaagaactcagctttctacaaagactgccttgctcagttgtcatcgtgtggctggtcggggtgtcagtattctagtgttcctactcaacagatgcaggaatagagactcacaggggtaggatggtctgccctgggtcacagaacaacagagaagaatcagagtcaccgagaagttacataagcacagcccaccaagctgagagcagcgatttgcctgagggcctgcagaagaatttctccctccatgcatccaagccatgactgattcatttcctttaaaaacaaacaaatgtgtttttacatcaagactactaagacttctccaggaaatcctgggtctctgtcttaatctcttgtagcacagttctctcactctccgagcagaggtcaccatgttgtaaattggtggggacatgtcctgaaggagtggttgggacattttgttgtaccttgcatggaccttgagatattagtatctggtgcatatcaagaggttttcagagttagatttacaactacggtgtgatcagtgaatatgcaacttatatttaaattacacattcagcccatgctttatatatttatcagacattctcaccccactgatacagtctgatttggcttggctctgtgttcccacctaaatctcatcttgaattgtagttcccataatccccacctgttatgggagggtccaggtggggataattgaatcatgggggcagttaccccttgctgctgttctcgtgatagtgagttagttctcacgggatctgttggttttataaggggcttttcctccttttgcttggtgcatcgccttactgccaccgtgtgaggagggctgtgtttgcttccccttctgcgatgattctaagttttctgaggcctccccagccatgctgaactgtgagtcaattaaacttctttcctttgtaaattacccagtctagcgtaagtttctatcagcagcatgagaacggactaatacactgtccttcccccaaagctgttaaacagctaccaaacctgcc

SEQ ID NO: 14237 - DNA, 2300 bp, Homo sapien
acttagtaatggccaaaatgataaatttatgttgtctatatgttaccacaatattaaaaggaggacatggttacagagaagtaaatgagttcttagtgattctcttttgaattttgtgacacaggggccattggtgacctttccagagcccttgcagtagagcagacaggtcaaaagattgcagtggattgaagggtgattgagaagtgtctagaccaggggctggcaaactactgtcaaatctggccgcctgtctgtttttacaaataaagttttattggaacacagctacacccattcatgtgtgtgttgtctgtggtttcctttgtgctataatggcggcgttgagtagttgctacttgagcccacgtggtctgtaaaacctaaaatatttaccatctggccttttacagaaagtttcccaacccctggctagacaacactcctggtctttcaagaactttggctttcttaaataattcctgcatttctcatgaggttactcggtagataactttgcccctttagttaggtagcagaacagaaccaaagctgaacagtaacaatgactaagaaggaggaagaggaaaaattcattcctttctttccttaactggagatattatcctcactatacctttttttctcttacagccctgtaaaaaggaatgaaagttcttccctccctgtcccccaccaaaaaactccccactggtaaatggtcatgtgactggtgataataaactttctgagatggctacgaactgcagttaggtttaaagtttcctcattaatgcaggaaaatgctcataacctgaggcttttcaagtgtttattaatttactttctggggctggctgctgatacttatttcagatcaaagagaaagcctgtgtctttagtagttactgtgtgccaggaactatgccacattttgtgcctaggtgagctcattgatagtcatcataaccataggatggcatttccctatttcacaggaggggagactagggctcaccagggttaaatactcacccagagacacacatgaagagtttgaagtacaactggagtttaacccacacctgcctaattccaggacctcagggtgtttccactgcaccgtgcagtcatcctatcctctgtggccaccaagagcctcagaatagcaccttgagcccactctaggcagaatacagtacttgatgggttctaatccattttaaaccatggtctctgctatttcaggataacaggtgaccatgtaaagtgtatctcaagtgcattgtaggctttaggaagacccttttcccagcctgctccccatgctcccaagccccactttgatggtctatgtgagtctactcagaggtagctcttatttctttaaaaccatcctgcatttcagtgtactctgacagcactgtctgacacttgggattcacttgttcccatgttaccacctatttttacattttctgcaataattcctcaagctcttggttaggcatagtgacccagggatgcagcaagagggggatataatggcttccacagttcccatccgtttgtgtctatacaactggtgcacaaacacacatcacccttgtgacttctgtccctgttgaggctgcccttgataatgcagcttttaactgcctagatttctgcaaccatcaaatcagatctaaaagggaactcagaagtcattcacccaacctttgtataagtgagaaaaataaactgcagcccagagcggactggcaacttgtccaggcaaacacagcttgtcagtcccagatcctggactaggaaggccctggctctccccgttcccagcccggagctcatcctgctgcaattcactgcctcctccctgcctcagtggacgaggtaggggctgtccccctgcatgtggcgtgcttaccttggaacccttttcatgaatgagaccagatgcagaactccacattgatcatttctgtccctcccctttctgctttctgttaaaggcagccccccagctcccagctggctcctgtcccctcccccagccgggagaagttattacatgaagagatcagcttaccagttttcttcagaacagaggctgagctcgaagcgccgggcagtacagtgagggagagccgagggaaccagcgcggtgcctagcggaactccagggctggaatcccgagacacaagtgcatctgctagctgttagcacttggcagacggagttctcctctagggtagttctaactttgggtaataatgtttgtcagctacctgatattaac

SEQ ID NO: 14238 - DNA, 2300 bp, Homo sapien
ggtgagagcaccctgatgcaaggagaaccctcggtttctagctcaaaagttaaattacctggaataactttactgtggtataggtatcaattttttttttttacagtttctttttagcattgtaccttttctagcatttggttttcttgtgaaaacagtggcttaaaaatatccctttaatgaatcttctttctgtgacaaagtatttgcccttttctcccttttattatgaaagtgacataagggattctaaactgttaaaacagtgaaaatcaccataagtagaaatgatgccaaacagtaatgagaaactctgtctttggaatcacacccctccaggattgcagttctgttggccatacactagctgtgtgacctcaggcaagacgcataacctttctgtcaatcataaatgggaaaaaataatttaaagcacaaaaagaaagccttcctcacagtacctggactacagtgagtgttcaatgagactcagtgattgttgttaacaatggtgtaaagacctggggggtttaacaagaagaaaagaagacaggcattgctagatagcccccacattggaaacttcgtcacttggaagaaagattagatttcctatctgtggtcccaagacattggactggggcttacagaggaatggtatagaaggactgatcccacgtagtgattgggaaacaaagccttagggaatgcctccctcaaaagattgctgtaaggattaatgttataatctctgtaaagggcttagcaccatgcctggaacatagtaggcactcagtaaatcttagctcattacattagcagttgactgaagatggaagggctgttttgggaggaagtgagctcttcaccaccggagtcattcagggaaagactaaatgatcagagtgtgtaagtgtgtgtgtgtgtgtgtgtgtgtgtgtgtgtgtctgtaggtgggttttgaaggaaagatctaaatcatcaggtgacttgttatattaatgaaggattaattaaacatcgaccgtgtgcctagcactgacctggtcctttagagaaatcaaaagtggcatatgttacatccctgctctcaatgggcttaatatctagctggggagataaacaagagatgaaccacatggtaggtggaattggaattaagggataaactgggcagtaacagctgaggagttcagagaccgcttcatggcaaaatcaggatttataaaataaagggatggatttttacacttaaaataagaagaaatcaaagattaagatatcatgcaatttggggaaagcctgaagtttttaaacaataatcagcatggcttgggactttatctatgtcatgctgtccttcctgctctcggttctgaaggagtcatgtgggtcagtggcctcaacttacatcactgaaattaatccaatacgggagaatttgagaccagtcctggcaaccccctggctctcttgccataaattatcccctagatttgccacagttggccctctaatttcactatttaggattagaaatttgcctaggccaggtgcagtggctcacacctatagtcccagcactttgggaggctgaggttgggggatcgcttgagcccagaggtttgggacctccctgggcaacatggtgaaaccctatttctacaaaaaaaaaaaattagctgagcatagcagtgtgtacctgtagtcccagctactagggaggctgaggtaggaggatcgcttgagcccaagaggtcgaggctacagtgagctatgatcatgccactccactccagcctaggtgacagagtgagactgtccaataaaagaaaaagaaagttgcaaaaaaaagttgccgttgttaccacttttccaataagcccccaatactagtattttggtggctaatgagcagtacaatttctttcttgacctatctttactgaaaaaagtcagtaatatatattgtaagatgtattatttctcatgaagctaaagtaagttttattttgaataaggaaaaaacattaacaggagtaacatatttttctggcttggcttttcttttcttttcttttttttttttttgctaaataaaaacatctacagctgtcttaggccatcctgtaagaaatcagggataagagctgaggaacaagagggatatgtaggcagtgagtcaggactatgcaaaaccataaaataaagaacataattttttgttgattcacaatttaataagttgtttaacatatttaaatcataatgtcattgtcagccttgtatcatgtctgtgt

SEQ ID NO: 14239 - DNA, 2300 bp, Homo sapien
gtgagatttgggtggagacacagccaaaccatatcaagtggtgagatcatggctcactgcaacctcctgggctcaaagccatcctctcacctcagcctccaagtagctgggactaccggtgtgcactacaacacctggctaatttttgtattttttgtacagaccaggtttcatcatgtggaccaagctggtcttgaactcctgggctcaagcaatctgcccaccttggcctcccaaagtgctgggattacaggtgtgagccaccaagcccagttggctttgtttctttatccaccaatttaggatccttgctgctactggatctaaagagacagatcatgagacttggacctccttttccttctgcctcaccagaaagaatgtatggatcaccccaggatgcttcctgctaagaggtttttgtggccttacacatcctttgatagcaatgaaaaatgtctgtctactaaaaggttttcctgattttcctttcccataggctaggtttccccccaccctccccacatcctgaaattattgagctaacatcagggttgatttcatcttcaaacgaacctatcactaaacattcagaaccatagcaagaaatttgagacctttttatctccctttaaaagcaatttggacttcactctcatctgtttaggaaactgctcttccttaagttattattctttgcccacttggaagttttatggaattgtaatttcaggagactgacttgtaaatcgtttctttaaatacttaaaagctagctttaaacattaaaatatgacctcggtcagcatttccccaaattgtcttccctggaacatgagtcccttcagaggacagcgcttcttattaccaggaacacagccagcagacgtcatctgcagcaccttggtgccactctctgcctccccactttctcctgctgcttccctttaagtaccctcagaggtcagagcgacactccaactcagagatctcctagttaactccatcaagcacagaggaggagacacagagttgaacaacttgagagttgggctctggtggctaagctgaggtcaccctggccagctcctgacctacagtttactggtagctccctgtacactgcagagctaaatcttccaactcggtgaatgaaacaaaacaaaaaacaaaacaaaacaaaaacaaaaaatctacagtggaagaatatatgtcctgccataaagtacagctttgactctggctaaatcaccttggcatctaacaacataaaagtggggaaaaaagtcctctcgtgttttgagggatgctctggaatcatagttccagccagatgacctcataagctatgtaattcttgaaacccatagcagcagttcagtttagaataatagaaacattgaaattaactcatctttaacgtacacgtgcacatacacccacgtctcctttatcagtctgtgcctagatgttctggaacactcctttgtatatattaatgtcctggtattttgttactcttaaactaattacatgggaagctagccagatggaggctctggtcatttggatagagaacacacccatgtgattacttgttacttttggtgaacgtcccagctggaatgttgttatccctcccagagaggttaaacattccagcccaaccacactgctgtgtttggctacttgaggtttccacctggacggcttgatcttcgggaatcttgattctagtttcattctcattcccctggggatacgctatgccaatctctcatgtattcgccatgtccagctgcctggagtccatctgagcctcccagcaatggttcactagggatccccagggcaaggcagtcctgtgctagacaagggagagaatgtcaatctctctcacaccctaaaaaaagagaaacacttcccaggggagggaagaaaaggcacagttcaactcatcattactaaaagagaccatgtgttgagagctgactgcatgccaggtaatcaaccaggagtacattctgtagtttaatcctgtaatgattcctgctttagagcataaaggtcagagaaatgaaacaatctgagcaaggctgtgaagccagaaagtgatggcactgcctcactcagctctgcctcgatccaacgtctgtgctccttcccgtccagacaagctgctccttaacgatcagctaacacctgaacaggcatggtctccagccaggtgaagtccctgccttgagtagcaggatgtgttgatgataaaggaaggtgagtgtattcttttcctatttgct

SEQ ID NO: 14240 - DNA, 2300 bp, Homo sapien
aagagaagccatgagctgatccttgttgaagctgagcaatgggtacatgggggtttattatattgttcacaccacttttgcatatgtatacatttttccataacaaattataaaaagttaaatttaggaattctataaaccgaaggtgcaaagagccagtggccatcacaggtccactatgtacatagcacttaaaacaggaccttcggctgggcgcagtggctcacgcctgtaatcccagcactttgggaggctgaggcaggcggatcatctgaggtcaggagttcaagaccagcctgaccaacatggtgaaaccccgtctctactaaaatacaaaaattagcagagcatggtggtgaatgcctgtaatcttagctactcaggaggctgaggcaggagaattgcttgaacccagggggcagaggttgcagtgagacgagatcgcaccattgcactccggcctgggcaacaagaacgaaacgccatctcaaaaaaaaaaaaaaggtaccttctctaaaccagtcctcctttggattgtgggtttccaggtgccaagggtagctgaagaaattctatttccagatgccaccctttcttctcctgttaactccaacaccttgttccttgcccccttctcctttcgtacccgcctcctgagtacacactagaaatcacaggtctgacccctatgggcctcatgaacttgaacaagttccctcccatctctgagccactctgaaaaatggggattataacatctgctgtgcaatgttgtgacgattaaatttgacagtgcacgtgcggtatctaacacagcccacagcctcagatgcccaggaactcaggaaggtcatagaagtgaatgaagctgaccaggtacatgagaaaatcatgtgaccctcttagctttagctttgccacttgtagtagacatgtaagtagagagaattataagaaaaattctgggccaggtgcagtgactaacacctgtaatcccagcactttgggaggctgaggcaggcagatcgcttgagctcaggagtttgagaccagcctgggcaacatggcaaaaccccatctcttaaaaaaaaaaaaaaaaaaaaaaatatatatatatatatatatatatatatatatatacacacacacacacacacacacacacacacacacaagccaggcatggtggtacatgcctatagtcccagctactcaggaggctgaagcaggaggattccttgagcccaggaggttgaggctgcactgagccaggatcacaccactgcactccagcctgggcgatggagcaagaccctgtctcaaaaaaaaaaggggagggctgggaggggagaaaaaattggataagaaaaagaacaatgcaagtatgataaatgatataaatcacccatattcataaataaaggggtaataaactgagacttaacctcagtgttggggggcaacagggaggggtggggactggggcaaatcagagcatatagggtccatctgagagggacagccatcctgggctccagccgattgctgccatgagggagtgtgaagccaatgttaacatgtcttcctggtttataagagaagccagaactcttaaattttttatgtgaaatatttcaattcttaaatttgggctcagttattttttttaataacactacagaagccaaactaaacccatttatgggccaaaatcagctcgtgggctgccagcgtgcaacctctcacctagataatggtatataatataaatacgtttcccttccccccttttttctcttcctcctctttctcctttccctcccattttccacatccttttcacctaaccagcccccaccctacatttctatactaagtccaagtgatagaagggattagggtgggttgaagcagtgattaagcccaaggggatgtaatctagatgcctaatggcgccccagggcctggatcattgcctggcacatagtggatcctgtcaaaaaccttgatgaatgaagaagccagaaactgggggagtcagttctgtttcttgtgcacaccctgggcttacccaaagaactgtctgatttttctcaacagccctgagaagtcgttctggacgctccatcatcaatgggaactgggcaattgatcgaccaggaaaatacgagggcggagggaccatgttcacctacaagcgtccaaatgagatttcgagcactgccggagagtcctttttggcggaaggtcccaccaacgagatcttggatgtctacgtgagtttggatgtttctggactg

SEQ ID NO: 14241 - DNA, 2300 bp, Homo sapien
agacaggacacaaataaccataatacaaaggcaggaagcagcacatagagtgccatgagaattccaaggcttgaaagaacatcttaaattggacactcaagatagtcttcacagaggacagaggagaaggtatttgaggtgagccttaaaggcttctgatctgtccagtgaagggaaagagcattctgggtggagggaatgacaggggcaagggctctgtgagccttttatgtgatcagggaataatagccactctgagtctgtccagaaggaggtatgggggataggataataggaaattagtctagaagaattgggtcaattggggccatattatagaaaacccttaatgctagaagtccatatgtgacttctgttaggaatgggataacttcagagggaatttttagcatggagttctcaacacctggcagcccaatgcattggaaaagctggtgaggttgagcaagaagctacagccacagtccagggtaagaaagtaaactgtgctgggaaccatggatggaaaggggcaagacaggttagagaaatgtggcagaactagagtctgtgagacctaatgattgtctagatgttggaagcaagagggtaggagaatagtcaacttttaaatccaggtagaaacttgaaagcaaatcagaaaaataaaaggaggaatggtaacggtggtgaaggtgtacatgctggattcaaggtatctgtaggacacccagataaggacgccccaaaaatgtttgaaaagataaagtttaggtgtggtggcacacacctgtaatcccagcactttgggaggccgaggcaggcggatctcttgcgctcaggagtttgagaccagcctgggcaacatggcaaaatcccgtctctacaaaaaaatacaaaaattagctggacatggtcgtgagcacctggagctactcaggaggctgaggtgggaggatcacttgaccccaagaggttgaagctgcagtgagctgagatcacgccacctgggtgatgcaatcctatctgggtgacaaagcgagaacctgtctcgaaaaaaagaaaagacacgataagatgagaaccaaaataagggcacattccaacgtatggcaagacagatggaaaatgctctatgagctttgggctgtgactcaggaatgttttcactgtatcctaggagaggacagtgtgattgtagtagaaaaatcactaatagatatttggctttaagtgaagattttatccctatgaggcttagtttctctatcttggagtgggaatgtaggggttgaagccccttataccatttactgggcacctcccatctgcaaagcacattatacagtctccatagccctgtcagaaatgtgtttctatgccagttgtctagatgagcatgccaaaggtaggaggggctgggtcacttgctccaggccgcacagctagtgaggatatcaacactgatgtacctggttccaaagccaagctctccctctataccaagctgtctcccaatcccctcatagctgtgaccttcagagactggaacaatttgccttaatatcaggcagcaacattgaggtgacagacttaagtccccctatttttccaacccagacttggctactagcaggtagaaatatgcccaggttttcatgcacccattcttcttcagctgaatatatatatatttttttatttttatttttagagacagggtcttctcactctgttgcccaggctggagtgcagtcgtgcagtcatagctcagtgtagcctcaacctcctgggctcaagcgatcctcccacttcagcctcccaaagctctggtaccacaggcgtgagccacaatacccggccaagctgaatatatttttgaaagcaaaagctgggaaggatagtctaacaagtataagtgtattaattgcagtggcaagattggatatttggaatttggaatgaagcccaacccagaaaatctaagacagagaattgccatactgatatctcataatggagtaggctatgcacgagaagctgccagatatttctaggggaaacagacggcaggaaaatgaagcattccatcctcctttccatcatttgaaagtggcttcagcagctgccagggcctcctgactaatgtgcccttcccctgtctcacagtgctcagcggagtgtggggccggagtgcggacacgctcggtggtgtgcatgaccaaccatgtcagcagcctgcccctggagggctgtgggaacaaccggccggcagaggccaccccatgtgacaacggacc

SEQ ID NO: 14242 - DNA, 2300 bp, Homo sapien
gggcttaagcacccttcctgcatgtggaacccctggcacgctaacctagggaaaggctcacacttctcactcactccactacccggcccacctcagtgacctcagaggggtctgccgagcctggggatgggcagtcgtccctgtccactccctgtcctggaggtacactggaaagccacaaataggcctttgtagcggcaagaggcagctgagaagcaccacggcaatgtagccgtcactcttggtgactccagctctttccatcctcggcccctccatccagatttgggtcctgcaagctgattctcaagtttggccccattgataagagccagaggcattgttgttttcttttcttttcttttcttttctttttttttgagacagtcttgctctgttgcccaggctggagtgcagtggcatgatcttgactcactgcaacctccacctcccagattcaagcaattctcttgccttagcctcccaagtagctgggattacaggcacctgccaccacgcccggctaaattttgtatttttagtacagacagggtttcaccatgttgaccaagctggtcttgaactcctgacctcaggtgatctgcctgccttggcctcccaaagtgctgggattacaggcatgagccaccacatccagccggcattgctgttttccttgtggcaattttaagtcaagtcaagactgattcagggtcttcctgttgatataagggtgtgaggaagatggttgtggcaggtgctatgagaggctgacctcataaaagttgtatgaatcattcagacaacactcctgccttgttatattggtcaaagccaaccataggcctgcccgcattcaagggaagggatatgagtctacctcagcctgctcctgactcagttctgtttgcctcagaactcagctactctcccttgggattcgctgcatcccaactgcctctatcctcctcagtcatggtaatcattcactcactcattcaatcgttcaacaaatattaattgagcatctaccctgtgcctgatactatgctaggcactgaatatatagcagtaaaccaggtggcataagactgtccccagggagcttccatcctaaagaaggagagagaaaataaagacataaatgaggacactctacgtggtgtgtcaggcatgatatgtgggctcatacctgtaattccagcactctgggaggccgaggtgggaggattgcttgagcccaagagtttgagactagccaggacaacataagaagaccttgtctctatgagaaaaaaaaaatagccaggcatggtggcacatgcctgtggtcccagctactcgggaagctgaggtgggaggatcgcttgagaccaggagatggagggtgcagtgagctatgaccttgctactgcacaccagccactccagcctggatgagatagtgagatgctgtctcaaaaacaaaaacaaagcaaagtagaaaacatggataaggagtggtagagacagggttggacctgcaatttgaaatagatggttagggggtgtggaacaagccagccacatggctatctggataagggtgtccctgttagggcagggaaatgtgcgaaagccctgagcagtggggcctgtgcagagggttcaagatgcgggaggacaaggcggagcaggggaagaggtatagtcagatgacgtggggcccaggggaaagacctggggttcagtctgagtgagattaccggccagtaagggatttgggcagaggagcaacaggattcgactaaggccagcagtctgatgtaagctgtggattcgtgcacctgctttgtgtgcaaatcacctattttcctgggtaaaaccattagcattagaggctagagccgtgaagctgagcataccctttcacttaataattccatgcctgggaattcaacctggagagagaatttaacaaaacagtattcttcaggagtctcaagttttcaataagaagtttttaaattttgtgtttttaacaataaccttttaaaataatggtgaacatatattccactgtctggttgattacttatatctcaataccacatttcattccagcagcagagttaagtagtattgctttaattgcaacaagctgagctaatgtgggaagaatgcagtagagtggcacagaagaatggtgagttcattgttattaccctcctagcccgtgagaacgcccaccatcccatgagttcctacatctatgccatgaggagcagttgggtttcagcacagcattctctatctttgca

SEQ ID NO: 14243 - DNA, 2300 bp, Homo sapien
ccctggaagccgtgagtgtgtgtgaaactgcccgaggagagagcgggaagggctgctgggaccagtctctgggtacatggaggtgatgacaagttcaaggcaaagacccgtgttccagaagagatgggaaagagcggcttcgggaaggagggagtggccagtcaaatccatggaggatggcctcagcttcagtcttaggtggagctggagaccttgtcctgaggggctttttggcagaggaggcagggaggggtgaggacggaggagaggagaacaggtgagagcacccagcccggtggcctcgatcttctgaggccccagaaagcggattaccctgcaaagcccctcgagctgacttcccaaatccctaattgtgcttctctgtcacagggagggttaaccccacttacataagggccaggccccgccccctgtccccttaactccatgatccttctggaagcttcacgctccgcccgcttccccttggggtctaaggctggaccaaccccaccccagctcatcctgaggtgagctctggtctgctggggacaagtggtcccctccaggacaacatgggctttcagctctgtcccgggcagggagggggctggcaagtgggcctgggggtggaggagcaggcaagaaaaggctgctgagtgtgaccttctcagtaaccccaagaatataacaatatcagctgcacacaccatttattaggttcttactgagtaccaggctctgaaacacatttcctgaaccattgtctttagttccccaactacaccataggacaggtgctcttctcatcctgttttacaggtgaggaactgaagtttggacagattgagtcactttctcagggacacatggctggccggtgatggagaaggtacttgaacctgggtctgcctctgctctctccacactcccttgcgggggcccggggcttactataaggcaaggatgtaagacaagttcctccttccctctccttcccacaggagcagaggcatcgctgggctggaggtgggaaggatggacctgggagcagcgcagggggctggtgtggcaagaggcaggcggagctgtgaggccgagttcggggggaaggggaggactcctgagagcccgtggccaggctcaaggtggctgtgtcctcactggctctagtcctgcaggcctggctctccagaggagcctgccagctcctcttctgccccctcacaggcctgaaggagaccctccagatggggatccaggcctctttcctccaggccagcctcagaccctacgggggacggttctgggaacgtcctctgtgccaggtgtctggggactgctagccttctgggggggctggatcctcaaatcgtgagccccaagcagtccctttccaagggattggagtgagaacctcgtggggcagagccagatctacctaggacccaaggggagtgtctcaggcaggacccccacaggcaaagacacacacactggccacacacttgccttcggatgtgtgccaagcagctcaaaaggatttaaagtccagccaggtggggtggctcacacctgtaatcccagcactttgggaggctgaggtgggcagatcacttgaggtcatgagttcgagaccagcctggccaacatggcaaaaccccatctctactacaaatacaaaaaaaattagccgagcgtggtggcaggtgcctgtaatcccacctgattgggaggctgaggcaggataatcgcttgaacccaggaggcagaggctgcagtgagccgagaccatgctactgcactccagcctgggtggcacagcgagactccgtatcaaaacaaagaaaaagatttaaagtccttgggagaggtggagtccacacctctcttcaagatgtggcatgaaatggtgaacagctgagcacacagggcaggagggccccgggggaccttgggcagcccgggaaccagcatggggtagcaggactgaccggctcccggggcaccttggtaatgctgcaggtgtggccagttgatcccctgtggagacagtaaagattaagaggatcataaactgcgtccagcggctgccccgggagaaatctcctcaagccagagcctgtgctgtgaggggcttcgggaccttggggcagctcctgagttcagacagagttcaggaagggagacaggggcacagagagacagaggttcatggactgaggcaaaggctgggccaggctcagcaacccaggcctcccgcaggcaggcagaggctgccctgtaacccatggagacca

SEQ ID NO: 14244 - DNA, 2300 bp, Homo sapien
agggaacatgtcaacttagcgccactttagatcctccaaacttcattctgtcttataatttatcagaccatattttctaaaccgtctgtaatcaatactttgttcactgagttaaaacataatgttctgccctcaagattatactcttagctttaatagagatcggggtggggcggtggctcatgcctgtaatcccagcactttgggaggcctagattggcagagaacttgaaatcaggagttcgagaccagcctggtcaacatgtcaaaaacctatctctactaaatatacaaaaattagctgggcatgatggcaggcgcctgtaatttcagctactcaggaggctgaagcaggagaatcacttgaacccaggaggcagaggttgtagttagccaaggtcacgccactgcacttcaccctgggtggcaaagtgcgactccgtcttaaaaaaaaaagagataagtatctgaatttccttttgaaaaattatagttaaagatgtgattcattgtattacccagtggcctctttataaaaacctacaaattatatttattcttgaattaggttttaggaaaatacgtgttttgggaagtctgtataataataataacctttttattttgagtgcctgttacggcctgagaatcgtactcggtgttgtgtattttatttaattcttgcttcagccttattaaataatttttataaaatccatattacagaagagacatcaggcttagacaaagttatcaatgtgtttcttttcagtaccccagatgaaataattagatacctattcatatcaagaataccatcaatattttgtattgattatgttccattttatttttagttattctaccttatatgtatttaaatttccaaaacctcttcaatcccatttttgaagttttcagatataaataagttctggacagttcttcagttctagatctaggttaaggtctttatgctgaagaagattcttagtaggcttctactacgtttgtttttaagtttaaaaggttgggtttagattgttctgtactatggttatcaggaaatgtcatatggaaaagagtttttccgtgtcccaaatgttgcctttttgtatatattttatatttagctccatggtagttttctacagctaaaatacgggaagtaaaatctttaaaacaatcagcttggcacagtggctcatgcctgtaatcccagcactttgggaggctgaggtgagcagatcacaaggtcgggagatcgagaccagactggccaacatagtgaaaccccgtctctactaaatatacaaaaattagccaggtgtgctggcacacgcctgtagtcccagctacttgggaggctgagacaggagaattgcttgaacctgggaggtggaggttgtggtgagccaagattgcaccactgccctccagcctgggcaacagagcaaaactccgtctcaaaaaaaaaaaaaaaaaaaaaaaaaaaataccagccaggcgtggtggctcaagcccgcaatcccagcactttgggaggccgaggcgggtggatcatgaagtcaggggtttgagaccagccggtctcaaaaaatacaaaaatagccagatgtggtggtgtgtgcctataataccagctactcaggaggccgaggcaggagaattcacttgaacctgggaagcagaggttgcagtgagcctagactgcaccaattgcactccaacctgggcgacagagcaagactccgtctcaaaaaaaaaaaaaaatcaattaatgattaaaataaaacaatcatttaaattaatatggcggtggcttctgggcagaactgaggtttaaaaaagaataatctctaaagtatccttccattctgttgctgtcattggcaattatgttttatcagattttaaattttttctcacatttgcttattagcactgcacagttcctcttggagaataaagaaatgactattgtgttacctgttgagcaagtatcttaacatttgcaatgaagtaagaaagtatgttagtctttgttatcacaatttccatatatctcctgtccccctgtcaggtgccaaaaacagaaagaaagaaaagaaggaaaaaggaaactgatttggtaagttataatctgttttttaaattaaaaaagtaattttcagatcagttgtctgaggtatatcatacaatatatatgtggatatatttatgaaataagtttatcaggtacctaggcaataatcatatttatatctttacaaaaatttagaatgattagatgtgactgg

SEQ ID NO: 14245 - DNA, 2300 bp, Homo sapien
tctctatctcctgacctcatgatctgcctgccttagcctccaaaagtgctgggattacaggcatgagccaccgcacctggccagaaaacttatttttaatcaccaagaatttagctgcatagccacttaacctgtaattatgacataagaaatttattctctttttttcctgtgaaaatgcagtgtaagatatgacaaccagtttctgttattttgtcttccccatagagattctggaggaattacctaaatcagaagcaagtcagagatgcagctgtgcagaaggatgcttttgttatggctagtgcagctgctcttctccaagcttcctggcgtgctcacttagagaggcagcggtacttggagttacgggctgcagccatcgttatccagcagaaatggagagattactataggcgcaggcacatggctgctatttgcatacaagcaagatggaaagcctacagggaaagtaaaaggtaccaagaacaaaggaaaaaaattatccttttgcaatcaacatgtagaggattcagagcaagacaaaggtaatctctattactataataattgctttttttcttcttcccaagtactttgtttatacctctgcattaacacttgtctaatttgtattagaattggttgtatacaatttgtcttttccactatactgtgataccgattttaacccacattgtattgtctataatggaagttaaataaggttttattgaattaaattggattgaaaatctacatggtctgtgatcataactgctaagaattaacttctacattaggctgaatcttataaaattggcaatattcaactgttgttactttcagaaactttaatttcacacttaaattaaaatttcactttaatttcacacttaaaatttcactttaatttgaggtttactttaaaataaaggcattattaaaatgagagctttacttctgaattagtttacattttgactgaaatgcctaggtagaagtaatacacttaatgaaatatcatctgactcatggaaataggaaaattatgaaatgtgcattcaagttagtttaagaagaacttaggtattataaaaagattttacaactctgcattttttcttaaattctcaggaaatatgttattttcagtggtaactaagatatttctataacccattttgtctgtttttatatagatttaaagctttaaaagaacaaaggctaagagaaacaaagccagaagttggattggtgaatattaagggatatggatctctggaaattcagggttcagacccttcaggatgggaggattgttcttttgacaacagaataaaagccatagaggaatgtaaatctgtaatagagagtaatcgaattagccgtgaaagttcagtggactgcttgaaggagtcaccaaacaagcagcaggagagagcccaaagccagagtggtgtggacttgcaggaagatgtgcttgtaagagagagacccagatccttggaggatctccatcagaaaaaagtaggccgggctaagagagaaagtaggagaatgagagaactagagcaagctatatttagcttagaattgctgaaagttcgttctcttggtggtatttctccttcagaggatcgcagatggtctacagaattggtgcctgaaggccttcagtctccacggggtacacctgatagtgagagctctcaaggaagcttggaacttctgagctatgaggaaagccaaaagagcaaactagagtctgtcatttcagatgaaggagacttgcagtttccatcacctaagatatccagcagtccaaaatttgattcacgggacaatgccctcagtgcctcaaatgagactagcagtgcagagcatttgaaggatggaactatgaaggaaatggtggtctgcagttctgagtctattacctgtaaaccacagctgaaagactccttcatttcaaatagtctacctacttttttttatatcccccaacaagacccactgaaaacaaattcccaactagacacaagtatccaaagaaacaaactattggaaaatgaagacacagcgggggaagctcttactttggatatcaacagggaaactagaaggtatcactgctcaggaaaagatcagattgttccttctttgaatacagagtcttctaatcctgtgcttaagaagttagaaaagctaaacactgagaaggaagaaaggcaaaaacagttgcagcaacagaatgaaaaagagatgatggaacagattcgccagcaaacagatatttt

SEQ ID NO: 14246 - DNA, 2300 bp, Homo sapien
ttaagaaaaatcaaaactgagaaaaagtatgctccaaaattattgctaattgtaaaaaaaaataaataaataaaaaaaacacacacaatttttagcaagccagctgtctatgacaggacagctagtccattcctcactgtacatgtaaaattacacttcagttgcccgctggatgaccccactgccaaaatacgccagcaacataattcacattaaaacccagaggcctaacactatttggaaagtgctttacatgtttactatacctatcccaagcatatttaccactcataattcataggccattttcagcaaatatactttgttctatcatattattttctgccactctaaaatcatattaaatgtataaaacaaaaacacctacctaaatataacatctcacaaataaaccttagtagtattatgttattttgaacttgtctattgtatgaaactatgccataattgtttctataacataaattaggtatgttctttctacaggatcaaaattccaatacctacactccttgcatgtctaaagatacacacaaaataggtacagaaacctatatgttaaagggtttcccatgtaaattaaatcctctatgagctggattagtgactagaagaaggcatgaggcagcttgtagagttctagtgatattctatatcttgatgtagatgttagttacactggtatgttcttagtgaaaattcactgagctatatatttaccagctgtgtactttttgtatattttataatttataaagtcttatatttttaggctgggcacagtggctcagcctgtaatcctagcactttcaaaggctgaggcaggaggatggctctagtccaggagtttaagaccagcctgggcaacacagtgagaccctattttttctgaacttatattttttaaaatgctcaatctaaaaacttgttttactaaaaagcactgatatcatccctcttaccaaagtagtcaaaccctagtgaagaaaacagacaagtaattaagctatttcattagaggactatgatagaagtaattactatgtgctacaggagcacataagaatggtacctaacttaatctgaaaagaggtaaaggaaatcttcctgaagaatatacacctgaactgaatcctaaaggtcagacagaaattagccaagcaaagaaaggggaaagtggaaatcagggaaatagaacatcaaatgtaaaagacgagagagaaagcacattacctgagaggaagcctaaagtcagtaagagtggattaaagtatgtaaggaagacagcaagtgaagaaaagctagagaattaagagttagatcatgaatgatctcatacacatgccatgctacagtttaaactctatcctgaaagcaatgagacagcttttttgaagattattcaataggaaaggacatgatttgatttttatctgtactatacatgtcaaaattatggtgtgggccatgctcacaaccccattttgcggtaaattagcctgcacactgtcccatactttccaccattaagatctttcctgatacccatatatacatacaaacacacagccaacaataaatggccaagagtggtgacataacctaagtacacagacttgttagcaatcaatgagaaaaagagctgagccaaatctggaattcaaaccagaaaatcctagggaaaaggaagaggttagcaacaggagctaacctcttttaaaacgttttaaaacaattgcagccaggaggcaagatgttggcatgggggtcacatagtagttataaggagcagaaattagtaataaatggaagctatgacatagggggaaaaaaactgaagaaagaaacggtatctaggacaagctaacaatggagcactggagtggggtctccagctttattaggttcttgttcttcttgagagcaagttttattaggttctttttcttcttgagagcaagttaacttttcctgggttcccttgtgtatggttcctttcaataagcacttcattacttaaggtaacttgagtctcttccctccaagtgaaagagcctgactaaaagagcattttagaatacttactccaacagcagtcaagagaatgaacaggagggcatgacaagaggcagaagacagaaggcaagaagaccactcagcattacagaagcccaacaaacagatattttcagttaaaataagatagaggcaacaaaaagtaataaggaatgacctgaaatatcatgagggaaaatgtacaaggcagtgacagactggat

SEQ ID NO: 14247 - DNA, 2300 bp, Homo sapien
ggcttttacgtctagttattatctataattttaatgtgattttctcctgttactttaacattttttactgtgtgtgtgtgtatgactacaaagacctctttatatttcatctttataccaatattaaaattacgtactgatcatttgatgcaacattacatttctttcttgacaactcaggagctcaacttctacaaacattttattcaacattttactgctattgagaaggctgttgttggtaatgacctcagtgaacactgcatgatttctgtacttgcttcttggagaagcaagacagcagcaccaggcaacagaagtttattattaaaccgacatcgaagcattcagggattaaggaatgctacaaatcttatttttctagcaaatccaaaaaacagtgaatccaaaaaaagtcccctagtatcctttaaaaataaaaataagaaacagttctagtatctgcagcaatcgacaaggaggtgaagtaatactacaagacgacatagttatatccactagtgcaacgtgatttaatccttacagaggtccctaaaacatcagtgctggacaacctcacacgttctacacagaacagacaagacgaggtgcaggctctgtgaccttataatggcacacacacaactggcctcatgcttccataacttcactctgcctcccacttttttcagcccaacccctccaaacatgggtctcggtcggtccccttaagccacaatggagggaatacattaggctaagcaaatattccctcaggatttcatggcaaagccctttcaaccaaagaaaggatcgcgactaaggagaaagataacaaggtttgcttgaggagaggtctgttgagagaggctacagtcggtggtgggagagaagccaaagtctgtgacggtgtctagagggactgacaccacatctaccgggagtaagaacaccatgacagcggctatctgaaagccgtgatggctagggttagtgctagtcggcttggtgatgagcgagctgggaggggttctactaagaagagtagggcgaggggcacatgggggacgcaatgggttagggggcggtcgagactttgcctgagaactgtaatcacgtcagcccaagggaggatgtaacgtagtctagaagctccattaagagtcctaagggactctgaggggtactaatggggtctgctgggttggggggaccgtgacagaatctccggggaggctggagggccggaatggtgcccggccaatggaagatacagggggtggggtctactggggatccggggccgtgatctggtgtttgggaggctcggcgcagacccgctcgcggggcgtctccgctgggacggggcggggcggcccgaccggagccaaatagcgaggctgagacgtgggccaggacgggctgcagggccgctgggcgcttgggcgggtcttacctcgggctccgccgcggtggccaccgcagccccctcctcttcgacggaagctgccttccaccctccgccccagggtaggaccggagatggcagaagaggccgaggccaccgagggtcggacggttccgggagggtgggcccagcagcctcagggtccgggcgagcggccgcggcgcatcccccgccctgtcagagagactccgcccggcctgagcaggcacatcccccgccgcaccccgcccagagagcacgcgttggaccgccgcctcaaccgctgccagcggccgcctctgccggtgcaactactgcctccgccgccgcctctcgcagtccgggctgtcctgtactctctcaacagacacagccaaccgccgccgcgtcccttatccgcttcggtcgcgcgcccccgaccccgcgcacgcggccccgccccgcgcgactccccggctgcaggcgagcaggcgcgcgcgcacttacctcccacgccccctactgccagcacgggtcggccccgccctgtcccgcccccgcacgtgacgccactggagagtacagcgtgcgcttgcgcagacacgccccctttcctacgccccaggcggccccgcccaaattttttcttcttcaccttacggcagagcagggaactcagctttagattctccctgtactggaaagggatgtcgcaaggttggggacgaaacctctgagtttgcgaccgtagctgtcgctttccggccaacacagaggtgcctgaaggctggttggggtggtgaggcccgaggcaggtaagaagcctcctccccacttcggtttgtctcggcagtggatcgctctcccacccact

SEQ ID NO: 14248 - DNA, 2300 bp, Homo sapien
actaacttaaatgataaataatagaaaaagattctaaattggcaaggcactgtatgtagtaatctctatgagagtggatgttggtctttgcatctcataaattggcttagctctggatgttggtctctgcatctcataaattggcttagctctgatcattttggggacagaagtggggatggcctttgagctttaaggctggagacaacagctgaccaatcctggacggaagggaacgggagagcaaagagacaagtaactaatttggacctgataaacactgaggaatgaacagtgctgaagagaaaggcaagagtggctccttctcccatttcccagaccagttattccaaacataacgccgctcaagtttctcattccatctccaagcctctctgtagttaaatgacctccatcttttttttctgggggcggggacggagtctcgctctgtcacccaggctggagtgcagtggcgcgatcttggctcactgcaagctccgccttccgggttcatgccattctcctgccttggcctcccgagtagctgggactacaggcgcctgctaccacgcccggctaattttttgtatatttagtagagacgaggtttcaccatgttggcctggatggtctcgatctcttgacctcgtgatccacccgcctcggcctcccaaagtgctgggattacaggcgtgagccaccgcgcccggctaaatgacctccatcttaatgttacagagccaactgtctcaacttccttctctctagtttagtgagtctcaatctttagcattagagtcacctgtggagctttaaaacagtaatgacacctggcacaacccagaatttaattggtctagagtggggcaacagtattggttttatttaacaaaaagtttcccaggtgattcaaatgcacatacaaggttgcgttccactagtgatcttgatcttataaattagcctccctcaccctcgaagaggccacttctcggtttcatggtacgcttttgagtcttctacctaaacagaaaacattcctgagggccatattctcgttcctcatttctctaactttataacgatgcttctttaaagggaagtctacactagtacggtttccatcaggtttattttacttcttttttctctttcagaccaccactgtcacatgctcttgcgcccgttattctgcttttacctcctttcgtatttctttgaccaggtactggattactagtcttttaacacagtcctctaaaagtgacccaaaagtcaccctggaaagggcttcctcacgttatcctcctacacaacctgggacccctcttctgtgcgcagacagcatcccgtgcatttttctctattgtcactttattgtactaccactgcggattctctcacggtctcctatacaaaagcacttcaaaaagctgacaccacttaattcgcctctgacattctggaacccaaggcatggaaaccactcagtgaaaagtctgagaaatgaatggaaacggaggtcggggcggggacaatggagggggcagtgggtggagagagcgtgcgtgtttgaaaaggggcgggggctatgaccggcggcgctgagaatccaggtccagaatcgggagggagcacggatacgccagaatctgagtgggtgggagagcgatccactgccgagacaaaccgaagtggggaggaggcttcttacctgcctcgggcctcaccaccccaaccagccttcaggcacctctgtgttggccggaaagcgacagctacggtcgcaaactcagaggtttcgtccccaaccttgcgacatccctttccagtacagggagaatctaaagctgagttccctgctctgccgtaaggtgaagaagaaaaaatttgggcggggccgcctggggcgtaggaaagggggcgtgtctgcgcaagcgcacgctgtactctccagtggcgtcacgtgcgggggcgggacagggcggggccgacccgtgctggcagtagggggcgtgggaggtaagtgcgcgcgcgcctgctcgcctgcagccggggagtcgcgcggggcggggccgcgtgcgcggggtcgggggcgcgcgaccgaagcggataagggacgcggcggcggttggctgtgtctgttgagagagtacaggacagcccggactgcgagaggcggcggcggaggcagtagttgcaccggcagaggcggccgctggcagcggttgaggcggcggtccaacgcgtgctctctgggcggggtgcggcgggggatgtgcctgctcaggccgggc

SEQ ID NO: 14249 - DNA, 2300 bp, Homo sapien
aaacaaaaaacgaaaaccggaatggctgtataggtacttgaagtacagtttctacaggaagcctatcacttttgcaccatcataaagttgaaaaatcttaagtggaaccatcgtaggtcagggaccgtctctatgtccaggccctcacttgtgcttccttaatgcacagataggagcgcgtagctgcttcccaacatgccctatgactctctctgcctatggtgaggaagaggggagggatggggcagcaggtgggagagtaagtttcctggggtttgcctctctgctccagcattaaatagggggccccctatagaccctgggagctgggcttcacctgacacaaagtggcttatttggaggtaaagctctcttggagagggctgatgcttccccctgcctgaccttgcctgttccagatggacaagtgactgctgttccctttcctcctcagccttccagcaagaagagtctgagtgtaagagaattttcaggggaacctgagtctctggtgagagctgaagctgggagcaaagactgctggactgacagtgcctggagctctgaggcttctgggcctcctaggggggcccacaatgcagaactggggcaccaggctcaagagtcagtggccatgctatgccagggcatctcttaaacctgccacaccataatgcagagccaccagggcctcagcagataggctttcttttctttcttttttggacgacagagtcttgctatgttgcccatgctgcagtgcagtggcaccatctcatctcactgcaacttccacctgctgggttcaagtgattctcctgcctcaccctcccaagtagctgggattacaggcacttgccatcacactcagctaatttttgtatttttagtagagatggggtttcaccacgttggccaagctgatctcgaattcatggcctcaagtgatccactggcctccgcctcccaaagtgctgggattataggcgtgagccaccgtgcccagccgataggctgactttctgagtagaacagaagtccaagcaccaaaacactggccaggttgggctgcacacctgtacagatgcaggaccagtggcccatcctcttttcttcagctgagtcaagagggccttcaaggggataaagatgaccctgggagccgagtgtggtggctcacgcctgtaatcccagcactttgggaggccaaagcaggaggatggcttgagcccgggagttcgagattggcctgggcaacatagtgagaccctgtctcaataaaaatacaaaaattagcagggcatgttggcacgtacctgtagtcccagctacgcaggaggctgagatgggaggatcacttgagcctgggaggttaaggctgcagtgagccaagatcacaacactgtattccagcctgggcaacagagggagaccctgtcaaaaaaaaaaaaaataaaagatgtccctagggaagaactccaaagactatccctgaagaacccagacagacttattttagatttgccaaagttccagaagtttcctttggcagctggggccctgggtaggcagaactgagtttctagggcagggatggcgtagaaatgaccctggggtgtttgaaggctcctttagtaactattagtgtttagccaagcatgtgatatgcataataccatgtgccggatagaaggtgaagttcccatttttgtagatggggacgctaagtcctccctgccaaggttagggcttgggataggagcaggaacttatcctacctaagacatgttgtgccgagctttcttggcctcagatctgagcatgtatctgggttggctcacatctaagatcccactgtggttctacactagcagtgttcaaagacatcgtttgctggcagaatagctagtcacagcaagggagcagagaggagaggcatatggttgctatagcaactgccctcctcgcttgtacctgcttccatccctggctaggcatctatatttggtaatatctggagaaaactctgataaacctggtgtgggctccttagggcaagtgagatcgcaagggccatggtaagatagcttctcctgtcttactgcaggaagtcctcatccctgagatgaagtggagaaaggtatgcccttcctccaggtccctgtctctcccagacaacatcccttgtatccctccatcatccgtggactccacagacagtttcttcccctccaggaagcctccaatgtctggtaagttcgggagggcttgtccatggcaactacttgcaaaggccagac

SEQ ID NO: 14250 - DNA, 2300 bp, Homo sapien
tcacagccaaatcattctgcctctgggtatttcagaaatgctttgagaatcagagtgggatatcacatttaggcggagccctagctgtggccaagaagtagcctggggagctccattactagagtatgagatttaccagagccaccatccttggcctcctggataacagggatcatacctatgtgacagccaagagtgacacatcctgccaaggctggggcagggtggcagggacaactggaaggggagcctggatgaaaaggtagaaggttcagagacttccccacatggggccaggcttccccatggtggccatgctgggctcacagctgggtccctaggcagggagcaaagggaccacgtccttgggggttagtcctgagagaagcatccctctccctctcaggtggtcattcctgtggtgtctgtgcaaatgatcaaaaaacacaagatggcacggctccttcccaatggactggccatcaccaccaacaccagccagaaggtcagtgcactgggcccatgctcccttgtcagtctcccgctcccagccctgacagcccacagtctgactcgggcacattcccaggtctttatttcaccccaccctgcagctctccagtaggtatttcaggccgtacaacaagctggaagagaagttcctaggcagagcttctgttggctctcatggcctgatacccctgtgggcctgtgcccaatccacaagggggctggctggcacagcaaggagtctcatctcaccctacccctgtctgttttctttccatgtcccagtatatctttgtgtcactgctctcccgggacagtgtatatgacctgctgaggagagtctgcacccacctacaggtatggagcttgggagcaggaaggccagggaagtcgctcaggcctggatgcaggtcttgcacaagggtgttgggggaggtcgcccatctctccagcacagggaatggggcagggagaggggagttaaaggctcaggctcaatgtacaagagacagtacttggattgtgtgtctatgcttgcaagcatgtctttgaggccagtgagcccctgtgtgtccccatatacagatgctccttgttcatgggcttatgtcccatgaacccatcaaaagttgaaaatatcgtaagtcaaaaatgtgtttaatagaggtacacatcacctacagaacatcgtagcttagcctcacctcccttaaacatctcagaatgctttcattagcctagagctgggcaaaagcatctcaggcaaagcctgttttataataaagtgtggaacatcttatataacttattgaatcctgtactgaatgtgaaaaacaatggctgtatggtcccagcactttgggaggccgaggcaggtggatcacctgaggtcaagagttcgagaccagcctggccaacgtagtgaaaccctgtctttactaaaaatacaaaaattagccgggtgtggtggcaggcacctgtaatcccagctacttgggaggatgaggcaggagaatcacttgaacccgggaggaggaggttgtagtgagccgagattgcaccattgccctccagcctgggtgacaagagcaagactccatctcaaaaaaacaaaaaaaaacaaaaaacaaaaaacgaaaaccggaatggctgtataggtacttgaagtacagtttctacaggaagcctatcacttttgcaccatcataaagttgaaaaatcttaagtggaaccatcgtaggtcagggaccgtctctatgtccaggccctcacttgtgcttccttaatgcacagataggagcgcgtagctgcttcccaacatgccctatgactctctctgcctatggtgaggaagaggggagggatggggcagcaggtgggagagtaagtttcctggggtttgcctctctgctccagcattaaatagggggccccctatagaccctgggagctgggcttcacctgacacaaagtggcttatttggaggtaaagctctcttggagagggctgatgcttccccctgcctgaccttgcctgttccagatggacaagtgactgctgttccctttcctcctcagccttccagcaagaagagtctgagtgtaagagaattttcaggggaacctgagtctctggtgagagctgaagctgggagcaaagactgctggactgacagtgcctggagctctgaggcttctgggcctcctaggggggcccacaatgcagaactggggcaccaggctcaagagtcagtggccatgctatgccagggcatctcttaaacctgcca

SEQ ID NO: 14251 - DNA, 2300 bp, Homo sapien
ctcagccaagacacccggtcctagtgcgaacacctcgcgggccccgggagacgcctgggcgcgcggtgcagctctggcccggagcccgcattccggcggccgggaagtgcctgccccgtgggcagaacgcgccgagttgccgcggccccaggagccgtcctgccccgcgcggcagcagcccctcgcggcggcctccggaacccccgagaccggcccccgggccgcaaccccttacccgccctcctcggtggcctcgctccggcttaaagcggtcatcccggcgcctgcacccagcgccccgaccgcgcgccgggacccagcgcccgccggaccccgcccgccccgtcgagagcccgccccgcccgcccgcccattggcgggtcgcgcgggccgggcacagcccattggccgttcctccccctcattccccagcttccccagcttctctccttccccaccttccccaggtggggctccaagctctgagcagatcctagcgctcggttccccggactgggaggtcccggaggccagggcctggcgcggcacctcctgtccctcacgtcgagggtattgtgtcccctctggacgcttctgtcgtcctagtcttgcggcttgggtccctctgcaggaaccaattccggcccctctccaacctaacccttcccaacatagagctccggataagtttcaattttaccgtcagtggggaacaccaaaggggatattgaacaccatggtctgacagccaagtcaccaccacgaacccgggagccaggatgctcccacgcacttttgccggagttaacattgcagtttctccaaggaaatacacttttggaggagtctgcaaaggggctgaaggtggacacaaatcaaaggcagggaagcagaggcacgtgcgctcagtgtgacaatgagcttttgcctggcctgcaggccctttcctcttccatccccaccaggacacttggtccttgggagtgtggtcaggggagaggaaaagcgcaggccagatttggtcccattcccaactctctcccccagccctttggcactacagcatcatggtgggagggcaccagcaaacaggaggggtcccaaggggagcctaggtccacaactgaggacctgggagccaaacccagtctcaggcgcccagagctgactcctcctacagcccccataagggatacgctaatgcaggaagaccaaagtggaagaaccatggccaaggccactttgcaatttgggtttatctaccagagtgggagggaggccttgtccctgctctttcccatcttcggttcacgtaagccattaaagtctccccgcagcactgaagggggcaacctgtaaccctaagatagtaagctactgctttcccagcgcctctgcaccaggaggtgggcaggatggcaggtgacaccaccatagctcccactgcggggcacgaggctgcagccattcccagcctgctcagagggcagggttcaaccacctccccctccccagcagaaaagagaggaaacaggtgcttcagctgttgtttattgacatacaggtaggctctatagcaacaggcctggaggtgctgcagtagtgggggaaaatggaaggtggagggtggagtgtttgctgcaggacagctgagtggagggtggggacaggtgcaaactggagaggcctagagagctagagaagcaagtaagggccagggccagagtcggcttcaatggaacaacagcccagtgccctaaggcccctaactcttgctggctgtttcttgaccccaagccagggttgggagtcctctgggcatccattttttctaaaggaactggacagagtacacacaggaaaggaagctgtcaccctcttgccatctggctccaggggcctccagtccagcattcctccttcttcccttgattgggtggggccacatgatgggcagccaggctctgggctgtcccactagagcaggctgcaaacacagccatgtttcagtgaggcgttgatcttcttccctggtgtcccaacctaccagtgccacgttacagcccagagtgagttctacaagcgttgctggcctaatggatgggctgggggaagggggtgggacaggggctggaggaggggctctggggtccatcacggcacaggaacaacacgcatggtgttggtgaagccggagccagggcgccatccggtcagcacaatgaccacatctcccttcttgaagaagcctcgggccttgcctggaggaagagaagggaggttggtgagtaaaagccaag

SEQ ID NO: 14252 - DNA, 2300 bp, Homo sapien
tgccaccttgtggtgtgaggaagtagtggtcagccagcctagttcagtactcaggctatggggcagctgcccaggtgcaaacctgcctggcttggcttttactcaccaacctcccttctcttcctccaggcaaggcccgaggcttcttcaagaagggagatgtggtcattgtgctgaccggatggcgccctggctccggcttcaccaacaccatgcgtgttgttcctgtgccgtgatggaccccagagcccctcctccagcccctgtcccacccccttcccccagcccatccattaggccagcaacgcttgtagaactcactctgggctgtaacgtggcactggtaggttgggacaccagggaagaagatcaacgcctcactgaaacatggctgtgtttgcagcctgctctagtgggacagcccagagcctggctgcccatcatgtggccccacccaatcaagggaagaaggaggaatgctggactggaggcccctggagccagatggcaagagggtgacagcttcctttcctgtgtgtactctgtccagttcctttagaaaaaatggatgcccagaggactcccaaccctggcttggggtcaagaaacagccagcaagagttaggggccttagggcactgggctgttgttccattgaagccgactctggccctggcccttacttgcttctctagctctctaggcctctccagtttgcacctgtccccaccctccactcagctgtcctgcagcaaacactccaccctccaccttccattttcccccactactgcagcacctccaggcctgttgctatagagcctacctgtatgtcaataaacaacagctgaagcacctgtttcctctcttttctgctggggagggggaggtggttgaaccctgccctctgagcaggctgggaatggctgcagcctcgtgccccgcagtgggagctatggtggtgtcacctgccatcctgcccacctcctggtgcagaggcgctgggaaagcagtagcttactatcttagggttacaggttgcccccttcagtgctgcggggagactttaatggcttacgtgaaccgaagatgggaaagagcagggacaaggcctccctcccactctggtagataaacccaaattgcaaagtggccttggccatggttcttccactttggtcttcctgcattagcgtatcccttatgggggctgtaggaggagtcagctctgggcgcctgagactgggtttggctcccaggtcctcagttgtggacctaggctccccttgggacccctcctgtttgctggtgccctcccaccatgatgctgtagtgccaaagggctgggggagagagttgggaatgggaccaaatctggcctgcgcttttcctctcccctgaccacactcccaaggaccaagtgtcctggtggggatggaagaggaaagggcctgcaggccaggcaaaagctcattgtcacactgagcgcacgtgcctctgcttccctgcctttgatttgtgtccaccttcagcccctttgcagactcctccaaaagtgtatttccttggagaaactgcaatgttaactccggcaaaagtgcgtgggagcatcctggctcccgggttcgtggtggtgacttggctgtcagaccatggtgttcaatatcccctttggtgttccccactgacggtaaaattgaaacttatccggagctctatgttgggaagggttaggttggagaggggccggaattggttcctgcagagggacccaagccgcaagactaggacgacagaagcgtccagaggggacacaataccctcgacgtgagggacaggaggtgccgcgccaggccctggcctccgggacctcccagtccggggaaccgagcgctaggatctgctcagagcttggagccccacctggggaaggtggggaaggagagaagctggggaagctggggaatgagggggaggaacggccaatgggctgtgcccggcccgcgcgacccgccaatgggcgggcgggcggggcgggctctcgacggggcgggcggggtccggcgggcgctgggtcccggcgcgcggtcggggcgctgggtgcaggcgccgggatgaccgctttaagccggagcgaggccaccgaggagggcgggtaaggggttgcggcccgggggccggtctcgggggttccggaggccgccgcgaggggctgctgccgcgcggggcaggacggctcctggggccgcggcaactcggcgcgttctgcccacggggcaggcacttcccggccgccggaa

SEQ ID NO: 14253 - DNA, 2300 bp, Homo sapien
gcagagctttttaggtttctccatcctcttatgcacagcctttcattatcctccaagttacagcagcaagagggtgggggtggaagtggaggtggcttttttttttctcctgttctgcattcctgcccacacccccacccctccatttccttctgctctggaggcatcctccttcattggacaccacacagtttatttcacttctgacttcaaggttgtgaattcttcccatggcttaagtcctgggatacttctgcagtgaaaggaggtcttgtacctcttcctcagagtcagaagttctgagtacctttgccctattctgaaaagggctaggggctcctgctcccagctgccctcttcctttggcttccaattcagttccctctgccccgcatcctgcagacaggcgctcccgcagggggcccttgtggacctgcactggagtctgttgccttcactgagctgcctgtgctggccttgcatggtgcctgtagggggatttgctttgctgtgccattggggtacagctgctgctcttactctagaccaaaaagtcgggttgagtgactggtggcagggccacagatagagacagcggggagggtggctgaccctggcggccctggactgagcgtctggaggagtcgtggaggctctttcccttctttctcctctgagagctcgttcttcaggctcttccagcttgtcatgtcgagtgcctggccactgctcagggttggaggctcagtccctttgccctgtctgttccagctctggagctaactcagggatccctgatcagggttacataggtttggtaaaatgagtgctggaaattaactttctcccagtagtcttaggtcatgctcagtgaacttaaactttatccagatatggttttccttcagcctttctattccctttctagccagtgaaagacccgctgccctttgacctcagcccctccaagcccccaagtttaaaacgccaccccctgccaccagaaaaaacagaaaaaaaaaaaaaaaaaaaaaactaaaacacccatctggtctgggcatcttcctttcctttttcactatgtatcctgttactgggcttaaacagctttcagagaagagatgtcatttctattaaatgctctttcagtagcgaactgagttcacacttgactaaggatattttccggactgtctgtcatcagcatccttagtgggtttccccatatttaaattggtagaggccagggatggtggctcacacctgtaatctcagtactttgggaggccaaggtaggtggattgcttgagctcagaagaccagcctgggcaacctggtgaaaccctgtctctactaaaaattcaagttagctagctgggcatggtgatgcacttctgtagtcccagctacttggagagggggtgatgctggggcagcaggatcgcttgaacccaggaggttgaggttgcagtgagccaagatggtaccagcctaggtgacaaagtgacaccctgtctcaaaaaagaaaccaaacaaacataaaaaaaaaaacaaaaaaatcggtagagagtgatttctctcccaggcccacttaatgtagactgggcctggctgacacctcaccattcgtgtgatgtgattgctgttctgatgcttagatactcttggcgcagtctcacaattgccaccatggtaggaaggtgtcccaggagacggtgcaccttgaaccagtcaccactaaagtggctgcctttctgggtctctccacacatcccctctctctaatttccctacttaatcgtgtgacttcatggtctcaaaggaggaacagaggctgatcttgacttagatatactgaaccatgaaatcactgcatagaatgtggggacttgaatgtgtctttgggcaagtcatttaacctcttaagacctcatctgtaaaatggattagatatgtttaattatagccttagcattaaatattcattgctgttattattaagtgtctgataagtctctgtgtacatggatgtaatcttcctaactcccattacctccatttatagatgagggttatatggccaataaagcctgggtttgaatctaggtctactgcctccaaagccagtcttctctcctgcaacatcatgctctgtctagcaggagatgagaacaggtctccatttggagcctgtcagtggggtcagagactaagattcaggctcagggtctaaattccatatcctttcttccataccctggtgtttcctatgaacagatagatactttagggctgcaagg

SEQ ID NO: 14254 - DNA, 2300 bp, Homo sapien
ataacttcaagtttgcgttgtagttggaatcaatagaggaaaagctctcagcattaccacatatatcagaatgtgacattgattgccagaccagccttatccaaacacaagtcctaggctttttgccctgtttatgagctttatatgctgagggtatttgatgagtcttagggaaaaaagaacagccctggggacacagctgcttttatgatgagacatgtttgcacccataccttaatgggttttggtggcaatattctgaaatttgccacctacatttcaaagatttgccctttgggtgaattagtgctgtagtagaagtgggtggaggctgaggaggttggattaagcaggtagaggatttctcagtgcatggatcgtgctgaggatggagatagagctctaagacatccacgggcctttcctgagtgatcagctttggctcctgggcaggggaattggagctggattctagtgtgggagcacgcttgtcatcttccttcttttcccccagtaccatgcggagaccatcaagaatgtgcgcacagccacggaaagctttgcttctgaccccatcctctaccggcccgttgctgtggctctagacactaaaggacctgagatccgaactgggctcatcaagggcgtgagtattctgcggagagcgaggggaaggctcagtaggcaatatgccccagagacatgtcctccaaagcgctgggttgccatgtttcttcccagtactatgaaggactgcagaggagttgaggtctacaaatgaggatttattcatcactgtaaacaatgttgatttgatctactttgctaggaaatggtaccacaaaggaaccttttttttttaccctaaaaacctaaactttaggctttctaacttggagaaccatctctttgtatctttttccccatcattaagtagcataactgaaacatattcttttcttggattatttccgtgaagtatacagagttagagaataagagcaaaaaactgtattacttttagcagtgacttgagcattgttcccgggaggaaagagcttttccattccttctgaggtgatgctgctactggtgtctccagtttggactcttgcttactctcttgtccctagagcggcactgcagaggtggagctgaagaagggagccactctcaaaatcacgctggataacgcctacatggaaaagtgtgacgagaacatcctgtggctggactacaagaacatctgcaaggtggtggaagtgggcagcaagatctacgtggatgatgggcttatttctctccaggtgaagcagaaaggtacgtatgggagctggagtccagttgtctaaaacagtcttttgtctctaaacttccttgacacaaggaagatgggaaggttggttgcctggcagtgagattgagtctgtgtgttctcaggaatcccttttataactcatttatcctcaaagataggctttaatccagcatagttacattcttctggttctggagaacacaggaacatacatacatatatatatatatatacatatatatatatatatatatatatatatatatatatatatatatttgtttcgctgtgttttgttttgttttcaagacagagtctcgctctgttgcccaggctggagtgcagtggcatgatcttggctcactgcaacctctgcctccagagttctagctattctcctacctcagcctcctgagtagctgggattacaggcacccgccaccacacccggctaatttttttgtatttttagtagagatggcgttttgccatgttggccaggctggtctcaaactcctgacctcaggtgatctgcctgccttggcctcccaaagtcagaacagtcttaattatccttatttatgggtgaggaaagtgaggtacagagaggttaaatggcttgcccaggattacacagtgtagtaggttttcaactctggtaaaacagctccagcacccataatgcaccacttcccagctcactgtccttgcgggaaaggtgcctgcttcctgttgacctgtgccctcgtgctctgcctcccctacttaccctttttcatacaggtgccgacttcctggtgacggaggtggaaaatggtggctccttgggcagcaagaagggtgtgaaccttcctggggctgctgtggacttgcctgctgtgtcggagaaggacatccaggatctgaagtttggggtcgagcaggatgttgatatggtgtttgcgtcattcatccgcaaggcatctgatgtccatgaagttag

SEQ ID NO: 14255 - DNA, 2300 bp, Homo sapien
tgagatagggtgttgctttgttatccaggccggagtgcagtggtgtgatcatggctcactgtagccttgacctcctagacataacccacctcagcctcacaagtagctgggaccccaggcacgcaccatcatgcacagttaatttttgtgttttttgtagagacgaggtttcgccatgttgcccaggctcatctcaaactcctggcccaaactgtcctcccaccttagcctcccaaagtgtttggtttataggcatgagccactgtgcttagcctgagtccctcttttaaacaaacaaaatggtaaatggaaaggaggaaaggcttaagaaaaaagattgaagccaggatttgttgtaagcaaggagtaataaagggcagttcatttagagaaaggcatatgaccacctttccccctccaatcagaatctagaaagtgattgaggccgggcgcagtggctcacgcctgtaatcccagcactttgggaggccgaggtgggcggatcacgagatcaggagatcgagaccatcctggctaacatggtgaaaccccgtctctactaaaaatcgaagaagttagccaggcgtggtggtgggcgcctgcagtcccagctactcgggaggctgagaggcaggagaatggcgtgaacctgggaggtggagcttgcagtgagcctagatagtgccactgcactccagcctgggcgacagagcaagactctgtctcaaaaaaaaaaaaaacaaagcgattgagaaaatcaggtctgtgtgaccttagcaatgagttatttagcttgggccactgttagcttaagtcaataacttcaagtttgcgttgtagttggaatcaatagaggaaaagctctcagcattaccacatatatcagaatgtgacattgattgccagaccagccttatccaaacacaagtcctaggctttttgccctgtttatgagctttatatgctgagggtatttgatgagtcttagggaaaaaagaacagccctggggacacagctgcttttatgatgagacatgtttgcacccataccttaatgggttttggtggcaatattctgaaatttgccacctacatttcaaagatttgccctttgggtgaattagtgctgtagtagaagtgggtggaggctgaggaggttggattaagcaggtagaggatttctcagtgcatggatcgtgctgaggatggagatagagctctaagacatccacgggcctttcctgagtgatcagctttggctcctgggcaggggaattggagctggattctagtgtgggagcacgcttgtcatcttccttcttttcccccagtaccatgcggagaccatcaagaatgtgcgcacagccacggaaagctttgcttctgaccccatcctctaccggcccgttgctgtggctctagacactaaaggacctgagatccgaactgggctcatcaagggcgtgagtattctgcggagagcgaggggaaggctcagtaggcaatatgccccagagacatgtcctccaaagcgctgggttgccatgtttcttcccagtactatgaaggactgcagaggagttgaggtctacaaatgaggatttattcatcactgtaaacaatgttgatttgatctactttgctaggaaatggtaccacaaaggaaccttttttttttaccctaaaaacctaaactttaggctttctaacttggagaaccatctctttgtatctttttccccatcattaagtagcataactgaaacatattcttttcttggattatttccgtgaagtatacagagttagagaataagagcaaaaaactgtattacttttagcagtgacttgagcattgttcccgggaggaaagagcttttccattccttctgaggtgatgctgctactggtgtctccagtttggactcttgcttactctcttgtccctagagcggcactgcagaggtggagctgaagaagggagccactctcaaaatcacgctggataacgcctacatggaaaagtgtgacgagaacatcctgtggctggactacaagaacatctgcaaggtggtggaagtgggcagcaagatctacgtggatgatgggcttatttctctccaggtgaagcagaaaggtacgtatgggagctggagtccagttgtctaaaacagtcttttgtctctaaacttccttgacacaaggaagatgggaaggttggttgcctggcagtgagattgagtctgtgtgttctcaggaatcccttttataactcatttatcctcaaagataggctttaa

SEQ ID NO: 14256 - DNA, 2300 bp, Homo sapien
cgcagtctcgctctgttgccaaggctggagtgcagtggcgcgatctcggctcactgcaacctctgcctcctgggttcaagcgattctcttgcctcagcctcccgagtagctgggactacaggcgcccgccaccatgcccggctaatttttgtatttttagttgagacagggtttcaccatgttggccaggatgctctcgatctcctgacctcgtgatcctaccgcctctgcctccaagtgctgggattacaggcctgagccaccgcacccggcctactatgcacctaatgtgagcaacgattcgctggatttgtctctgccagaggctcgtggacagcatttctagaactgtcagatcaaaatctgcaactgaggagttagtttgccatcaactctacatgtacatttcagtcttgtgaacatatctagatttagaactttttcgtttgtttgtttttgagacaaggtctggctctgtcacggaggctggagtgcagtggagtgatctctgctcactacaacctccacctctcggattcaagcgattctgcctcagcttcccgagtagctgggattacagacgtgcaccaccatgcccagctagtttttgtatttttagtaaagacggggtttcgccacgttggccaggatggtctcaactcctggcctcatgtgattcgccggcctcggcttcccaaagtgttgggattacaggcgtgagccactgcacccagacaatttagaactttaaaatacaatatagtccagcatcggccagatccttgccatcccagtgttgtccaccactgttcttagtttgtcctcagctcaggggccagggagggacttttatgccatccctctttctctgatagagaggaatctaaccctccctaggggggcatgtcttttttccttctcaacaacttcatgttctttcaccaccttaataatcaagcatttccttcccaacaacaactaaagggaccaggaaagacttacagaagaaagtgaaagatttttatctcacttcaaacagaaatttacttttaggctgtcactgtctcctcccagcttatctgagctaacaggaagcgaatgaaggcctgtgattcagctgcaggcagcgggtatgcctgagcaggtcacacccatttggtctcttttgccaggaaaataaaaaaagaacctaagagaacggtcttcacattttgaatgcgcaacattgtatctgtgaatgaaggcaagagttaacagctgtttaattgataactgctcgcatcattagttgctggctaacaactgggaaatcagaaaatgtcttgtagaaaaatgtaagaaaagttccaacaatactgacttaaacacgacaaaggtgaaaacagaaatgctgactcctgcataggttatcggccctaatgttctgacttgatatttccagatgcccagctctgcgctaatatcaacaccgtctatttactttctactctgaggcattcgctctgcaggattccagaccctactaaattattcacatggccccaaccggtccttccttgttccgcggtcctaacacaatgaatggtcctaagaggaaaacggcctcgcgctcccgctccaggcccacttcgcagtccctagttctccctactgccgctccagtgccagagcccctccgaaggcggccaggacctccaaccacgcacaagtctgcagctctccccaactttccgttcagctcagtctccgagggtgcgccagagcagacacccggaggagtggggagtggcagggcggggccgggagaatgctgccccggaacccataaatctgggccctgcccaggtaggccgggacagctggggtggcctgggccgagagccaagaaaagacaccccatctggcagcccaacttggcggcaacaggtggcccggcgcccgggggtctgggaggaaagtcgctccgggggcgggccccgttgccccgccgcgtccccattggtcatcaggtttcttaaaatgtgactctgaatctgtgtccttccgccgcagaatttagtcccaccgaaagggcaacctgcccgcgcgttccgccgccgccgccgcgcttcctcctgaaggtgactgcgcccgcggggacgcagggggcggggcccgggtcgcccggagccgggattgggcagagggcggggcggcggagggattgcggcggcccgcagcgggataaccttgaggctgaggcagtggctccttgcacagcagctgcacgcgccgtggctccggatctcttcgtctttgca

SEQ ID NO: 14257 - DNA, 2300 bp, Homo sapien
atagggaactggaactaaggtatgatggaacccaagcttgatctttttttgtttgtttgtttgagacagagtctcgctgttagccaggctggagtgcagtggcacaatctcggctcactgcaacctccgcgtctcgggttcaagcgattctcctgcctcagcctcccgaatagctgggactacaggtgcatgccaccacgcccggctaattttttgtatttttagtagagatggggttcgctgtgttagccaggatggcctcgatctcctgacctcgtgatctgcccgcctcggccaaccaaagtgctgggattacaggcgtgagccaatggctggcaccaggcctccaagcttgatcttctatactgtgctacttatcggcaaaaagaaaattaccttcagtgtgacaaatttttactatgcacttgtttgtttatttatttatttatttatttatttatttatttatttatttgagacgcagtctcgctctgttgccaaggctggagtgcagtggcgcgatctcggctcactgcaacctctgcctcctgggttcaagcgattctcttgcctcagcctcccgagtagctgggactacaggcgcccgccaccatgcccggctaatttttgtatttttagttgagacagggtttcaccatgttggccaggatgctctcgatctcctgacctcgtgatcctaccgcctctgcctccaagtgctgggattacaggcctgagccaccgcacccggcctactatgcacctaatgtgagcaacgattcgctggatttgtctctgccagaggctcgtggacagcatttctagaactgtcagatcaaaatctgcaactgaggagttagtttgccatcaactctacatgtacatttcagtcttgtgaacatatctagatttagaactttttcgtttgtttgtttttgagacaaggtctggctctgtcacggaggctggagtgcagtggagtgatctctgctcactacaacctccacctctcggattcaagcgattctgcctcagcttcccgagtagctgggattacagacgtgcaccaccatgcccagctagtttttgtatttttagtaaagacggggtttcgccacgttggccaggatggtctcaactcctggcctcatgtgattcgccggcctcggcttcccaaagtgttgggattacaggcgtgagccactgcacccagacaatttagaactttaaaatacaatatagtccagcatcggccagatccttgccatcccagtgttgtccaccactgttcttagtttgtcctcagctcaggggccagggagggacttttatgccatccctctttctctgatagagaggaatctaaccctccctaggggggcatgtcttttttccttctcaacaacttcatgttctttcaccaccttaataatcaagcatttccttcccaacaacaactaaagggaccaggaaagacttacagaagaaagtgaaagatttttatctcacttcaaacagaaatttacttttaggctgtcactgtctcctcccagcttatctgagctaacaggaagcgaatgaaggcctgtgattcagctgcaggcagcgggtatgcctgagcaggtcacacccatttggtctcttttgccaggaaaataaaaaaagaacctaagagaacggtcttcacattttgaatgcgcaacattgtatctgtgaatgaaggcaagagttaacagctgtttaattgataactgctcgcatcattagttgctggctaacaactgggaaatcagaaaatgtcttgtagaaaaatgtaagaaaagttccaacaatactgacttaaacacgacaaaggtgaaaacagaaatgctgactcctgcataggttatcggccctaatgttctgacttgatatttccagatgcccagctctgcgctaatatcaacaccgtctatttactttctactctgaggcattcgctctgcaggattccagaccctactaaattattcacatggccccaaccggtccttccttgttccgcggtcctaacacaatgaatggtcctaagaggaaaacggcctcgcgctcccgctccaggcccacttcgcagtccctagttctccctactgccgctccagtgccagagcccctccgaaggcggccaggacctccaaccacgcacaagtctgcagctctccccaactttccgttcagctcagtctccgagggtgcgccagagcagacacccggaggagtggggagtggcagggcggggccgggagaatgctgccccggaa

SEQ ID NO: 14258 - DNA, 2300 bp, Homo sapien
tcgcttgaacccaggaggcagaggctgcagtcagccaagatcaaaccagtgcactccagcctagacaacaaagcaagactctgcctaaaaaaaaaataaaaagtaataagagagttacctacactatgctaataatttaaaaactttgataaaatggataaatttctagaaaaagataacaaatctgacaagaaatagcctgtataatcataatactataaaagaaatagaaattgtgtaaaaatttccacacacaaaataaacctcaccaagcccagatggttttacaaattaatcttaaactttcaaggaacaaattattttagttttatctaaagtcttccagagaatagaaaaaatggaattacaaatcataaaagattgataaatttgactatattaaaattaaaaacttctggctgggcacagtggctcacacctgtaatcccaacactgggaggctgacgtgggatgattgcttgagctcaggagttcaagaccagcctgggcaacatggcaataccccatctctgcaaaaaaataaaaataaccaggtctggcagtgcgtgcctgtaagtcctagctggtcaggaggctgaggcaggaagatcactgagcccaggaggttgaagctgcagtgagccatgatcatgtcactgcactccagcttgggcagtagagcgagaccctgtctcaaaaaagaaaaaaaatttaaaacttatattcttcagaagacaccctaaagaaagtgaagagacaggctacaaaccgacagaagacatttgcagcacatataaccacaaaagattagtaataaaagtgtactttttggctgggcgcagtggctcacgcctgtaatcccagcactttgggaggccaaggcagggagatcacctgaggttgggagtttgagaccagcctgaccaacagggagaagccccatctctactaaaaatacaaagaaaattagccaggcgtggtggcacatgcctgtaatcctagatactcaggaggctgaggcaggagaatcgtttgaatctgggaggcggaggttgcagtgaggtgagactgcgccattgcactccagcctgggtaacagagcaagactccatctcaaaaaaaaaaataataataaatatgttcaataagaagagggaagtcccagaagacagagtgagactgtgatgccttttttatattgttcaaaagcaaacaaaattaaacattgtttaggcatatatatgtgtattatgtgtgtgtgtgtgaaaactaaaggaaaaagaaaaaacaaaagaataataactcaaattgcaggatagtgattacctccaaagggaggcatatagttagatgtaagtcactggtaatgttttaggtttagaatttagttctttgattgggtctctgggtattcattgtcttattaaaaaataataatgaggctgggcatggtggctcacacctgtaatcccagcactttgggaggccaaagcaggtggatcacgaggttgggagttcgagaccagcctgaccaacatggtgaaaccctgtctctactaaaaatagaaaaattagctggacatggtggcaaacatctgtagtcccagctactcgggaggctgaggcagaagaatcacttgaacctgggaggcggaggttgcagtgagctgagatcgtgccactgcactctagcctgggcaacagagtgagactccgtctcaaaaaaacaaaacaaaacaataatgtgttatgaaacaaagattatgattaatccacacagggcaagtgaccaacacatatttattgaatatatgagtgaatcttactctgtgtgcctggcatccaaagtggggttagggttggaatagtctttttgatttgtctggattcttcactttttatctttgtctcagcctaagcatccctctgattaagttcttttgtctttccgagtagtgagattctcatggttcttggtgcccactgagattcttcttttctgttttctccctatgccctccctttctttctcttttctccccctggcctttgtttactaccaagtgcctaaatacctttagttaccagatgaagccagaaatctctgttgacctctcgtctttcttcatcacttaaccgattacataaagatatcatagacacctttcatctccctctctcaaagggtaattgattatagatacaaaatgcagttgaattttactattggagttagagatcatctaatttaatcccttattactttacagataagaaagctgatatacagaaaagttaaa

SEQ ID NO: 14259 - DNA, 2300 bp, Homo sapien
aaaaatcagagagtgggctgggcgcagtggcttctgcctgtaatcctagcacttcgggaggccaaggcgggtggatcacttgactggagtgaggagttaaagaccagcctggccaacatggtgaaaccctgtctctactgaaaatacaaaaaattagccaggcatgttggtgggcacctgtaatctcagctacttgggaggctgaggcatgagaatcgcttgaacccaggaggcagaggttgcagtgagccaggatcgcaccactgcactccaggctgggtgacagagcgagactctgcctcaaaaaaacaaaaccaaaaaatcagagccaatggtgtaagttctagtctgaaagcctgaaggcttaacatccaagaagagccaattttttttttagttcaaatccaaagactggaaaagactgataatccaattcaagcaatcaggcaggaggaatacctacaaactctacaaactcatggcggggtggggcagaggagtcagcctttttgttctatttaggtcatcgattgattggataaggcccttccacattagggaggacaatttgctttactcagtctgctgattcaaatgttaatctcaaccagaaacaccctcacaaacacacccagaaataatggttgaccagatgagtgggtacctcatggcccagtcaagttgacacacaaaattaaccatcacaagtacccagcatagtacctcactattactgtcattactatacagagttctttatatatgatatttaatcctcagaacatctctatgggggtgataggagttatcttcacttgcataaagggatgctaaaggttctaagaggccaaataacttaccctgttactcccagctggtaaaagagaactagcatgtgcccctagaactgtctgacattaatgctctttccatgacatactattgtttcctagggcctagacttttttggtacatctagccccttttcatcacatcttactttcctctacttttctttatttggttcttctcttcccattgattctccacagaagaagaattatgagcggcttcagaaagctctggatagtgtgatgtctattcgggagatgacccaggtattctgccttctctctgtcccctctcctttgcctgcccagttcaagtgtcctattctgttggtaatttgtgggagtgggatgaagatttagagatgctacgcactgtattttttttttagtctttcctctttaaccttcccaattcctgttctctgttttgttagctctgttactcctctttattctctttagtctttgtgtctcaatctttacctttgctgttaattcctttacaagttgttcatatttaatgttttgccataattcttagggagttaagaagtgaaggaaagacctctgcccagggttgggagggtgaggaggaggggggcttgaaggtaaggaactagacacaggggcctacatcttctatccttctaggggtggggcagccacatggagcggtgaccatcctttgactcaaggctgtccctcaccagacttccccacccctcgtctgcaatctctgcatgaatagacattcatttgtactcatttacaggtgggcctcttctcagcaaatcctgtatatcacagttgagatttacacataagatacacctaggaggaatgatttacttgtcaggaggacgctttgcattatttaaagatttaccacaggattccttagcctaatcttcttgggacattgattttatttattttttgatttataatcaactttttagggctgtaggaattgcataaaatgagggagacccacctgcatgttgttttgtaagcatcttcagtcattttcatatttatttatgagtcttcccagcctgactagggctccttgagggtgggaaccctatctcctttttcctctgtgtggcctttggtgcctaccttgccctggaccctaatagtcactctgtgaaaagcagaaagcaggtaggctcccacctctccaaggagataacgttatggccattgtcttacagggctcatatttggaaatcaagaaacagatggacaagttggatcccctggcccatcctctcctgcagtggtatggatagaatggctcatccttcttgggttatggggagggagggagttattggacatggaacctgtaccttcttttagtggtggtttcaacatccttcccaaggttataggcagtaatgggtgctttttcttggagtttgttggcataccttgccttgaaaa

SEQ ID NO: 14260 - DNA, 2300 bp, Homo sapien
ttctgaattgctttgcttccagaactaatggtagaaggaaagaaggcattgttcccatcttcaagaaactgacagcattactagaaagacaatacttaccacttatgatcaagtgccaatgaggcaccgccaattttaagtgtatgagtgtcgagactcatatgacatgagatgagaatgagattgacactaatttccttaatgattcccaatagcccttgctcaaatgatctttagtattcttcacagaccccctttcactgctcagctactactggtcatttgctttttaaaatctctttattccctgggcatgctttcacttttgcatctctgttaacctttgttcatgtaattcttcctatcttcctcttgctatcaagagtcagatggcaccttttccataaaattgccattactccaatgcattaactagatgtgatgtctcccctcactgaactgttacgatttgtttttgtttcatatggcacctgtgtgtcacatactatgggctgccttgaattgttattaatttataaacatgccacatctctcctattgaagttcagcttctgagaaaacaacctttaattttatttcataatcaagaagacctttcacagagctgggtacataatgggcattcagtaaatctgcattaaatgaataaagtctcttgcatgtcccattaccagcctaaaatcatgtgaaaggggaacaacttgattgatgcacaaaagctatgttaagacagggtgtcattaaaaacaaacaaacaacaacaacaaaaaaaacgctgtaggatattgctgcattagctctggattttcctatcttcctagcacagaattgtctgtagttttgaccagtggtctggctaattgttctaggtagttgaaatggcttctcaggaccttctgccatctaattgattgaatgctctcctatcccagagggacagcctataattacaagtacttttaatagtttgattagcatccattttatatttttaaaatgccttcatggacatcatctcatttcttgcaatacccctatgaggtgaataatgctgtgctatataaacaaagaaaccaaggctcaggttaactgacttgcttaaagttatatatgccattaagtattagaagtacagtgttaacccaggtcttctcaatcaaacatcatgttcttatttttactataccatacagtcttagctctgcagtcaggccatcagtttaagtacacagcctaagaatatatcctaccttaggcacggggctgggaggatggagggtagttggaaaaaaaagctgaaattatttcccatatctgtgtgtgccagtacttccaaaagacttagaatctgttgttttctcagatcatgaagtatgcagaacagaggattccaacattgaatgagtactgtgtggtgtgtgatgagcagcatgtcttccaaaatggatctatgctgaaggtataggaccgtactctatgaccctcttccttaaccaggtccccttcactcctctcctttatttccttcttccttggtctgtggtcaaggtaaaattctgtctgtacaccctgatactctagaaattgttgatttttctcagaaaacaagtctcagcagtactgtttagagagatgaggatatgagaatatttatttaggatagagtccacctgacatttaaaaatggggatcagatattgaccaagatgattggatatgatgctgtcctcaaggactctaagtccagatgggagacagacaaatcacaatgtatggtaagtttatagaagagatattagcattgttaaaaatcaggtgagagaacatctgacttcataggaagatcagggaaggcttcataggggagacagtgttaactcccaaacttatcagtaaggcattttaattaagactttattggtagttttctcctgatatagagggcctcaaattcctaccctgttttagagttgtctgaggttaggactgtccctctctgcctacaccttattgcacaccccatcccaccaccatctgtttaatatatcctttcagccagctgtctgtactcgtgaactatgcgttttctccttctacacactgggcgtcatgtctggagctgcagaggaggtggccactggagcagaggtatgggggagggaaacgtggctggggaattgggatcaagaaagacagaggaacccagcaatttcattcttggaatttaacttccaaaaatgcttttgtatataagataaccactgtagtattgtttgtaa

SEQ ID NO: 14261 - DNA, 2300 bp, Homo sapien
cctgtattcccagcaatttgggaggccgaggccggtaggtcacctgaagtcgggagttcgagaccagcctggccaatgtggtgaaaccccatctctactgaaaatattaaaattagctgggcgtggcagcaggcacctgtaattccagctacttgggaggctgaggcatgagaattacttgaacccaggaggcggaggttgcagtgagccaagatcgcgccattgcactccagcctgggcgacaagagcgaaactctgtctcaaaaaaaaaaagtgtattgataaatacgtgtgcctgtatatatacaccacccagctattaagtggtgatgaaacccattattatctactttccacaggacagtgacttgttaccaccgcaacagcagagcctgccatccccaacagatcaccagttgtccctgacatcgtgccctaccttgtctccctttgtggtctcctaaatgcccatctcgttggccttggttcggctagtggtatggaggggtgctgcctagcactgacctgagagtgtgtgtgacccactgacccaatggtgagaactgactgcccacctctccaactgattgttcaaagggtagaggagacaaagtgcagatctcaccctttcttggtattttcccttctacccttttggaagatagagtggctatttgaagttaaaggaaagggaaggggcacagaaacagtattacttggtgtgtttgtgtagtgggttttcttggggagggagaggagagttaagtactttaaaggatagaaagaaaataatgagacaagagagtttaggtgtgcttgggaactgtcttaggtaatgatcctggaagaggccagcttgtactggaacccagatatgcttaggagtcaaccttgacattgaagtcatttgcatttctttcctactggctaccagagcctctcagtcatcatactgagacttcagaaggccaaaattccctagatgttttcctctgtcccactaagagctagtttatggatatgatcatatcaggaagagactgagactctcacaaagggtgacatgaaaggtgtaaagggatcagggcttcagttattctatatttcccaatctttgtgggaatctgttcctcaccatatcatcccacgcctttccatgggataatagggacctaacaaagcatgatatccttatttctcaccactaggacatcaaaggccagttctggaatgatgacgactcggagggagataatgaatcagaggaatttctctatggcgttcaggtgaggttacatctcccaagacccccgtgttggatggtctagatatgtgctgctttttggatacatcaggagtgaaagaggttctggagcacagatgagatgaggttataatgttgatgtggtctgagcatggtcttgtcagagctgatcccgtgcccttgctctttctttggagtcatacctgttccagagtaaactacatcctctgtatgtggagactacccatatcttaattagacataattattttctgacttttataacactagccagtgggggtagtttcattcattagggtcacatcttaaaagattactctgccagcgtttgcttaatgccatcactacccagggcacagtcctgagcagaagtacccagactctcagaatgctcttcacttagaaccaatcttaggaaacctgtaactcttcagcctgttctgagttgtcatagaaggtatcctggtcaaggtctgagagaaaagctggagatttaaggaagtgaactccaagcaaaagcctacatttggtctgctgaacctttttaaagtcatgatgagatggagacctctgttaatgaaatcccttgctagggtcaccactgagaaccccttcacataagtggcttttacttcccctatactgctgtctgatttctcctgttcctggtgtcttttcatattctttttattatctctctctttccctcgtctttttccacctctctccaccaccatttttgctgctatctcaggggagctgtgcagctgacctgtatcgacacccacagcttgatgcagacattgaagccgtgaaggagatctacagtgagaactctgtatccatcaggtgggactctacttcaggggtggcaggggagcaagtcacttctttctgagttgttaaaaggctagaggtttttctttttatggtatgatagtgggataaattatgaacttaatgatagaaaatgctcagaataaatgagcttggctgagagtagagagtaaggcca

SEQ ID NO: 14262 - DNA, 2300 bp, Homo sapien
tctgtttgaggttggagtagcttcagctgcgatgtgtgcaaagccagtgacttgctggtctagagagcaacagaaagcttttttagcctgcttttagggtagatttgccatcttcagccattaaagccttcataatttcacagatgagttttttgttttgttttgtttttctgctatatgtggaggttttaatggagctaaaagttgctggtataggattaggagtctgtgggattagaagcgagcagggaattgtgtatgaaagggctctgggttaagtaaaagtttttctaagcaatttttgggataattattgcatttttctttgggaagcaggttccaagatgactttagggcattattttggcaatgacaactgagaccataactgccaaaagatgttcagtgttgttgaggactttttattttgagatggagtttttgctcttactgtccaggctggagtgcagtggcgtgatctaggctcactgcaatctccgcctcccggattcaagcgattctcctgcctcagcctcctgagtagctgggatcgtaagcgcacgccaccacacccagctaagtttgtatttttggtagagacggggtttcaccccattggtcaggctggtcttgaactcctgacctcaggtgatctggccgttgaggactttttaagttagctattgttgccgtataatagctagtaatactgatgtttaaagagagatactggctaatatggagaaataactaagaataaagagtccagaaataatccgattctgaatcttaactctggtgtgagttggtactctgaagaattaactgacagagtaaacataagcatcttgtcctgccaccatcacttttggctttaggagttgtaacattatgagctagagcaggatcttgctctaatcccagctctccagtttaagtagaacagcagtatcttgcatatagtgcttttgtgtttcattatctataaagaactgcatgtgcaagtgtgcatgtatatgcacgcaagcatgtctttttatatgcaagtatctgtatgtataataaaagtgtattaatagccaggtgcaatggctcacgcctgtattcccagcaatttgggaggccgaggccggtaggtcacctgaagtcgggagttcgagaccagcctggccaatgtggtgaaaccccatctctactgaaaatattaaaattagctgggcgtggcagcaggcacctgtaattccagctacttgggaggctgaggcatgagaattacttgaacccaggaggcggaggttgcagtgagccaagatcgcgccattgcactccagcctgggcgacaagagcgaaactctgtctcaaaaaaaaaaagtgtattgataaatacgtgtgcctgtatatatacaccacccagctattaagtggtgatgaaacccattattatctactttccacaggacagtgacttgttaccaccgcaacagcagagcctgccatccccaacagatcaccagttgtccctgacatcgtgccctaccttgtctccctttgtggtctcctaaatgcccatctcgttggccttggttcggctagtggtatggaggggtgctgcctagcactgacctgagagtgtgtgtgacccactgacccaatggtgagaactgactgcccacctctccaactgattgttcaaagggtagaggagacaaagtgcagatctcaccctttcttggtattttcccttctacccttttggaagatagagtggctatttgaagttaaaggaaagggaaggggcacagaaacagtattacttggtgtgtttgtgtagtgggttttcttggggagggagaggagagttaagtactttaaaggatagaaagaaaataatgagacaagagagtttaggtgtgcttgggaactgtcttaggtaatgatcctggaagaggccagcttgtactggaacccagatatgcttaggagtcaaccttgacattgaagtcatttgcatttctttcctactggctaccagagcctctcagtcatcatactgagacttcagaaggccaaaattccctagatgttttcctctgtcccactaagagctagtttatggatatgatcatatcaggaagagactgagactctcacaaagggtgacatgaaaggtgtaaagggatcagggcttcagttattctatatttcccaatctttgtgggaatctgttcctcaccatatcatcccacgcctttccatgggataatagggacctaacaaagcatgatatccttatttctcac

SEQ ID NO: 14263 - DNA, 2300 bp, Homo sapien
tgtttttattttagtggagaaggagtttcaccatgttggccatgctggtctcgaactcctgacctcaggtgtcctgcccacctgggcctcacaaagtgctaggattacaggcatgagcctcagtgcctggccatttctggagtttctaattcagtaggtcttaggaggagtctgagaatttgcatttctaacaagttcctagatgatactgatgctgtaggtccaccaaccccagtcagagaatcactaatctggaaacctgacattcagtagaactgtattagagacctgccaggcacagtggctcacatctgtaatcccaacactttgggaggccgaggcgggtggatcacctgaggtcaggagttcgagaccagcctggccaacctggtgaaaccccgtctctactaaaaatacaaaaattagctgggcatggtggcgggcgcctataatcccagctacgtgggaggctgagacaggagaattgcttgaacccgggaggcagaggttgcagtgagccgagatcgcaccattgcactccagcctgggcgacacagcgaaactctgtcagaaaacaaaaaaagaagaagaagaagaactgtgttagagaccaagaacacctctgtttgaggttggagtagcttcagctgcgatgtgtgcaaagccagtgacttgctggtctagagagcaacagaaagcttttttagcctgcttttagggtagatttgccatcttcagccattaaagccttcataatttcacagatgagttttttgttttgttttgtttttctgctatatgtggaggttttaatggagctaaaagttgctggtataggattaggagtctgtgggattagaagcgagcagggaattgtgtatgaaagggctctgggttaagtaaaagtttttctaagcaatttttgggataattattgcatttttctttgggaagcaggttccaagatgactttagggcattattttggcaatgacaactgagaccataactgccaaaagatgttcagtgttgttgaggactttttattttgagatggagtttttgctcttactgtccaggctggagtgcagtggcgtgatctaggctcactgcaatctccgcctcccggattcaagcgattctcctgcctcagcctcctgagtagctgggatcgtaagcgcacgccaccacacccagctaagtttgtatttttggtagagacggggtttcaccccattggtcaggctggtcttgaactcctgacctcaggtgatctggccgttgaggactttttaagttagctattgttgccgtataatagctagtaatactgatgtttaaagagagatactggctaatatggagaaataactaagaataaagagtccagaaataatccgattctgaatcttaactctggtgtgagttggtactctgaagaattaactgacagagtaaacataagcatcttgtcctgccaccatcacttttggctttaggagttgtaacattatgagctagagcaggatcttgctctaatcccagctctccagtttaagtagaacagcagtatcttgcatatagtgcttttgtgtttcattatctataaagaactgcatgtgcaagtgtgcatgtatatgcacgcaagcatgtctttttatatgcaagtatctgtatgtataataaaagtgtattaatagccaggtgcaatggctcacgcctgtattcccagcaatttgggaggccgaggccggtaggtcacctgaagtcgggagttcgagaccagcctggccaatgtggtgaaaccccatctctactgaaaatattaaaattagctgggcgtggcagcaggcacctgtaattccagctacttgggaggctgaggcatgagaattacttgaacccaggaggcggaggttgcagtgagccaagatcgcgccattgcactccagcctgggcgacaagagcgaaactctgtctcaaaaaaaaaaagtgtattgataaatacgtgtgcctgtatatatacaccacccagctattaagtggtgatgaaacccattattatctactttccacaggacagtgacttgttaccaccgcaacagcagagcctgccatccccaacagatcaccagttgtccctgacatcgtgccctaccttgtctccctttgtggtctcctaaatgcccatctcgttggccttggttcggctagtggtatggaggggtgctgcctagcactgacctgagagtgtgtgtgacccactgacccaatggtgagaactgactgcccacctctcc

SEQ ID NO: 14264 - DNA, 2300 bp, Homo sapien
tcaacctaacactatctcagttcatcctcaccacaacggctccgtgaaacacatattactgtctccacctcaaagaggagaaatcagattcacaaagtgaaagtcatcgcttaaggctgcaccatcaataagtgccgaacccaagcttcagacccagattgactagaaggccagggtgctctccatcacgctgcagctaccggggaacaaatgagttaaatgccagaatttttaaaagcccgaggtgttcgacttccattgtcgaaccagagaatcctgcagtcagcaaggcctcaggacttccctcagtctctacctgccggccccaacctccggcgaggggactccctcccggcctacaggcaacctgggttgcccttcctgcttgttcctcccaaccactcggggcgctaaatgcaagtattctcctttggaaggctccccgcactcccccagagtccctcttccttctccactgcctcccctacccacggcgcaggcgccaccccccactccgcaccctttcccgactagcgaccgccgcgcaggcgtctcaaggctggcgtcggctgctgaggcgcgcccaggagcaggccgtcaggctgttggtcaggagcgggccacgtgccatcgtgtcaccgcgcgagcgtgcgcagagtggctgagcgcgcccgtgacggaacgacgaggcgtggggtgcgcgacctcgcccgccaggcccggcccccgccccttggcctgccgctccgcccccgcggggcgtcccgggccgctcgtcccgtcggctgcggccgcgcgcggcccggggtcgccgtgagtactcgccaggctggcctgtgtggccgccaccacgggcacagggcggtgcggccgggccacgggaagggtgcggggctcgccccgtctccgcaggggtggacgaagtgagaggcttggaccgggaggttctgagggcccctcctaggctggacaggcttcactcaggcccggcggccgggcggcatagatcgggcccagagcgtctttcctggggaggcaggtgttgggtgtttttggggtcttcaggggagccccggagaacaggtgtaactgcttccccgggagaggcctcagggcctgtcctggaagcacgggtgccagagagtgttttcgcggggcagccgtgtcctctctccctgcggggtgcccgagatagcgctaacctgcgggagtcgcccctcagtgattcttcctagtagtctttgtttagtggcctactcctgagaagggagcacacgggatggagtggagtaacctcctccaggaccacaaagccgggagcccaacccacaatttaaacattgagctctgaagctgctttgactagacgtgaagttgtcacacctagagaagcgcccatggacctagggaaagacctttgtgatccagacttgaggctcatttacatttgacttattctcgtggaaactcataaagcgttctatattagccgctgagttttaacaccttctctggacactcatcatatagtctatttttggcccaacttcttttgaaagggcccattctttacctcatttagataaatcagataggtctttcttgcttacttcattaacaactcaattaattataaccacatcacatgaagattagatgtaattaggacctgtccaatgtctttacatcccagtccttctgtactcctaaccttaagcaaattggtcgacctctgtaggtctaagtattctgtgtgtaacatgaaagctttgaattaggccacgtttccggctaattttttaaaaagtgtttgtgatcctgtgaattccataacccaccaccttccttttccaactcttcaccttttaaatccactttccatctctccagaggaaagggcattgagagtagaggaagcaagtccctttcactaaagcagcctggtttgaaaaagccggtaatctctgaactgtctcttgcttgaacaagaaaaactccctctgaaatacctttttctccttgtgatagcaacagaaaccaagcagcaacagcccttggaaagaggctaaatttttcttgacttctgcagcaacaaagaccgtgaaaagttggcacttctggcctaacgctgccgtcatcctacccctcaccccagggcaacccaggctggacatttagtgcctccctctttattcctctgtgatcatccagatcagcacttgactgtttattttcaaatctcacgaacctcaccccaagatcttcacattctggatctcagctgctcttgaaggtgaagt

SEQ ID NO: 14265 - DNA, 2300 bp, Homo sapien
aatcccgtgacccacctagtgccctttcaacaaaagtctcatttaaatccacctgagtgacacacagttatagactggaactcccaaatctatatttccatcctgtacttcttcttcttttttttttttttttgacggagtctcgctctgttgccaggctggagtgtggtggcgtgatcttggctcactgcaacctctgcctcccaggttcaagcgattctcctgcctcagcctcctgagtagctgagactacagatgcacgccaccacgcctggctaatttttgtatttttagtagagacggggtttcaccacattggccaggatggtctcaatctcttgaccttgtgatccacccacctcggcctcccaaagtgctgggattacaggcgtgagccaccgcgcctggcttccatcctgtacttcttgagtttcaagttaactttggtcaagttgtcttttggacagctccacttggatgtcacataggcaaacatcttctcactgtatttctttcatgttcctaacttagtaaatctcacctatgacttattcagactgaaccctgagaagaaagcatcttagacttctcccatccttatttaaatggaaccaattttacctcataaactctaaattttacatcttaatacatcttcttcttctttttctttctttccaaactctggcctcctgccctctagctgcctaaaagcacagagactcagaaggcagaacaggccacacgcctgggtctggcttttcccaagggatatcttaggtgctgagcagaaaatgcaagaaactaaaaagcctgtggaatgagcctcagcctcctggggagtagtagacagggtctcaatatgtggcccaggctggtctcaaactcctggcctaaagttatcctcccacctcgacctcccaaagtgctaggattacaagtgcgagcaaattaatacatcttaaatcaatccctcctttatattcctattcctccctaccagaactatcgcattcgcctcctaatagactccttatccagtatctactcctgcaatctattctccacttagctgcttaggggatctttctaaaactcaaatctgatcatgtcactcctctattaaaacccttcaataggctgggcccagtggctcatgcttgtaatcctaacactttgggaggccaaggcgggtggatcacttgaggttaggcttcgagaccagcctggccaacatggtgaaaccccgtctctactaaaaatacaaaaattagccgggcatggtggcagacacctgtaatcccagctactcaggaggctaaggcaggagaaccacttgaacctgggaggtggaggttgcagtgagctgagatcgcaccattgcactccagcctgggtgaaagagcaagactccatctcaaaaaataaaataagataaaaataaaacccttgaatgtctctctactactctcaggataaatacaccctttctatagatataaccctatttgactctcaccagcccctcacatgcatcctacactccagcctggccagattatacattcttataggccatgcaggacatactttgtttttgtttgagatggagtttcgctcttgctgcccaggctggagtgcaatggctcgatctcggctcactgcaccctccgcctcctgggttcaggtgattctcctgcctcagcctcccaagtagctgggcattacaggcatgtgacaccatgcccagctaactttgtatttttattagagacagagtttctccatgttggtcaggctggtctcgaactcccaacctcaggtgatccacctgcctcaacctcccaaagtgctgggattacaggcatgagccaccgagcccggctgcatacttttatactttgtaagtattagtacttagtggagctgacaatcacaatgctacctcctgcccccttctaccccacacaaatggatgcatgacccatcaggccaggcaaaggactccatcatcctgaccaaagtgattagttcaggtgtgggtttgtgacctaagcaaagccaatcataatcttctgctcaaagctctcttgcttttgaggttaatgtgctaagaggatatgagattgaagctgctggcacccagctctccctgccacagggcagagaatggggccaaggcataaagagaagcagagctctgagaaatggaatgagagagacctgatgacattgtttgagcccctgagatgagccttgcctgaggtcagtaataccaccgcatttctcagttctcatct

SEQ ID NO: 14266 - DNA, 2300 bp, Homo sapien
agccgggcatggtggcgcatgcctgtaatcccagctactcgggaggctgaggcaggagacttgcttgaattgggaggcagaggtttcggtgaggcgagattacgccattgcactccagcctgggcaacaagagcaaaactctgactcaaaaaacaaacaaacaaaaaaaaacaataactttttatatctgaggtatctactaagatctagcagttgtcattttcatcacaacgctgcaagttaagatcatgattccctcttcactagtgtggatattgaggctcagagaccttagagaagcaagtggtagagccaggattgaaatccacatctatctgctaggaagcaatttgctctaccatggctactcccatgccaagtgctcactagaaactttgctccttcaggcttgcagctccctgtccgtaccctagccattgcagctccctgtccgtaccctagccattcagcgtgctcagccaccactcctacctctcctattatctctacatggccaatgaccccagtcctgcaaggctcaggtcaaacattgcctcttctatgcagctttcctcagtcaacctcttcagctggagtctgcctcttccacagctcttgaccttgcactcccccgaggccctggtccctctgtgcctcactatttgtgttcatgccttaagaatggatttgagcagcactccagtgcaaaaatcatgggcttcagcctcagacagatctgggggtaaatcccagctcaaccacttacccaccatgggatcttagacaagtgatttcacctccctcagcctcagctttctcatctatgatatggggacacttgtattcccttgaagagtggttggaaggatttagagacaatgtatgtaaagtgtcccaggaagggcctggcacagagtgggctctcaggaaatggtaacattatcttcccctctgcgagcctatgaagagaggatccccatacagatcatcactgtctcccacgaaaggctgcctggggctcatcacagagttcaggaaatgctggcagcatgcctgggtggtgggaggcctaggtcaggtccaggggggaacatgtatgtaccacccgatgcccactctctgttgaagggtggggaagtgggtgggaggagagaaggtggcgtcccccagagcaccatctcccaggaaacccagccagggaggcagctgccatggaaactgctgctgtcacgtgtgctcgtcactctaggctccagagagaaattctcaggatctatttaagaactaataaaataatgatggtcttgctcaccctcactgccccccaccccaggcttctactcttttggccttcttccctaccaggctcctccctgcctctcctgcacccgcttccttacccttcctctcctcatttccttcccctctccaccagtaactctctttccttgcccctttctagaactgtctttctctcacatcatttctgtctgccagtgtttcttcatctctccctgtgtctctgctctccatggctctgtctcttggtctttcctccacaatcacaggtggccatgcccagggacgggtcctgtcctcctggtccctggtccaggccagtccagacctgtcaagctcgccctgatctgcttggattgatctgtcatcccctctagactgcaacctgagtcctgttggtgtctccgcccccacccacagcctggtacactgcaggtgctccaccaccagcgggtgggtgtgtcagagccctgggtgggaggggagttgcgctggttcagacttggcctgttctcttttccttttttttttttttttttagtaagccctccctgcccctcccacccccaaatttgatccaaaggaaattgctcaactgtgactgccagggcgttaccatggttactgggtagcacttgtggctatggtaacaggaagctgcctgttgtctcggcaacgagcaaattggtaagggatggagtggcccctgattggtgcagaagcagagcatttcttgaggggagggggtcagatcatcaccttctcaggccagatgggcatcagtaccccttcctccatgaacgggaaggccgctgtttttccctcctggcactcagctgcctgccccccaacaataattcctcacctcccacgcacccagctcttggcagtttacaaagaccttttgcgtccccattacctcatgtgatccccacaacacccatgagaggaaggtgagatggggattcaatcatgaattcactcagggtggttgggggatg

SEQ ID NO: 14267 - DNA, 2300 bp, Homo sapien
acgatcttggctcattgcaacctccacctcgtgggttcaaacgattctcctgcttcagcctccagagtaggaggagcccgccaccatgcctggctaatttttgtatttttagtagagacgggatattgtcatgttggccaggctggtcttgaactcctgacctcaagtgatctgcccgccttggcctcccaaagtgctgggattacaggtgtgagtcaccatgctcagccagaaaaataaatcatttaaaaatcatgatttgcttctgaattgaatattgttttaagaactttttgatgattccagttgctactgctggtctccagcagtttcttagaatagtcaatggacacaagttatgttaaaatctctattaggccaggtgcagtggcacactcctgtaatcccagcactctggggcaccgaggtgggtggatcacttgagctcaggagtgttctagacaagcctgggcagaatggtgaaaccaccatctctacaaaaaaaaaaaaagaaaaaaaattatccaggcatggtagcgtgcacctgtcatcccagctacttgggaggcttaggtgggaggatcgcttgaacccaggaggttgaggctgcagtgatcttagatcgcaccactgcactacagcctgggtgacagaatgataacctatcaaaaaaaaaaaaaggaaatctctattaaaataattagcaattttactgaaagaggcatgaaaaatatattatggaataaatatataatttatgaagtatgtgtctttgtccaaacattgtattactactttgtgcaaacatcactgatccatcaagagaatacctagacatgtgcaggagtaataaaattccatcagctctgatattttgccaactttcagtcatatagaaagcgtagctgtacatatgtctttcattttcgtaattctgaacctgtatttgtgaaaataagaggggaacatatttaacaaattgtaatttgatttgtatcttttaaatgtttagatgcacagtatgtcgatttccatttcttattttgcgctgggcccaacaaatgttggggtgggcctggccctaacatcctcgaccctcagaacctcagcttccttttccggaaaaagagaacactcctgagttcacagaactgggatgaactgggcacctggtgcataatgggttctgagtaaatacggctaagttccctcactctcctaaggaggaatccgtgttcaaggagtgtttaaggggtttttattttattcttcctttctttttaaggctgcaagggagacgaatgtgtctgaggctcaggggtaagaaagtggttaaagacaccgaagacagagatgtgtgatggggcggggtgggattggctccgagggactggctcgatagtgggaatagagaagaggaatccccatccacccccgcaggaaacgcaccagcgtttggaggtgtgtgtgcctgcgtgtgcctgcgtttgcctgtgtgtgcctgtgtgtgcggtggggattagccccgactccggcagacaccatcacgcatgacgaagctgcttcccctcacgcggcccaaggcgcacacgcgcgatccacggccacgcccgcacacactcgacacacacagggcattcgagggtccggttgccatggcgagcaggagcgcgtgagcccagccgccccccccgcccccggcgagcccagtcaactcccactctgattggcggctgcttcctcattatgcaaatcatttgcgtagactcggcggccagctgcctgacgtcaccaagcacgggggctggggctcggggctcggctctgggagagctcgggcgggagcccagagagagccgcacggggacctcaagccagaccccagcgttcagccgccacctcggcccgggcccgccccgccccggccccgcccctttcctgcccgccccaccccctctacgcccctccacccggaccccgccccctgggcagccccccgccctctccgcccgggctccgccccctccccctggccctcgccaccggtccagggaggggacggcgggacaggcgggaccagtgggaccggcgggagggctgacagggcggggacatggccgcggcgccgggagggtcagcgcagcccgctggccccggcccgcgcctgggtttcagcaccgcggacagcggcgtcggcatgagcgggctaaaccccggtcccgccgtacccatgaaggaccacgacgccatcaagctcttcgtggggcagatcccgcggggcttggacgagcaggacctca

SEQ ID NO: 14268 - DNA, 2300 bp, Homo sapien
tgagaccccatctctactaaaaatacaaaaaaaatagctgagtgtggtggcaggcgcctgtagtcccaggcttgggactgagggtagcaaaacaaacctcaacaaatgcaaaagaattgaggccaggctcagtggctcacacctgtaatcccagcactttgggaggctgaggcaggcggatcacctgaggtcaggagttggagaccagactggactacatggtgaaaccccatctctactaaaagtacaaaaattagccgggcatggtggcgggtgcctgcaatcccagctactcaggaggctgaggcaggagaattgcttgaacccgggaagcagaggttgcagtgagccaagatcacgccactgcactccagcctgggtgacaaaagcgagactccatctcaaaaaaaaaaaaattgaaattatacacagtgtgttctgaccacaatggactcaaactagaaatcaataacagaaaaataataggcaaacctccaaacacttagaaactaaacaatacatttataaataatatatggatcaaagaggaagcctcaaggaaattttttactgtatttttctttttctgcagagaactttgttctgatttttgaattgttttactacttttggggtgaaaattttaaaaaatacataggactgggccaggcatggtggctcacacctgtaatcccagcactttgggaggcctaggcaagcagatcacgagctcgggagatcgagaccatcctggctaacatggtgaaacgccatctctactaaaaatacaaaaaaaattagctgggcgtagtggcgggcaaccgtagtcccagctactcgggaggctgaggcaggagaatggcgtgaacccgggaagcggagcttgcagtgagctgagatcgggccagtgcactccaacctgggcgacagagcaagactccatctcaaaaaaaaaaaaaaaaaaaaaactacataggactgaatgaaaatgaaattccagtaacccatttcgtggtcaacttattacaaggagtaactttctgttaaaggagaaaaataatttattttatttatttattcatttagtaaaaatggggttttgccatattggccaggctggtctcaaactcctgatctcaagcaatccacccacctcggcctcctgaagtgctgggattactggtgtgagccaccgcatcccgccagaaaaatgatttttgaaaatcataatttgctgctgcattttttttttttttttgagatggaatctcactctgtcacccaggctggagtgcagtgacacgatcttggctcattgcaacctccacctcgtgggttcaaacgattctcctgcttcagcctccagagtaggaggagcccgccaccatgcctggctaatttttgtatttttagtagagacgggatattgtcatgttggccaggctggtcttgaactcctgacctcaagtgatctgcccgccttggcctcccaaagtgctgggattacaggtgtgagtcaccatgctcagccagaaaaataaatcatttaaaaatcatgatttgcttctgaattgaatattgttttaagaactttttgatgattccagttgctactgctggtctccagcagtttcttagaatagtcaatggacacaagttatgttaaaatctctattaggccaggtgcagtggcacactcctgtaatcccagcactctggggcaccgaggtgggtggatcacttgagctcaggagtgttctagacaagcctgggcagaatggtgaaaccaccatctctacaaaaaaaaaaaaagaaaaaaaattatccaggcatggtagcgtgcacctgtcatcccagctacttgggaggcttaggtgggaggatcgcttgaacccaggaggttgaggctgcagtgatcttagatcgcaccactgcactacagcctgggtgacagaatgataacctatcaaaaaaaaaaaaaggaaatctctattaaaataattagcaattttactgaaagaggcatgaaaaatatattatggaataaatatataatttatgaagtatgtgtctttgtccaaacattgtattactactttgtgcaaacatcactgatccatcaagagaatacctagacatgtgcaggagtaataaaattccatcagctctgatattttgccaactttcagtcatatagaaagcgtagctgtacatatgtctttcattttcgtaattctgaacctgtatttgtgaaaataagaggggaacatatttaacaaattgtaatttgatttgtatct

SEQ ID NO: 14269 - DNA, 2300 bp, Homo sapien
aaaagtgaggttacagaactcaggagggaattagaataaatgaaaagttatttcagaaatgaagtctattctagaagtttcactagcaaaaatgacaatggataatatcttcagacaaatagaagattaaatggaggtgatctgccctctttggcctcccaaaatgttgggattgcaggtgtgagccaccgcaccagccatggaggattttaaaaaaatatatttttaaagaagaaagagataaaaaaggatttgggagaaagtgatcaaaaaacaaaacaaaaaacaagataggcagaagatctaacatatgtatgacaggatttcctgaagaggaaagggaaagcaacagaacagaacatacactaaaactatactttcataccttttttttttttttttttttgagagggagtcttgatctgtcgcacaggctggagggcaatggataatcttggctcactgcaacctctgccttccgggtacaagtgattctcctgcctcagcctcccaagtagctaggattacaggagcccaccaccacgcctggctaatttttgtatttttaatggagacggggtttcatcgtattggccaagctgttctcgaacttctgacctcaagtgatctacctgcctcggcctcccaaagtgctgggattacaggtgagagccaccgtgcctggcctaacagttttttgttctttgtttttctgaaataaaaaagcttcaaactacaggttgaatagacacacatgtacctggggtgaacaaacccggaatggccaatgcctgaagagataatgatatgttcagtgccagtgctggggccatgttatgcaaatgaaccaaagatgacctctgtatattggccctatgttgtttacttcttcagagcaggctgggactcattagctcaaaagcccattggcaccaaactcaaatttttacatatccaactattttaaatttagcccaaatagaatggccttcaccattgttctgatttaggctgagatagctagacctttataatcctgtattaattagtcattggatttgggctgccctgggaaggggcatgaccttgaggcaaactctgaaggggacagcactcccctaaactataacaacacattcttcactgaagggttgggggaagggaggtcttgaccatcacatcacaatggcagcacatcacaccacatgggagaaagaaaataactgaggaaacaatgactgacagtcctctttaattgagggaaaacataaatgtgcagatttagaaagcacaagaaattttaagcaactaaacacatccttgtaaaagtgaagattgccaaaagaaatcaaaagatcttaagagcagtcagggaaacaccagctacctgcaaattgactgccagttgatgtctcataagcaaaaatggaaaccaaagtatggtgaaataatatcttcaaagtgaagtaagagaaaataattatatatttactaagttattattcaagaagtgattcgaaataaaagcatttccagataagcaaagcagagcttatcgccaacagtctcttgactaaaggaacttctaaagcactaattcttaaccttgcttccacacacattggattcaacaagggagttttaaaacatgctgatgcctgagtcccaccccagcaattctgattcaactagtctaggctatggatgtaacaactccatacatagacccttctcccacctgctattaaggtgtcatcagagaatgtcaaatgaggagctaggacttgtatacccacccagcattaacagatacacctcttatgggttcagtggagaccgcatgggactcctctcccttcttgatagagcagtatcataggagtctctagttggaagcttccactcctgcccagcagtgaggccaccttccctttcatttgaggtggtttcagcagagacctagtaggaaaccttaacttccatccttatctcacaataaccaaggcagtgtccttgtttcctcactagctgggggtcaaaggaggcctgctaaacatgtttaaattagatataacgtttaaatgagatccagaatctcataataaaatacccaaaatgttcaggaatcaattgaaaatctctcattatactaagaatcgagaatatctcaactttaatgagaaaagaatcaataggcactaacactgagataacacacatattagaattacctgtcaataatttttaagcagccatcatgaaatgcatcataagtacttgcaaacacacttgaaacaaat

SEQ ID NO: 14270 - DNA, 2300 bp, Homo sapien
gcagaggttgcagtgggtggagatcacgccactgcactccagcctgggtgaaagagtgagacgctgtctcaaaaaaaaaaaaaaaaattgtatgtaattctatgagctcctgggaaaaatgtagaagatgagctgctccaagactcaaaaaataacagagtgacttaaatctaccttacaggctactgtagatcaatgttcaggctgtttccagggatacaaatgtttaggggaattggcttcattggcagagctaactatatttgtttttgagacagcgtctcaattttttttttttttttttgtattttttgtagagctggggtttcgtcatgttacccaggctggtcttgaactcctgggctcaagcaatctgcccaccttggcctgccagagtggtagaattacaggcatgagtcactacacctggccggcagagctaactttagttagaacaaggtcataggagagagacgttcaaagccttaacttggggccaggtgcagtggctcacacctgtaatcctagcactctgggaggccaaggcgggtggattgcccgagctcaggagtttgagactaacctggccaagacggtgaaaccccatctctactgaaaatacaaaaaattagccaggcgcgatggcgcaaacctgtagtcccagctactcaggagtctgtgatgggagaatcacctgagcctggggagatcaaggatgcatgaactgtgattgcaccactgcactccagcctggacaacagagaccctgtctcaaaaataaataaataaataaataagtgaaggaaggaaggaggctgaggcatgagaagcacttgaacctgggaggtggaggttgcagtgagctgagattgtgccactgcactccagcctgggtgacacagcaagactctgtctcaaaaaaaaaaaaaaaaaaaaaaaaagcctttcctggggaagttcctaactctcttgagtttaatgtgcagtcttatctgacagttcccaatccagttcctgtgtctgccttttcctttgctcctgtgacggaaccaaaggaggccacacatctgccagcctttgcttctgagattatgagttaagaggctactaagttcccaggaggtctcacagttgggcttaacatcagtcagacaaccgaacacaaatggcaagaggaagtattgatcttcaggcttttggaagattccaggctaccacagtagctgcagccctcctcttaatgtggccagaatttatttcaagaagaggaaagaccacttctatcatccatctttggatgtgttctgggaaaagtagaagtgtgctgggccttccctccatgccatccctccctgatgggaaggtttgatagaccccataaatacttaattgagagctgaggcaggtcaagcctgtaggggtgtgtggagcggcctgagagctcgcccaacatcgcaagtttgaggctgaaaccggagagactgtgatgggttcacagtgtgcactttaacctacaggatgtcatggcgtacaataaattgaacgtgttccactggcatctggtagatgatccttccttcccatatgagagcttcacttttccagagctcatgagaaaggtatgttcccgtttcactcagaccaagtttatgggtcaatgtctgaatctggctgtggccctgctggcaagaacagggtctctcatcctaaccagccagttttagaccaatataggggaaggacactggatttggagtcaggagacttgagttcaagtccaaaactttgccgataatttgccttgtgaccttcaggagagaatctcttctggccttattccctttttatgtatttatattctgttaaatggacatagtattaatacctaccatgattatctcactggcattatgatactcagataaaacagatgtgataacttctgggaaattatgatcaagttttttgaagatagtccctgacaccaaagggctatgggcaggttttctgatatctggggagtcttgtgggcattttgagtatcttctactctgctagctttcaggaagtgtgaacctgaagggtgtcttgtgcctttcaggggtcctacaaccctgtcacccacatctacacagcacaggatgtgaaggaggtcattgaatacgcacggctccggggtatccgtgtgcttgcagagtttgacactcctggccacactttgtcctggggaccaggtaagaatgatgtctgggaccagagggactctgcttgttatgctcagagtgaagcttcagggcact

SEQ ID NO: 14271 - DNA, 2300 bp, Homo sapien
gagattccagtttggttctgaattctctcattgccttctgccaggccatcctatccctgacattgtagtgccataagaagtcatggatgttgtgatgccagtgggatgaatatggctccaggaaagaatagaatagagaggggttcattaagttaaggcttggggctataacaccagagccaccctgaaaatcacagggaagaaccagcaggagggtgagaagagacagtgtattcatattttggctttggcattttttctgcatagacaagggtctgtaaagctatattagatactatgttggttcaaccctccactattagggtaaaatctaccttggatagagaacctgtttgggaagaggaaggaaggaagcaagatgggtgggtgaccctgatcttctctgaggtatcagttgcatcatctcaggcctcctctgcctgatccttctgtcatctgctccattagctcctaggcttttgcaaaactggaaacccttcatctggagccctcaagagcagtactacttaatatgccaatcttcaatgagataagaagcatatgtaccagaatgtaagactgatctcttcatcaagaaaatcttgtatgaaaaaatgttagaactagacagtgtgtttactctgacataattgatttacattcaggcttcatataagttttctatatagtgaccagccagtaacacagtttgcaaattggcagctaatctgcagaccatacttggagtagcagtgctctagagctgcctttcattcagaagcagttgttgaggtcatggagttgtttgtttggtacaggccaagggcagtcagaaatatagagccctggttaagaagagctgtcacccagagcattcagacatgggtcagggcagctactgaggagaagaggggcacaacgagagtgagacagctgaacagatgatcaggcactgcctatgccaagggtaaatgccatgtcctccctttcctttaccacaggcgtgtgagctgagggactagagctagggtcttggttttgcctgttgcttctaatggcaggttggccgcaccaagcttaccctgtcttcctagggaaacggcatacactggagaagaatgtgttggttgtctctgtagtcacacctggatgtaaccagcttcctactttggagtcagtggagaattgtaagtaccatcctgttccctgtcttagaagagcaaacacttgtctgaagctgtaactctggatggcctggcctaaactgctgatgctcggcctggagtcccccttgaccctggggaccgagggtcaccaagtgctgagagccatggaagatgagtttttcctatgcagaaacttaaccagtgctaaaggttggctgtggaacatcacactggctcttcactgagtcccacaggacttctacctggtgtactgaatacatttctattttaggaaagtgtatactttgctacttttctctaatagaccctacactggggaaagcaggggttctggtcacttatactgagatgaagttaagtcattagtccagtgactgcctcctgtcttccctgagcagcatttggggacttctcagtctccaaagtgaacagttgagtttggctccttcctcacattcttggaggaagtagctgaagcatagaggaaggggaaaggagggtgattacaaaggcattgggagcatcgcgtgctgcactcacccctgcaggcatccctgttccctttgccaggagaagacttctttcatctttctgctgtggaaactgacccatgaggtaggtggtgctttgtacagacctccactccagcctgactcttgctgtacatcatcatccagggtctacagagtcactgtggtgaccaccctcccactctggccccagaccaggccatcctacagctgtcttgctctggggacatctcctcattgaaagattttttaaaatatatggtcttactgttttttttttttagtccagtgatttatatagaatatctggtctataatctgagaatagaaaaccttaaccaactaaatgagttcatttctgtcatttcagataccctgaccataaatgatgaccagtgtttactcctctctgagactgtctggggagctctccgaggtaacaaattggggctgattaaaagagagagagaaaggatgatgtgggaaggttggtgttggtggagtgcagtggcccagtccctgctcactgcaacctctgcctcctaggctcaagcaatcttccctctttagcctcccaagtagc

SEQ ID NO: 14272 - DNA, 2300 bp, Homo sapien
taactacttgctatttatgcctgattatcacatagcacaatcataaaatatgcattttttgaattccaacatcattcattttttcagcaaacatgtactgaatgactgctgtgtgtcaggcactgggaatacaaagacactgagattggtccctcctgttgaggaactcacaacctaggtgaggagatagacaaataaacagcatatcttaagaaaagtgttttgaaaaatgtatgtatacattgctgcatgatcacataggagggtttcttaggaaagagggggggaataacagaaaagtttcctaaaaggaaaatagagctgtttcttaattaggggagatgtggcgggaaggcaaagtttgtttcaattggaggaagcaatatgtgcaaagaaaaatatggagaaaatatggcattttcagggttctgttaagagttcattgttcattgtgagagttcctgcacaggagcagaaaaagacaaggcattttcttatgattacccagtgaattctggactgtattctgaaagctatgggagccattggaagattttaagcggagactgtcatgctcttatcttcatattctaatatctctgaggatagtagattgacatgggtattcctggaggcaggggaagactgcctgggagattttttatagtcatccaggtgagaaattacaagaggctgaattaaggctttggcccagtggggctgggaaaatggcgatgtgttaagagattataaggattgtgtaattgtaagacttttaaaaagtatttttactgttgtaatctcagtgcttaacacaatgtttgagatatcagacagtctgtaaatgttattttgagttgatgaacttgtgatctactcagttagatggaaggtgtagaagaaggagatttctggtataggtgaatagatggggctgttatcaaagtgagagagaggatcagccaggaggaggaatgaagagttagattagttttatgtttaagattcaagtggcttttgagacatttgagtggaggtgtacaagtctagagctccagaagaagagttggcttggaaagatagatttgggagtcattggcctgctgtgggagtggatgacattgtctagggagagtgtaagcgaagggaaaaagagaagtttggaaccttggataccctgggtaacattagtacattgggattggtaaaggagaagttgaatgaagaagcatattcaaggagttagaaggaaaaccaagagagcaatgtcccctaagctaagggagtttagtttcaagaaggtcagagatgtctgatgctgtcaagaggtcccagaaggagtgagtggtttctattagctctctgacagctgggatttttgtctgttttgaccactgctgtatccccagcacttacaacaccctggcacatagtaagcattcagtaaattactgttgaatgaatgaatgaattgaaaagagtcccttgaatttggttacagaaccacaggactttggtgaagccattttgagagaagtggtggtgaaggaagccagattatagtggattgaggaatagataggttgtaaggaagcagctacaaaatactaagtatgaccaacatcatgagcacataggaggtaccaggcactgagctaagcactttacatgtattaactcatttaaccttcccagcagcccaattatataggtattatgatccctattttacagttgaggaaactgcagcttagagagggtaaataacttgcctagagaaggcctgcagctagaaagtgttagaaccaagatttgaatccagatctgtcttcctttggagttcaggtccttagctgcccaggctacatttcctctagggagtctttgtggcaggaaggcaaaagaaagagtaagtgaggccaggaagattgcaaacattttaatgctgatgagagttgaaagaaataatttgaaggctttgggaaaaggggaaataatttatacaagaggagactgagaagagctccagagcacaggtaaaaggaagccccttccatcaaggtggaggtccaggagagggtacaggcaggtgtgtgttgcagatatttttgtcagcgaggagaggggaagagggtagggatagttgaaagttctcttctgattgtctgctgagcataagggaggtggtgatcaagtagacttgaggaaggtgtagagaatagaatgaagcaatgatggagatagaagattttcagggtagcatcaagggcccagccaagatggagaccattattttgcag

SEQ ID NO: 14273 - DNA, 2300 bp, Homo sapien
aaaaaaaaaaaaaggaaaggaattattctcatgtatacaatagtaggaaacaacctataaagcttttgagaatcttataattcactgtgtacctccctctgtttcatattttcgcaattgaactatagagcctaggcctaggtcttaagacttttcttgtaaccttcagagtgcccagcactgggattgacatataccagttagacggatttttttttccataaaccaggctcaaactcttctaaaccaaaatcaacatattctgagtgccaatcttgggtaaggcactctattatttgtcatgaaggattcagaggaaaatgtgatctaccacactcaacagcaggcctcttatcctctccagcttaatgcattttaccagttaaggactaccctgatgctgagattgtgtttctttccccaaatcaaatgtcactctctaagggtcatctgtataattaaatgcttttaattctatatatcaaatgataacttttgtgaaagtaatttaaacacacttgaaacatcatataaaatattactacaagacttaaccgtaaatgtggctcccacccccataacatctatacaatataaccaaagagctagattccagattatcaagaaacttctaaattttgaacccatgcagcagaattgtattcctttacattgttggctcgacttacaaatgtgctgtggaataattatcctcaaatacaattttcagtactgattacatagctgcctaaaagaaaactgttagccccttccattttatgtgaaaccaatgtctaaagcgctcttgactcttcaaccccacattttccccaccctcatccctcctcaatccccagcccccactcatcacatccactagacctgaactttgaactcaatcataattctttgtgcctctgctcaagcccttcttcctgcctggaataccctcttttcagtcccggctaattacatctaccatcccattccaagtggccgctggaaactcacttccttatgttctatgatttctttcacaatttacactttttttgttttgttttgttttgtttgggggggggggttgtttttctgagagggagtcttgctctgttgcccaggctggagtgcagtggcgcgatctcagctcaccacaacctccacctcatgggttcaaccgattctcctgcctcagcatcccgagtagctgggactacaggcgcgcgccgccacgcctggctaattttttgtgtttttggtagagacggggtttcactatgttggccgggctggtctcgaactcctgacctcgtgatccgcccgccaaacattctatgtgccagaaacttgtatgtaactttgcatagttcttgtattatgtctccccaattttgagtgttttctctggtctctactcagcccttgctcacagtctcactaggaccctggctagcttgaacacggtcagaaggatcaccttagatttctgctggcacagtattttccataaattaatctcctgattgaaccgtagtcctatagtagttatctttggatgaaaacctaatgcagctcgaggaggaagtggagtgcctgtgatcagagggctggacaaaagcccatagggcgtctctggagccctgggggaactgtccccaggcaggcactctcagggcccaggaacagggcgggacaagtccgactcacctgtgaggtaaggacggggccaagacccggaaccgaaaagcaggtcacgatagcgctggaaggcctcgtcgaggactgagcagccgggctgcgcggccgagctgacatcgtactggaattgaaagttgttcgggtaaaggacgtagcgctggtcggaggtttggaagttctgaggccagggccagagggccgtcgcccgtcctgcgaacgctgccgccagcagcagcgaaaaccaaagcctggagcttgtcatggcccgctggtctcccctctcggagggggctggccacgtgagaccctggtcaggtgagcggcgcccccgtgacttatcggcgaatcacgtgaccagaggcggctctgcgcctgcgaccccaggaggacccacaccctgccctttcacttccggcctggacctgaggctcctgctacgtgcagcggattgtgccgggcgtcggcaactgctcggctcgccagactgttcacgggcccagtagagcagtaaataaccggccacccctgcggccgtgccggccgtgatggaactagacagctcacccgactcgagaagaacggggtggggaggcgaggacgca

SEQ ID NO: 14274 - DNA, 2300 bp, Homo sapien
tttaaaatatacaattattattgactatagtcaccctattgtgctctcgaatagtatgtcttattcaggctactttttttgtacccattaaccacccccatctcaaaaaagaaaaaaataaagagagatgggatttcctcgtattacccatgctgatcttgaactcctgggctcaagtgatcctcccatcttggccttccacagtgctggaattgcaggtgtgagccaccatccccagcctgtgatccatttttaattaagtttgtgtatgctgtgaggtaggggatcatagttcatttttcccacatagggatatctattttcttcatcaccttttattgaaaataacttgccttccccactaaattaaattggtgtcttcattgaaatggagtaataatcaaatggctcttttcctggaccctctattccgttccatctatttgtctgccattatgccaaaaccccactctagtgtatagtaaggggggatattttggaagatcaacaaatttatcttgtgtaacttacttttatgtatgcataagaatatttggtttaaaaatctggttaagtctaaaagagctctttcagtaataattaaataactgaatccctgtaatccaccatgctcagccccattagtaatttttatagcgtctttatttggatctagctctttcatcttgtgtaactcttttaagtaaatgactcctcccttctggtacaggttgaatatccataaaagggtgccttggcatgtgctcagtcctgaaattctactttgatctactgctctcatctttgaaactgctctaaacactcccccaaattattgatcctgtgggcctgattatgaacttggctcttctgacaatacttctcaaatcctgtacctttggtaacatctctcctgactggcagagtacccagacacttaattaatgctgatgaaaattaagatttaagcaaagaagaaattggtgtaagaatgcaagccttaggatctgaaacttgatgactgtgggatctaatttctgcttcttttgctacaagctctgtttttgaataatcaactttcaaagacaaattgcttgatgaatctctgtattgtcagaatgtttctttgatttcccatcaaagccatgtatgtgtaactagtaattaggtacctacgacctgaatataaattatcattatttcagtagccctttatttgtttttgagaaagggtttcactatactgcccaggctaaacttgaactccttggttcaagtgatcctgccgcctcagcctcctgaatagctgggagtagctgggactacagggatgtgttatcatgcccagtgaaagccctttatttttaaaagttcattttcctgatctttacatgtattttaatactaaaattaaatttaaaaattttaaaaagtacctactaaccaaataatgccacccaataacaatagcattatttgtattatgttctggtaatatagtggtgaacaaggaagacagggtctctgataactgtggaattctccttgatcacttctcaagcctctcttccggatactatttcttggatctacagctgtcttccttccccacttctgtagttcagtctctcattattctctacctccaataaaaaggggcctcctaactggtttcttatgcaactactcaacatggtatttctaaaatgcagatctttcgggatgattttcaattgctcagagaataaattccttgactttctacgtaaggccctgcaggaccaggcccctgtcattatctctgagcactctccatcttgcacccaaagccccagcaatatcttactgctttcagtaaatacacaccgggctatgtggggttttgtctggggaaaggggatgtgagttgtaactaagagatttatagtcaatcttgaagggaagagctcatattggaggcaatggaatgcctcaagctggctctgaaagtacacattttttccagtcataagtagatcacatttgtgtgatcttgtgatcctctctctagcagagccgtgcagactacctacttccggccctttcttgccccacgaaatttcacatcacaacgacttgtggttttaatcctccgtttttctgcttctgaagttacttcagcctggcaagtcctttacctccccgtaggcctggcgagctgcatcacaacattcaagattcaccctagagccatctgggaaactttcttctccaggtcgccctgcgtcctcgcctccccaccccgttcttctcgagtcggg

SEQ ID NO: 14275 - DNA, 2300 bp, Homo sapien
acctcccagccgcctgccttggcctcccaaagtgccgagattgcagcctctgcccggccgccaccccgtctgggaagtgaggagcgtctctgcctggccgcccatcgtccgggatgtgaggagcccctctgcctggctgcccagtctggaaagtgaggagtgtctctgcccggccgccatcacacctaggaagtgaggagcgcctcttcccggccgctatcccatctaggaagtgaggagcgtctctgcccggccgcccatcgtctgagatgtggggagcgcctctgccctgctgccccgtctgggatgtgaggagcgcctcggcctggccgcgaccctgtctgggaggtgaggagcgtctctgcccagctgccctgtctgagaagtgaggagaccccccgcctggcaaccgccccgtctgagaagtgaggagcccctccgccctgctgccaccccgtctgggaagtgaggagcgtctccgcccagcagccaccctgtccgggagggaggtgggggtcagcccccgccaggccagccgccccgtccgggagggaggtggggggtcagccccccacccggccagccgccccgtccgggaggtgaggggcacctctgcccggccgcccctactgggaagtgaggagcccttctgcccggccagcagccccgtccgggagggaggtggggggtcagccccctgcccggccagccgccccgtccgggaggtgaggggcgcctctgcccggccgcccctactgggaagtgaggagcccctctgtccggccagccgccccgtccgggagggaggtggggggtcagccccccgcccggccagccgccccgtccgggaggtgaggggcgcctctgcctggccgcccctactgggaagtgaggagcccctctgcccggccaccaccccgtctgggaggtgtacccaacagctcattgagaacgggccatgatgacaatggcggttttgtggaatagaaaagggggaaaggtgagaaaaagaatgagaaatcggatggttgctgtgtctgtgtagaaagaagtagacatgggagacttttcattttgttctgtactaagaaaaattcttctgccttgggatcctgttgatctatgaccttacccccaaccctgtgctctctgaaacatgtgctgtgtccactcagggttaaatggattaagggcggtgcaagatgtgctttgttaaacagacgcttgaaggcagcatgttcgttaagagtcatcaccactccctaatctcaagtacccagggacacaaacactctgcctaggaaaaccagagacctttgttcacttgtttatctgctgaccttccctccactattgtcctatgaccctgccaaatccccctctgcgagaaacacccaagaatgatcaataaaaaaataaaaaaattaaaaaaaaaatacaaagattaatttctctaatgatctgaacatagaaaccagcaaagatttcatgatgaagatgcaaaaagcaattgcaacaaaagcaaaaattgacaaatgggatctaattaaactaaagagcttctgcatagcaaaagaaactatcaatagcgtacacagaaaacctacagaaagggaaaatttttttgcaaactatgcatctgacaaaggtctaatatccagcatctgtaaggaactcaaataaatttacaagaaaaagacaaataaccccattaaaaagtgggcaaagggcatgaacacttttcaaaagaagaaacacatgtggccaacaagcatatgagttcccctttttttatttgctatgagggaactgtgtcttatttatttttgtgtcccagaagctagcacaaagcctgacacacagccactgctaacaaaatgtttgtggatttatttaataaaagagttgggagtaggtggagaatggagggtggggagcatcacacatacatgcacatgcttaaaatgtggtgatttcttcctgatctgaccagatcaaaaatataaaacagaaacaggatctatgccatgggtcctggccctttttgcttctgccagcatgtgtgaggagatgcagagacaaattccgtggcagttagagaactaactgccaagatggagcgaagggaacatttaaccttgactttccacagtcctgaggttcccaaaataaaggggaaccggaaataccaaagggtgaggaggtatctaattgaaagtcagatgggaagaagagaacttacttaaaggcagggctacacagagcatcctaaagacagaaaagatcaccctgaaaattgt

SEQ ID NO: 14276 - DNA, 2300 bp, Homo sapien
gtaatagaatacagatggctatgcacatttctctaatagtggtcagctgctccatttatcaaagtggagactatggatggtagggttcattcaagataggggtacaatgaaaagaaaggtgaggcaaaggagtttagggtactgacgagtgttactgaatttttctgtaggtaatatcacaatggagacggggtggacagaagtgttccttgtgtccatggcttgccttagttgtggcagcaatctagaattgctaaatagaaacactgaatcaaagaacctagacctggctgggcgctgtggcttatgcctgttatcacagcactttgggaggccgaggcaggtggatcacctgaagtcaggaattcgagaccagcctggccaatatggtgaaaccccatctctactaaaaatacaaaaattagcctggggtggtggcatgcgcctgtagtcccagctactcaggaggctgagacaggagaatcgcttgaacctgggaggcagaggctgcagtgagctgagatcaccactgtactccaatctgggcaacagagcgagactccgtctcaagaaaaaaacaaacaacaacaacaacaacaaaaacctagactaccagtattgaggttaaatgctttactttgtaaatcctgaggttaagaaatataattatcggtattttaaaacttacaaaatggacaaattggaagaggctttttaacattataatggaatttttcacttttcaaaatcaatttccaaagggaacctataggttgaacagtaagatttatcaacaaatcaggggttttgattttaaaaggttttcaatctggccaattcttcagattatctcaagagggagccttcttatgcctcttcttccttcataacacttctctggctcgcatgtcctgtttgcaaagatttaagcccactcttaggcataaaatgctcttaactgacatgacccctgactaacttgcctaatattttgccatgtaccctccatgcactttaagctccccaaactattacttacttgacaccttctgcgcttttgcttgttctctgcggctagaccatcttccctaccttctctgttgaactcctagccattcatcaacactcagctcacatagcacactttcagatgagattcaagcattatctctctggctacatttggcccttgtagatatttctattattgcctgtattttgttgaagcattcatgtcttttatgtactacatagtacataatatatctacattacaaagcatttttatgattcatgttttggggcatccagcggttaaaatagggcaagggttatgtggtcttggccaggtcccttttcctttctgagcttcaggttcctcaggtataaaatgggtactatggctccgtgaagatgagacagaatatatgtaaagcccttacacagtgctcaattcatgaaaatcatcgctgtttacattgtttagggccctcaagaggcgctcttgtcagcggggtggaggaaatgcctctttaaaatgacgtcattataggagacttaaaaaccactgcacgtctgtacaagtggacagaatcacacagctacctaaagtgggttcacctgtcatacagtttagaggttccacttacaacaggtttccatcagtagccaaagcaacagaaattttagcttaacggctgagggcttccgggattaccgcagggcgggcgggaagcgcctttccgctccggagggaaggccgcgtccccaagggactgcctaagtgggctggatccctatggcctgcggcagacaccaccacgtaggcggtccaggggtccctctctcggtgactggtgaccaggaggccgcaatctcttcacataaaaggtctacgggtttccgctcggccctcacagcggcagcggatcgaaccaggaaagcaattcccgctcggctcccctcgggtcccaggcccaggaaggccgggccgtggggtctccccgggctccacgcaggggcggtggggcggggcgcagtgacgcaaagaggagtgacgcgacgacgcagcgcgacgcggtgacgcacgcccctttgttggctcagtagcgatagcagcggccgtggaggtggcgttggggactgttttctctcggaggccggagcggagccgcgtctgactgaggcgggcagcaagcggccccctcgctccctccctccctcctccgcgccctccccgccgccaccagccgtcaaacgccaaccgccgctcctggggaggagccgcggctcgcggggcc

SEQ ID NO: 14277 - DNA, 2300 bp, Homo sapien
aggctttaaaaagatgataagcagtgagttttatgagaaaattttggctccttcagaaacaggaagataagtgggcccctcagatttttcatatatctttggggataaagttggttatatctggtttattttagggattttgcttctgtagttacccaagatcaaatagccaactcagaaatactcagttggatatcaatcaaatagtgcctaccaggggagtaaacagacaacttttaggtttttagtttttgcttttgtgtggagttgagtccaatttttaaggcaactattgttgacctttctctaggcggtagcatttaggatgggaaaaaataatatgagttatgtgcgaaaagcagttttcaggctatcatttagggccacagatatgcttatttaggactattttcagggtaggagccagttaaagtttgtatatcagtcacacattgatatgtagcagctctatcaataccacaacaaccttattaccatagtaattcaggggtctcaagtaatccaggagtctcaaactgaaatgtcaacaagagccaagtaaatattttagaaatagagtaccctggagtagatgggctctgagaggagcctgtgaaatccagacttcatgtgaattctcttaattaaatgtgggccaaagaaaacccggccatgggcagtttttttttcccagcttctactagtcttggcttgcaacaatgccactgtccatctggcattacctagaccagtgatacttaaacttgactgcgaattggaatcactgagaagctttaaaaaatattagtgcctgagtgttactttatggagattatgatttaattgctttgggtaggcatcagtaatttttgtaaagccctttacgcattctcacccctaattccagccggtgattctcacatgcagactaggttgagatccttgatctagactgccttctatagttgcaaaaagagaatataggcgagcaactccagatcataagggacaaaatgattcaaggcaaattgactggctcagaatagggcctcactggaggccctagttgagtgggttttgtggaatggtgcctcccaagggtctggtgtgcagtgcccaatttggttttttgttggttttctggtaagtggtccaccttggagaaaatcacaaaactaaaagtcttaccaagaagtagaactgacaagcagccatgttgattggcagtacattctcttaccaagggggagaaatctatctagggaaaataatacagagtctgagcaaaggaagttgagtggttataagcaaaactgtcattaaagctagttgcgtcaagtctgcacaattccacgagcacttaagagtttacaagtttctcatgtctatcattcttttgataatcttgtatttttatttcaagtgtggtatagtagtaagaatattggtatttctcagccatagatttcccttttgtaaaatgggaatactaataggaactgtaatttgttgagtgctttttgccagatgccttacttttgtctgtatcttccaagcagccctaaagcaaaatgggcattgttaccctatttttatgaggaaagacactcatatactactaacttactcaaaagttacacattgagtgtataacagggccatgcttgtctgattccatatgttcattctattatgctgctgttgtctgttacataggaatattgtgaggatcaaagaacatgtgaaaacaaaacctagttacaataataagcacaccagtgctaacttgggcaaaagataaggatacagagctgtctcagagactcccaaaggcaggatgagattgggaactagaaaaccattttggacccctaaagtggtattgtctactatctgtacatcattctcttacagctcttactgctgcttttcctgtcagttaccccatagctccaggtattacatgttaactgttcctgacacatgtagacagaaccaatcagatccatggggcaggatcatcaatacaaacatgggtgttgagagcttaacttaatcgggaaggagatcttggagatcatagttcgctgggttcacatcatggaaatcgtctttgacaaaactgaaatgccctgaagttttaattttttaaatacatgtaatgaattggtatatggtagatactcgtggctacttagtatttaccaaatgctttgtttccatctcgtttatttttattttttatttttttaagagacagtcttgctatgttgcccaggctggacttgaactcctagtct

SEQ ID NO: 14278 - DNA, 2300 bp, Homo sapien
aaggtgcattgttaagttgtttatttgatgcttttcaactttttaaaagtgggtgtttatagccataaagttccctcttagtactgcttttgtcgtatcccataggttctggcatgttgtgtttccattatcatttaagaaatgtttcaatttccttcttaatttcttcattgacccactcgtcattccagagcatattatttgatctccatgtgtttgtatagtttccaacatttctgttgttactaatttctagttttagtccattgtgatcagagaagatgtttgatattatttcactcttttgtaatgttttaagacctgttgtttgacctaagatatggtgtatccttgagaatgatccatatgctgaggaaaaaaatatgtattctgtagcccaagggagaagacacctgcccccactctgctgcaacacacagcgctctgctcagggatggggcagtggagtgctgttgttacacaaggggctctctgtcggggagggaacagaaatctgttctgtagtgtttgccatttttggtggtgcaaatattccatggctgatttcaaactgccaccgtcttctcagcctgggcttgtttgtacccacccttgggaaggctatccaagtatttgaaaggatgtgggtgttgtgatctaaagtgtatctttattagatacactccagcccagttatgctatggttcttgcagactcatagaggaactgccttgttggtctcagataagatctggaagaattctctgggctaccaggtagtagagacccttattctgtacctgtagtttctctccaaaaaacagtctctctctctccctctctctctctctctctctctgctgagccacttggagctgggtgtgggctgacacaacatccctatggccaccaccaccactgggactgcactgggtcagacctaaagccagcaaagcactgggtctcactcagggcccgctgtcaacactacctggctgtcgcctatgttcactcaaagccaagtaactggggctctacagtcagcaggtggcaaagccagcctggcttatgtctttcccttcagggcaacgagttctctcaggccctggtgggtccagagatgctgtctgggagtcagggactacagtcaaaaaccttagaaacttacctggtgctttattctaaggcggctgggctgacactgaaaccatgagacaaagtccttcccactctgcctttcccttttcacaggcagaggagcctcaccctgtggccaccaccacaggcccacagggagtgctgccaggctactgtcgatgttcacttagggcccaagggctcttaagtcacttgtggtgaatgcttccaggcctggggctcacccttcagggcagtgggcccccctctgtctcagggcaggcccagaaatgctgtttaagagccaaggcctaaaatcagtgaccacaagagcccatttagtgctctaccccattgtggccaggcaggtacctaagctgcaagacaaagtcccttttacctttccctctgcttttctcaagcagaagaaatctctcaccacagccaccaaagctgtgaatgtgctgggtctcacctgaagccagcatgtcgcagagccttactccaggcctatagcacattacctgggtatcactgttggctattcagggcccaagggctcttgagtcagcaggtgatgaatcctgccaggactagaatcttttctttaaagcagcagattcccttctggcccagggtgtatctagaaaggtaattcaggagctaggtcctggaatgggggtctctcaactctgactggggctgtatcctactgtggctatccaagacgtaagacaaagtcctctttactcttccccctcctctcctcaagcaaaaggaaagagccacttttgttgctgcaagctgcactgcctggggttgggggaggggtggtacaaacactcccttggctgtcctggctggtgtctctctaggtcgtgtgcctcttgagtccactggctctgagcccagcatggcattaggatgtgcctaggagttgaagtccttatggactagactgctttcaagtttatttaggaccctggggcataatagcctgccatgccaaggcttgtcaaaacccaagcctcaagcctcctaactactgggatgggtgaacccctctgggtagggctggtctaaatgctccctccatgggcaggtgtcacgtgagttccacctggtttcgctttctgctgtgacagggcagcactgagttcaag

SEQ ID NO: 14279 - DNA, 2300 bp, Homo sapien
tattacactcaccatccgaggtttgcaggacttttgttttaatattgaatagatggaactgtttacttctgcatctttgcaggcatacaaaatgtgcctaccaggactctgctttatatctatcgaaagcaagaagtaatacagtaaaactttgcctggctagaggctttggaagaatggagtattctgatttaatgctattgaagtgtgaaggtgaaaagaatgaaaaacttacatttcctgttgaatgcaacttgaaaatacagccagtgattccacttttcttctctagtaagtttggacattctgatctacttggtgttttattatagaactgctagtgtgcccgagacttacattgtgaagacactttttaaaaaacttgagaggtaagagggtgtaaatggtattgtgtgagatcaggctggatgagaactgacacttgtaaacatactttttaggctgaatctctgattgccgtttgttttcttatttaactcataaaaataaaacacattggatggagggtgggagcaggaaggagatttatgtcttttaattgcatgccattgtttcatatcaagacagaacatatggtatccctggctttggacctacagaaggaaacacatttttctgcctgctgtatgccagaggttcttgaacacctggagggatgactgcagcacagattgctgagccctactccagagtttctgattcaccatgtccagggtggggcctgagaatttgcacttacaaaaggttctcaggttctgctgctgctgctagtccagagactacatttttgagaaccactcttgtctactaactgtaaattgtagaactctagaacaaagcttagtttggtgtaggaaaagaagctcacaggttatggagcaaatcatgaaagattcaacccttgatcccagcctagtgtggaattcaggtaacaatcaatacacagtgacataacacaattcttggttttcatgattgcaagtcatagccaagtatcaagtgagaaattcagtttcatttgcaaggcttagagaggccaggtgattctagaaaaataggccttgtatttgctttaaaccagtaaagagctttgagtgcttattaaatggaaagctttgtgtttttatttatttttgactattttattttatttttttgagatggagtctcagtctgtcacccaggctggagtgcagtggcgtgaccttggctcactgcaacttccgcctcccgggttcaagtgattctcctgcctcagcctccccagtagctgggattacgggtacccaccaccacacctggctagtttttgtatttcgagtagagacagggtttcaccatgttggccaggctggtcttgaactcctgacctaaggtgatccacccacctaggcctcccaaagtgctgggattacaggtgtgagccaccacacccggcccaaaagctttgtgtttttaaagatattagacatgtttcttgttttttaaaaaatcttaataatgtaggagaataagagaaatgttttttccaaagccgagaaatcattgtgattattttaccttattgggatgttggataatatagtccacttcattcattaatcatcaaacatgctatggattttccatttttataggatttgtgtcttaactggggtaatactggtaattcttatactccctctgaagatgaaaaatgtaggccaaaatcatagaccatgcatagaagctggataatgaagacagctctggaggaacatgtagacacacacacactgacacacatatatataaagtataaatacatatttttttaaagtttatttttaacattttaaagcaaaaaccagccctcccctctcccggagtaggcaggccccgcccctctccccaagtgggcagggacagcagtcgcatgggcagctttccttgtgatgtcacaggttcctctgggcacactgctgcctggccacgcctcctttccctttcatctttctcattgaccaatgggattggagcattaaggccacacccctattctgcattctagtgtggccctggttacgcctcctctggctcagtcacacagcagccttgtaggtgactggaggtgttcgctgatgtggccccaaccctacctccctccccaccccatgatgttagaagaatctcgacagaataaattggcagcagccaagaaaaaggtaaaaagccaagaaaaaggtcatggccccccaacctagccagagatcccctctgatgacaagaccactcccaga

SEQ ID NO: 14280 - DNA, 2300 bp, Homo sapien
ggttcttggtgtcttgaaaaaagaattggacaaaatgcacaaacaaagcaaggaagggacaaggaatttactgaacatgaaagtacactccagtgtgggagcgggcctgagcttagaagttcagtggctccgttacagaattttggggagtttaaataaccccagaggattccatggttacttcgggtatgccttatgtaaatagagaagatgaagtaaagttacaaagacatttatggcctatgccctatggacagaatattacctgttatagctgaagtgtgaattggccttatgttccctacctccagaccctattttcctgcctcaggaggattacttgagcctaggagttcaagtccagtctggacatcaatagtgagacccctgcctctgaaaaaaaatttttttgagacagagttttgctcttgttgcccaggctggagtgcaatgggatgatctcagctcactgtaacttccacctcctggattcaagcaattctcctgcctcagcttccctagtagctgggattacaggagccggccaccacgcccggataattttttgtatttttagtagagacagggttacaccatgttggccaggctggtcttgaactcctgacctcaggtgatctgcccacctcagcctcacaaagtcctgggattacaggcgtgagccaccgagcccagcaaatttttgttttttagacggagtctccctctatcgcccaggctggagcacagaaatgcgatctcggctcactgcaacctctgccgcttgggttcaagtgattctcctgactcagcctcccgagtagctgcgattacaggcgggcaccaccatgcccgactaattttttgtatttttagtagagacggggtttcaccatgctggccaagctggaaaattttatttttaataaatgaaaggcagagtatttatctgaaaaaagtgggagaccaacagtctcatgggattgttataaagattaaaagagagagtgttactgaaatacttagaagagctgttattctattgctgtcctttccccttgtatttggatagattaccgtacttgtttcttctatgtaactctaattgtcagtggggttctccctctcttagaggcctggagaaacttgtcttaaatgctttcccagttaatgaattgggagaggcagattttatgtctaaattacaagggcgagacttaaaagtatgaattggggctaatgtcagtgctcaggtgcagggatcctccgttttgttcatcacacagctcccggcactttaataaatgaggctcaaagaaacgacgggcttaggtcatgcagtagtcaaattcagaactcatgtttgattccaaagcccacacgttttcctagtttagaaacactaaacatttaattcaccgcaccgggggccagacaggtaatggagaacgccttaagtatgttaggaagggaagttatctacagtcgcagccgctattcagatctatttcactgccttgcagaaaacgccgactgtcgtctctttatcccatggccgatttcttgtgaaatctcctaacttttaaatatttccaatcaaaagactgccgttcaaatgcagcccaccaggagcatgtttgcaaactctggagtaaacaagagtgggaagctgataaggtgagtacctcagttcgatagtgacagccaagaaacggggagttttgtacctaaggcgagaaagaaattctccgccgaaatctcccggaagaaggactgaattaaatgcagattagagtcagggcagggtaaggtggcgggagaactaggctgccatcccaggtggctggcctaccagccagcgcggccggaggtacagaccatgtacagaccacggcgaggggtgttaggggcttctcgggataaaggcagcgagtggctgcgcattccctccccgactctttcagaggtaagccttctgtggagcagaccctaatcctccccctgattccttaggtcactcggcgatttacttccttcccccgcttcctcacagtcctccacagccctacgacttccgcttgcctcgtcgtctgggaaaccgccgacttccggccgcgcagcggtgggctgagctaaaatggctgaggagagagtcgcgacggtgagcgccgagattctctttagttgcccggccgcagggcaaggcaagctggcgggtggcttttgtcccatgcagcggttcctggagagaggcggagctgggtgccgagcgtctcagggtgggcggggcgacacggtcccct

SEQ ID NO: 14281 - DNA, 2300 bp, Homo sapien
agacatttatggcctatgccctatggacagaatattacctgttatagctgaagtgtgaattggccttatgttccctacctccagaccctattttcctgcctcaggaggattacttgagcctaggagttcaagtccagtctggacatcaatagtgagacccctgcctctgaaaaaaaatttttttgagacagagttttgctcttgttgcccaggctggagtgcaatgggatgatctcagctcactgtaacttccacctcctggattcaagcaattctcctgcctcagcttccctagtagctgggattacaggagccggccaccacgcccggataattttttgtatttttagtagagacagggttacaccatgttggccaggctggtcttgaactcctgacctcaggtgatctgcccacctcagcctcacaaagtcctgggattacaggcgtgagccaccgagcccagcaaatttttgttttttagacggagtctccctctatcgcccaggctggagcacagaaatgcgatctcggctcactgcaacctctgccgcttgggttcaagtgattctcctgactcagcctcccgagtagctgcgattacaggcgggcaccaccatgcccgactaattttttgtatttttagtagagacggggtttcaccatgctggccaagctggaaaattttatttttaataaatgaaaggcagagtatttatctgaaaaaagtgggagaccaacagtctcatgggattgttataaagattaaaagagagagtgttactgaaatacttagaagagctgttattctattgctgtcctttccccttgtatttggatagattaccgtacttgtttcttctatgtaactctaattgtcagtggggttctccctctcttagaggcctggagaaacttgtcttaaatgctttcccagttaatgaattgggagaggcagattttatgtctaaattacaagggcgagacttaaaagtatgaattggggctaatgtcagtgctcaggtgcagggatcctccgttttgttcatcacacagctcccggcactttaataaatgaggctcaaagaaacgacgggcttaggtcatgcagtagtcaaattcagaactcatgtttgattccaaagcccacacgttttcctagtttagaaacactaaacatttaattcaccgcaccgggggccagacaggtaatggagaacgccttaagtatgttaggaagggaagttatctacagtcgcagccgctattcagatctatttcactgccttgcagaaaacgccgactgtcgtctctttatcccatggccgatttcttgtgaaatctcctaacttttaaatatttccaatcaaaagactgccgttcaaatgcagcccaccaggagcatgtttgcaaactctggagtaaacaagagtgggaagctgataaggtgagtacctcagttcgatagtgacagccaagaaacggggagttttgtacctaaggcgagaaagaaattctccgccgaaatctcccggaagaaggactgaattaaatgcagattagagtcagggcagggtaaggtggcgggagaactaggctgccatcccaggtggctggcctaccagccagcgcggccggaggtacagaccatgtacagaccacggcgaggggtgttaggggcttctcgggataaaggcagcgagtggctgcgcattccctccccgactctttcagaggtaagccttctgtggagcagaccctaatcctccccctgattccttaggtcactcggcgatttacttccttcccccgcttcctcacagtcctccacagccctacgacttccgcttgcctcgtcgtctgggaaaccgccgacttccggccgcgcagcggtgggctgagctaaaatggctgaggagagagtcgcgacggtgagcgccgagattctctttagttgcccggccgcagggcaaggcaagctggcgggtggcttttgtcccatgcagcggttcctggagagaggcggagctgggtgccgagcgtctcagggtgggcggggcgacacggtcccctttttactgtcccgggaactggtcgcctggggcaagtctggatacttagcagcacaggtcctgttctaggactgtagtccctcttggggtgcgctggacggagaagggagacttttcaccagtaatggctcttaccgtagtgccatctttttctgtctcgggggtttggaaggtaatgactagcacttgtgtagacagttcctgttaatcccgtgaattgggaattta

SEQ ID NO: 14282 - DNA, 2300 bp, Homo sapien
ctattctctttaaaacagtattagacattcaaatgtacatgacaattctgccgtcacagactcaagttcatattctattacacaaacacttgtgatgagcactagaggataagctatatttgtagcaatgttatgttacccattatcttttacactttaagattacttagaagtattttctttttttttttttttttttttttgagacggagtcttgctctgtcacccaggctggagtggaagtattttctttcctatgtttttaatatttaaaacccagtaacattaaccatgctatttactttttttttttttctgagacggagttttgctctggatgcccaggctgcagtgaaatggcacgatctcggctcactgcaacctctgcctcctgggttctaagcgattctcctgcctcagcctccctagtagctgggattaccagcgcccgccaccacgtccagctaattttttgtatttttttagtagggacagggtttcactacgttggccaggctggtctcgaactcctgacctcaggcgatccacccacctcagcctcccaaggtgctaggattacaggcgtgagccactgagcctggcctatttaattattttaaaatctgttttttctttctttttttttgagaaggagtctgtctctgtcgctcatgctggagtgcaatggcatgatctcggctcactgcaacctccgcctccggggttcaagcgattctcctgcctcagccttccaggtacctgggattacaggcgagcgccacgatgccccgctaatttttgtatttttagtagagacggggtttcaccatgttggccaggatggtctcaaactcatgacctcaagtgatccacccgtctcggcctcccaaagtgctgggattacaggcgtgatgcaccgcgtccggcctagctattttaaatttcttagcttaataaaaatgtttcggccgggcgtggtggcaggcgcctgtattctcagctaatccggaggctgaggcaggagaattgctggaacctgggaggcggaggttgcagtgagccgagatcgcgccattgcactccagcccgggccgacaacagcgacactccgtctcaaaaaaaaaagtttctgtcttcagagttttctaattagactagaataatatgactactctgcaaatgagagtagaaaacaaacaaaaggccctctaacaataacactaaccttgctgcttagccaaaactaagttgtaaaacagccaaaggctgctatttgtactgttttccagggcgtttttcgaaagacaataaattccgaatacctaaaatcattctaacaaatggacagaacaggctttcaaacccaacactaaagcaaggtaaacaaagcttcacacttggcactttaccgaaattagatccaattatagatatatgcctcaaaaaatagcgactaggtcatcctgaattcatcgggttcctctatattagcagttctgtggagtgaacgcccaactcagccttcagatgaattccaaaaccgtactttcctaaacttaatcaccacagaaaaaacacagtcccgctccactggcagaaggcagtgacgctgcaagcttccaggcatgttaaattcccaattcacgggattaacaggaactgtctacacaagtgctagtcattaccttccaaacccccgagacagaaaaagatggcactacggtaagagccattactggtgaaaagtctcccttctccgtccagcgcaccccaagagggactacagtcctagaacaggacctgtgctgctaagtatccagacttgccccaggcgaccagttcccgggacagtaaaaaggggaccgtgtcgccccgcccaccctgagacgctcggcacccagctccgcctctctccaggaaccgctgcatgggacaaaagccacccgccagcttgccttgccctgcggccgggcaactaaagagaatctcggcgctcaccgtcgcgactctctcctcagccattttagctcagcccaccgctgcgcggccggaagtcggcggtttcccagacgacgaggcaagcggaagtcgtagggctgtggaggactgtgaggaagcgggggaaggaagtaaatcgccgagtgacctaaggaatcagggggaggattagggtctgctccacagaaggcttacctctgaaagagtcggggagggaatgcgcagccactcgctgcctttatcccgagaagcccctaacacccctcgccgtggtctgtacatggtctgtacctccggccgcg

SEQ ID NO: 14283 - DNA, 2300 bp, Homo sapien
tctttggatagatgaaaaatggtattttgtcgagtttttttttttttttttttttttttgagatggagtctcactgtcacctaggctggagtgcagtggcatgatcttggctcattgcagcctttgtctcccaggttcaagcaattcttctgcctcagcctccccagtagatgggactacagatgagtgtcaccatgcccagctaattttttgtatttttagtagagatggggtttcaccatattggccaggctggtctcgaactcctgaccttgtgatctgcccgccttggcctcccaaagtgctgggattacaggcgtgagccaccgtgcccagccctgagttttattttttaatttctctcttactgcaaggttgatcatcatgtgtatatttaaaaaccatttgtatttccctttctctgtatctttggtgacataccatatgtgttacaaacttgcaggcagacagtggtagtactaacatgcagaatgtatccttggtgtcatcttttttggtatccagagctttgtgacccatctaaggtttttaatttatacccatggcatttatacctatggcaatgcacagaactaattcatactggtatgacaaagattcataccagtttttttttttctttttttaagtggagttttgctcttattgcccaggctagagtgcagtggcgcaatctcggctcactgcaacccccgctttccagtttcaagcaattctcctgcctcagcctcccaagtcgctgggattacaggtgcccgccaccatgcccagctaatttttttttttttttttgtatttctagtagaggtggagtttcaccatgttggtcaggctggtctcaaactgctgacctcgtaatccacctgcctcagcctcccaaagtgctgggattacaggcgtgagccaccgcacccggcccataccagttttttttgacaccgctgatccgaaggcagataccagtatgaatctttttttttttgagatggagttttgctcttgtcgccaagggtggagtgcaatggcgtgacctcggctcaccacaacctccgcctcctgggttcaagcgattgtcctgcctcagcctcctgagtagctgggattacaggcatgtgccaccacgcctggctaattttttgtgtttttagtagagatggggtttttccatgttggtcaggctggtctcaaactcccgacctcaggtgatctgcccgcttcggccacccaaagtgctgggattacatgcgtgagccaccgcgcctggccaccagtatgaatcttgaaaggttctctttctttttcatctgtgataatacttggaaatcttatcacacttttcttagcttgcctagttagattttagacaggggttggcaaactttttctgtaatgggccaacaatattttagggtttgtaggccacatacagtctctacatcatatttgttatcttattttttataaccctttagaaataaaaaaaccactgttagcttgagagctgtacaaaaatatacagggcctgtaagccctgtagtttgcaaatccctgttctagaagaagtaatcacaacaagggagttgaaattttaagaaactgaatgaactaatactttactaggcattattaatactctaggtttttttacatatgattcttgtccacgtctgctttttcattactatttgttttcttttttttttcagacagagtctcactctgttgcccaggctggagtgcagtggcgctatcttggctcactgcaacctccgcctcctgggttcaagcgattctccttcctcagcctcctgagtagctgggattacagacacgcaccactactgcccggctaatttttgtatttttagtagagatggggtttcaccatattggttaggctgatcttgaactcctgacctcataatctgcctgccttggtctcccaaagttttgggattacaagcatgagccaccgcacctggcctgtccatgtccactttttcttaaagacacctgaagaaacttaaccactgctcagaagcatttttctccctctttcaggctgttatcaaagaacagcttcaagagactcagggattgtgtgaatatgctatctatgtccaaggtaagacacatacttcttgtcttcttgctagagaaatacacttttcctaggttcttgaaaaagatcaggcaattgaagaaacaagttcaagtacagtcatgcaccacttaacaatggagatatgttctaagaaatgtgttgttaggcaattttg

SEQ ID NO: 14284 - DNA, 2300 bp, Homo sapien
ttgtagtgacacactccaaagtggtttactgtctttggaatgcacagttttgcccaatattattcagcaagaaggatacttttttctcattgctagttcatacttctactttcctgcctctctctttcagttttctaaaaccacatccgtagctgtgattatgttcttggtttcattttcctaattctgttacaaattctgatgacatgagcaaccaacccccatactagaagttagaatagctcctatctcaccagagtaaaagaaaaattgcaaattcacatgcccaaaagactgaccctgcacaccctagtagagtttatttttaaaagaaaatctaagtcaaattaatgtggaaagcattgcttctttactgctatccctggaagcaaagcaccatcttgcccccaaatgtggaaaaactcaaaaactctactcttgcattctctgtttccaccatgctatacttaaaaaagactacctttttacccttctctccccaaatattagaagtttctcatatcagagtaatgaatacagttctgtcctctgaaaacctcttccctctacatcaaagctttctgaaataaaagtagtccaatatctactcattcagtcttcaagtccttaagtttctgttgccaccactgcttcatcaaagatacatcactgcttgatgattgatggttaagagcaagagctctgcatccagacctggattaaaatcctggtcctgccacttacctttgaaaatttgttttgtctctcctaacctaagctttctcttctataaaatggggataacagtacctctctgttggaagtgttcaatgaggctgaccattctcttcccaaacctttcttcgttggcttcccataataccactctcctgggttttttcttgtatcatatgcttttttgtgggctcttctgcttctccctctaaatacttattttctttcatttggttgcctgtcgtcttattcctagctttccgtggatgactcctttcaaaactatggttttgatgattcctcaaatctaaattactcctgaatcttaaaaaatttttttttgagatggggtcttgctttgtttcccaggctggagtgcagtggcatgatcatagcttactgccacctcaaattcctaggctcaagtgatcctcttgcctcagtctcccaaatagctgaaactataggtgcgcacaactgcgcctggctttttaattttttgtagacatgaggtctgagccatcttgcccaggccagtctccaactcctgggttcaagtgatcctctggctttggcctcccaaagtgctgggattacacgtgtgagccaccgtatctggcctactcctgaatctttatcttcaaaccaggtttcattcctgaaatctagctattcaggtatctgatggatatcatcattagatatcttaaacatctaaaactagattccacaaccaaccctcaaccctagtccaatattcctttactctccctggttatctaagccctgaaatgggtacccaattattaacctgccacatccaatcaatccccaattcctgttgatattagctcctaaatctctcttcctcttttttcactaagacttttccagtttcagaaagtaactagaccatttcattctaatatactagactccatgctgaagtagaagtgttctcaattgttcagggtacaaatccacgtttgccacataccaccagctgaatgacaaaggcatcacttctgatactttttgagatacaagaaatgaagggggtcctgctcagttagctgcttcttcaatgtcaaaacagaccctgtaataaaataaggaactccaaccggtttggtagtaggtcagttttctatctatcatctatctaatctatctatctttaaattatggtgattaaagggcactttcagtgcaaaatggggactggccctcagtaagcaaattgctggcttatcatgcatcagggttgctgcagaggccatgcctgtaccaagcaggaacttggccttgaggttcctcctccaatttcaaaataggcttagacacaggtaagggaagaccgtgatcataggttcttttaggtttttattatgatctcttgtttttatacctgaataacaattttccccaaaggaatgatgatatgtaatctttattctaaaaaggacacatagtgtattgatagcatctggtcagtggttatcactgactatcttcaataacaattactcatctaagaaactcttccttttttctttaaaatcgtt

SEQ ID NO: 14285 - DNA, 2300 bp, Homo sapien
tatttgtatcatctcacttcacatcagctatgctgcaactcctacagattcgtacagcagtcgaagtgaactgccatctctgattctgtatccctgatggctctgcacagcctagtcttccctggtgggaagagtgtcccttgtccacagaggtggtggggacccacattgcttgtagctcccgtgagcatgcaaagaaggccattaccaggaggaaccgcctctcaggatctgatcttttcttccctctttcttgacttccttctatttctaatggcagtgcttatcttcttctctttgcaggttgtaacctccatttctgacatccccactggtattccagttcacctagagctggccagtatgactaacagggagctcatgagcagcattgtccatcaggtaacctcatgggaccatcgtttggccctgatcctcatagagccttgcagagaagcttttttgtgcagtgggaccatctgtttgggctcagggactggctcactgacatgtaggtttgtgtcactcagacccaagtccatggagatccaaataaggatccaggactgttctgaaacagcagtatctcctactaggttaaagttatggcagtgtaactgacagattgttgatcatatttctcctctggaatggaaaagttgaaagtgaatggaaaaaactgaaagcccagctcagctgctttcagttgaacttcaagaagctcaaagcaaagaaactttgagggaacctccctccttcctcaggcatctgggtgttcagtgcctgcctctgggcagcagcattgactagtataaatctgagcaggtgaagcttcagaacacaagctctggagacctgggttcgcatgccagccttgcactcacgggcttcatgaactcaggcaagttacctcacctggcaatctagtgttacctaattttaattggtaatatattcatttggttaaaaaatacccaaaaactatgaaaagatatacaatgaagtctcccttctacttcctccccttccctacttgcacccttcatcagtttatttccagagttcttttgtacaagtataagaaaatacagaaatatatcctgattttgttttccatccctttttacccaaaaagatagcatagcctactgaatactctgttcttcactttgctctttttttcactaaatatatcttggagatcttcctgcatcactaacatggagagtatcctctgtcttttcatagccatatggttaaaatgaatgtgtagatgtacctccgtttacttaacctgaaccttctggatggacatattggttatttactgccctttgctgttacacacagtgctgcagtgaacaacttgatacatgattttgttttgcctgtgaacaagtccatatttaggagaaagtctcagaagtagaacagctggactggagcataaaaaagcacttgtaattttgagattgccagattgccctccataagaattataccagtttacttcccactggcaataattacaaatacttgttccctcatatccttgctaccagaatgttaaaatttgcatttatatcagtctgacagatgaaaaaatggtatttcagtatacagtcatccctcgtcatcagcggtgtgtggggcggcgggggcggttccagaacccttcccagatactagaatctgcagatggttaagtcctgcagttggccctgtggaatctgtggattagacaagttggccctccctatctgcaggttccacatccttgaatactctgttttccatctgaagttggttgaagccatggatatggagggctgactgtcgttggttttgttttttttttttttgatagacttcattttttttttatggtaatattaggtgcatagcaaaatagagcagaatccaagagagttcccatatacttccagtcccctcacacacaagcctccccaactaccagcagcctgcaccagagtggtacatttgttaagctagtgagcctacacaggcacgtcatcagcacccaaagtccatagtttacacttgggttcactcttggtgtttttcagtatagcttttgtttgggtttttcttctcacctttaaaaaaatgagccatttctatttcattttctctgtaactgtctacttaacccttctgaggcttagtctgtacaatggaggcagtccctccttccctcagaagattacagtaagaattggatgaaataaagcctttagctcagtgcctgacacagaagaacatgcagtgaaggaaagctg

SEQ ID NO: 14286 - DNA, 2300 bp, Homo sapien
ccactgcacacgccagcctgggtgacagagtgagatgctgtctcaaacagaaaacaaaaactaaacaagatatccaatattaaaaacctgtcgtttttgactgcctttctttactccaccacatccaaactattattcaggttatctctcaaatctcacctcttctacatcattgccgagtttggttcgggctcctttctccctttacacaaaccctacaatggcctcttaaaccagtgtcaggatgtcaagatattcctccttatgaatcacattaaatggcattttgagtgtgtctgtgtgacagagagtgtgaatacgagtgtgtctctagagaagtcaaactacaacctcaaaatgagattctgatacaagtactacacctgctccccctcatccctcctatatccccctatctttgggctaaaaatcctctttgggtaataaatgatgagaagcagtgaaacagtttagaaccactgctcaaaatccacccttcacattcccaccaattctcaacaaagaacttgtcatcagttaactacttacaaacctttatggcttccccataaaaggcccttcacaatctggtccaacccttcgttctcagcatcatctctttacaaccctctaccataggattctcgctccaaaacaaggccgacctgttcccaaacaaaccatgtactttttcacatttggttctcttgcctaggtggacctgttcccactttggcttgaagaaatctcatttatttagtgtctgtcctatgaaagtcactgtagtaaaatatattttccaagatggtggcaataagatgccccattccaaatgttcttttcacaatgtgacactgatgctcctcccatcaaggtttgttctatgtcccctcccttaaaaccaggtggacctgtgactctggtagaagagttcctatgtgcttctaaggtaaggtcgtaaaaggcattaaggcttctgcctggtcctcgtgggttgttcctcttctaaccataattgttatggattgaattgtccaccccccaccaattcatatgctgaaaccctaattcccaatgtgactatatttggacgtagggcctttaaggaagtagttaaggttaaataaggtcatacgggtgagccctattccaaaaggacctagtgtccacataagaagaataagaggcaccaggagtgtacatgcgcagactaactgaaaagccagctggctgcaagctaggaagagaggccacatcggaagccaatcctgccaacaccttgatcttggactatcagcctccagatccacgagaaaacagatttgttgtttaatccacctaatttgtggtattctgttctagcagcccaaatgactgatacaataatatgtttccaacaagtgagacaggggccttgcttcacccatctctgtatcttaagaacctagcacagacctgacactaaccatgtagttggtgaatatctgctgaatgaacgcgcataaagcaaggaaggacaatttaatcccagcactttgggaggccaagatgggaggctggcttgagctcaggagttcgagaccagcctgggcaatatagcaagacctcgactctactaaaaaaaataaaataaataaaaaattggctgggcgtggtggtgcttgcctgtcgtcccagctactccagaggctgaggcagaaggatctcttgagctcgggagttcgaggctgcagtgagcagtgattgcaccactgcactccagcctaggcgacagagagagagaccctgtgtccaaaaaaaaaaaaaaaaaaaaaccccaaaattatagctaatatcgaatgctttttaaagcaggcactatgctagagagattacatgaatgatgtcatttaatcttcaggccaagtttgctctactttacccctcccggccccaacactccacagaaagtagtgagctacatggtagagggcctgcttttatgtggtggttatacataactctgagattacggcaagaaagtcaaatcgaactgagacagggactaaagttagtgtttacagtatcaatactataaagaaaataattacattcccaaggaaaagtacaaagaaaggaggtagtgtcatttggaagaaccttaaatatgcagtgtcactgaagtcaggggaagaaaagaatttcacggagaagggcgtgttcaatgcgtggaaggctgcagagtagataatgaagattcaaaaaggcaaatctgagaggagttgcagtacagtcgtgtggtttctagactacacggcgtt

SEQ ID NO: 14287 - DNA, 2300 bp, Homo sapien
tgatcagaatcttttctgattttcgttaaggaaatatttcaagagggactgtggcaccaagacagtgaatgcctgcccctgagccccgatgagaaggaattaagggccctgtgactctgtatgtgaccagaagccacatcaggctccgccaggcctggcaactgtccctggtgttctgttcttcacctcctgcggctcctgactcttcagttctcagttggaattgaggtcagctctctcgtttccttgtctggcccccttcaccacccacaatgcaaacccacactgagtgactaaccagcaagaggcccacagcaggtcccatagcaaccagagggggccaagcttgctaccacagcccacaacatgccaacaccccatttagacttttacatgagaaataaacatccactttgttcaactgctgttgttttgtctctgtgactaaatcaacaattctggcaaatctagaaagaagcagaagaattaggtgcaaagtgctggaagtttagcagcctctcgtgggagcaagaaagccccaggcaggtttctgtccacatcactttaatgtggagcactctcctagtcctctagatctgtctgttctatcaccttcccacagttcagcttcctgtgctccccaaaacttcaccttggaaacatatttaactggttctgacctttagccttgtgtgactttgtgggtccacagccaatatcaaataactacagacaacagaaacttggttaaaattctcaatagagggaaatgatcgctggacagtcagcagactcgctgttttcaggtcagctgctggctcagtcccctctgggtgccagggaaacctgacagctgagggttgtgagaagaagcagtttctctaggaactgactgacatgtctccctaaggagagagaagtgacaggcaactctagggaagatggctttcatggcttcataaagatctgactggctctttggcttcttttccaaggtagcccaaatctgttcctgtgtgaatatctttgtcgaaagggatggcatggtcaggtaggctgggtaggatgaactgcgggaaggtagatgaccaggatggggaagttctgatgaggtggggctgaggagaatgaagactaatgcccaagatcaaagttagggaaataaagtttcgctgccaagtccaaaggtcagggtcacagtggaaaactggacacaaagccaaggtcaggagccgagagaattggaaaagtggaaacaaaccagggaacaagactaggccgggcattgtggctgatgagaatgagctggtacccagcctagcttcactgtctctcaacctagcctcatgcacagaaaagtatcagcgaagagagggctgggtttaagtgatgtcaccaagggggaacaaaagaaagcagcgtttctcaacccaggtccataactctcgtgttgtgcacaagattgtgtacattttccagagtttgttaaagggaacagcgcccccaaaagggttaaagtttgattgtggaataatctggttatccagaagagaacgatctctgcgggctctcctgtctcgacgaagtcctttagtggctgagggtctcggccaccttccaaaggggcggaatccccctgcctcgcgtaccccaggggtctcggcagcgccgctattctgtgagcctattcctctcagaagcgccgagcactaggcctggaagaggacaagtctagcaaatgaggggacacgggcggagggagggattaaaagatgggggtgtgatccgtgccaatggggacacccactggttcgaatattaacgcgaggtttgtccgcttcttcacaatctgtccgtttcgttttactgcgaaagcaaatgtgttcccatccctctatttggggatacgattagagttccgggaagggggtgcagcgcccggactggcacaaccgccgttgtcccacctcctccggggcggcaacaccgcagtgccaggcctgggactgaggcgtggggtcccccctcgctccgtcctggcgccgcccgtcgccccgccccttggggggccccgtggcgcacccttgtgacgtagcgcttgtgtcgacatcggcgcgcgccgagcccggaagaggcgcgggctaggaaaggagttggttcgcgcaggtgcggcgcctgggtccccatggcgctgtggcgcggctccgcgtacgcgggcttcctggcgctggccgtgggctgcgtcttcctgctggagccagagctgccaggctcggcgctgcgctctctctggagctcgc

SEQ ID NO: 14288 - DNA, 2300 bp, Homo sapien
atgaaaccccagaggcctggagctgcaaggaaagtgggttagcccagctttcacagggaccatttggtcccactttagtttctgctccacgtgggaacaaatgtgccccttaaggcctttcagattgcgggggtgacgctgatgggtatttatgttaaagccaaaaccttcagctaatttggaagctgacaggattctgctaattctttgtgttcatacaggatctgctccctggccttccaggtcaggatcttgggtggggcacctggagcctccatttgcctctgaattttctagaaccaaattgcttttcttctctcatttcaaggtcctaggagagagaaccaataggaaaggccatgtctggaagcaatttgggtgggggcggggggtgtcttgaggcctgcccagcccagccctttcctctttgttcagcctaggcaaaggagccacagctgcccactcagagctgttttaattgtccccagaaacctaacttctagaaaaacaattggcttgcaaaggattccagactctctgaacagatagatgatcagaatcttttctgattttcgttaaggaaatatttcaagagggactgtggcaccaagacagtgaatgcctgcccctgagccccgatgagaaggaattaagggccctgtgactctgtatgtgaccagaagccacatcaggctccgccaggcctggcaactgtccctggtgttctgttcttcacctcctgcggctcctgactcttcagttctcagttggaattgaggtcagctctctcgtttccttgtctggcccccttcaccacccacaatgcaaacccacactgagtgactaaccagcaagaggcccacagcaggtcccatagcaaccagagggggccaagcttgctaccacagcccacaacatgccaacaccccatttagacttttacatgagaaataaacatccactttgttcaactgctgttgttttgtctctgtgactaaatcaacaattctggcaaatctagaaagaagcagaagaattaggtgcaaagtgctggaagtttagcagcctctcgtgggagcaagaaagccccaggcaggtttctgtccacatcactttaatgtggagcactctcctagtcctctagatctgtctgttctatcaccttcccacagttcagcttcctgtgctccccaaaacttcaccttggaaacatatttaactggttctgacctttagccttgtgtgactttgtgggtccacagccaatatcaaataactacagacaacagaaacttggttaaaattctcaatagagggaaatgatcgctggacagtcagcagactcgctgttttcaggtcagctgctggctcagtcccctctgggtgccagggaaacctgacagctgagggttgtgagaagaagcagtttctctaggaactgactgacatgtctccctaaggagagagaagtgacaggcaactctagggaagatggctttcatggcttcataaagatctgactggctctttggcttcttttccaaggtagcccaaatctgttcctgtgtgaatatctttgtcgaaagggatggcatggtcaggtaggctgggtaggatgaactgcgggaaggtagatgaccaggatggggaagttctgatgaggtggggctgaggagaatgaagactaatgcccaagatcaaagttagggaaataaagtttcgctgccaagtccaaaggtcagggtcacagtggaaaactggacacaaagccaaggtcaggagccgagagaattggaaaagtggaaacaaaccagggaacaagactaggccgggcattgtggctgatgagaatgagctggtacccagcctagcttcactgtctctcaacctagcctcatgcacagaaaagtatcagcgaagagagggctgggtttaagtgatgtcaccaagggggaacaaaagaaagcagcgtttctcaacccaggtccataactctcgtgttgtgcacaagattgtgtacattttccagagtttgttaaagggaacagcgcccccaaaagggttaaagtttgattgtggaataatctggttatccagaagagaacgatctctgcgggctctcctgtctcgacgaagtcctttagtggctgagggtctcggccaccttccaaaggggcggaatccccctgcctcgcgtaccccaggggtctcggcagcgccgctattctgtgagcctattcctctcagaagcgccgagcactaggcctggaagaggacaagtctagcaaatgaggggacac

SEQ ID NO: 14289 - DNA, 2300 bp, Homo sapien
tggctgcttagtctctgaggaagcctcacttccccagttcccagccattctctccctctaagagtgaatgaatgcccaagacttcagggtgctcagagaagccaagccacttcctcagagactgctcccttggatgtctcttgtcctaaatggtgttgtttatgacagttctcagtgcaaaagagatagctgcaccgcctgatgccagcctgtgtgcatggcatggagaaggcacacaggaaatgttggttgaatgaatagccctggcgccaccaacacagatgtttatcaaaactaatggtttgcagtcagggctggagtctgtcctcttttcctttgttctggttctctaggacttggggaggagagtttttactaggtctcagagctgatgagatctgagtgatgagatggggcaaattctcaagttcactgagaagcagtgggaggcaaagtctgcatttgaagatttggggcttcccagttttggccatttttcttcaccacccaaagacatatgcaggtacttttcactcagtgcttgaatgtgaaaagcaggtgcacagagtaaggctgacccaggctttatcctgatgggctctaagaagggggcacatctattctggggacacattcttcctgaccgagtgcagctgagatgctgcctcgtctatctcagcatccagcctccccacaatgcacacatctggtcctgcagcccagagggaccaccacacccgcagtgtctcttcttggggcttttgttcaccttgttctattctcctactccttgcctctttcgctgctacttgttaagattcctcctcctccactcctcaagacctgcctccaaagctatcccatctcaaacctttccaagctgcttcaaatccatgtggtttcctttcccttttggcctcagccacatgctgcttgtccttttagcccttctctgactctgacccatgtcctcatctcctggccgactgggcatggcttctgcattgtcactctaattactggtagaaatgtaaggacaagaaagagctgagggcagcccaacacccaccatcaggaacttccttacagattagctacaactaccatcttccactcatcagacacaaacatttatagagccccctactccacccaagcactggggttgcaacaatgaacacgactttacctcttcttgtttctcccctccaagctccagacacatcgactttctacaatgccctcaaacccaccatgtcctcctgcctcaggctcttggtatatgatctatgcctgaaacatcctaactctccttctcttcttgtttattcattctgatcttttagagctcaactcgaacaccaattattcagggaaagctatgcgggaaccaccaccaacaccactgctccttggtctggatgttttctctgaacccctaatcacaactgtacctacagtcattcattatgttgtcagttgtttcctattcatcctcaaccaaacccaggatggaagctccctgagggcagggccatgcctttcttgctcactgctctatttttattgcctacaacaggaccctacataaaggaagtgctcaacaaatatattttaaagaaataaaatgtatcattaaagacattttaaaaatatcatcttgtattctagtctaggagacttatcaatgggagaagcgtggtcagtgagcatgagagccaggcactagtgattaccatttcacatgccattccaatttctagaaaacaccagaacaggacggaggggaagaaagatgctggtgaaggtgctttcctcttgcaacacactgctcccacagaacactgcaggcagagtctgagataggaggagtcctggtaacaatgcatgttggggattgaaatttttggtgtgctccatcatagaagacccagggactgtaccttatgagattcagctagccatgggctgagctgtgcaagttcacctgctgtcaactgaaaccaaatgggttgtagagtagggcctttgtagaacttataaaaacataagattagcagaatattattcaccatagaaatcaggaaaaaaatccctggtgtgattccatcctgcatggctgttctctggagcagtagtcatttatctccatccaccttctctcccacctaagggtgtgccaccatcccaaggaagattcgatggacatggacatgagccccctgaggccccagagctatctttttggttgcgaactaaaggccaacaaagatgatcactttaaggtggataatgatgaa

SEQ ID NO: 14290 - DNA, 2300 bp, Homo sapien
atagagtgggttttattaaaattgtgatttaatcagaagccagaaatatacaactgttttaaactttttgatattaacctgatatacacagtgggctgataaattagtgagacagttcatataagtcatatatgaaaatcagtctgttattagccacaactcatgtatttttcaaaacttggagataaatgtaagcttcatctcagaagtcatattacacgttataggtttaatataatgaaatttttccagacttagaaaagatatcaggaaattaacatttgcaaggcaatttacagttttcaaagagcttttctcattaattatctcagaaaactgaataatgatgtgattattaaaggttaattaagcaaatacttgtgaagtaattgggaggtaatctatttctaatttaacaggtcaatcacgggtatttaggaaatatttttgctggttaacaactctaaccaaaacaaaaaggtatttaaatggtttccctagtgaaaaaccataagcatgtgtttcctctattaagtcaattgtttcaaagaactagcatgagaattcctaatttcaccgttttgatgatttaaggttttatgaagattctgagctcttccctcccgacgttaatccatgtcttacattgttcattttggcgctttagaataaaatatctttggaaagtaactatgagaaagcacagagggatatgttagtgaaatagccattttcttgtgggaagcaagacatttcggttatcgactacacagaagagtgaataaaacccaacgcctatcaaccaccaaacgtgactctgcttgcataatcatacaaataaattttctttaaaaatttttcatgggtgcagtatataaaatgatcaatagtctcatcagcagtggaactacaaactgctttctcctaactttgtgtagcctgggtgctgcctcacgattactaagtggtttaaaatcatatcccacttgctccttggtttatcagcgaaagacgtgattcccaggtaggaaaacgccaagtgtcccgcaaaggtacaggtaaaacgtagcagttactgcgagaagactggccccggggagtcccagggctcggtcggggcccccgcacgagctgaggaagtggacagcgggcacctttgtctgtgcctagttccctggacccgggccgagcgatgcgggtgggggcgcggttcgggcgggtcccggcgctgcccgggggaagcgcgcggcgacggcggcccggcttgggagccggaggtcagcggctgcgcggccggccccctcccacgggagccgcgccagggcccagcaagagtcgggcgggatcgctattgtttttggcgagcacataaatccccgggccgacccactgcgcacccaggtttcctcccggaggcctttcggtttcctctgaggccctatatagaggctccaggcccggactgtgcagaggtgcgcgcccacgccggcctcccggaccagcctgagctcggagcgcctctcgccctcaggtctctgcagccagaggcatctggggaggtgaggggggaatttgtccccgaggcgaggaggaggaggcgggggcgcgcggagccgaggggctgcggcgagcgggcgggaggagcaggaggatccgcttctccggggtttccctgacgccagcagcagcgcccggcgcgcgcgccccgcacccgtcagcggctccggggagaagggggaggggagcgggcccgccacggcccgagaggcggcagccgggattggagcgggggcgggccgcgcgcggagccgagggggtgcgggcgaggcgcgcgcgtgcgcgtgtgcgcgcccgggactcccgccccccgcccccgcccccgcccccgccgtccgcggtctccgcccccctcgcgctggtgtgtggagccggagtcggcggcgggtggcggcgcctggaacctggagaccgacccaccgcccccccccccccgccccggaatgtactgactccccttcttcgctctcctcccctccccgcccccttgcaggagggaggcgccctggagtctcccctccagcgagaggggctgcgcgggccgggccgggccgggctgggctggagcagcggcggccgcgggagccgagcttgcagcgagggaccggctgaggcgcgcgggagggaaggaggcaagggctccgcggcgctgtcgccgccgctgccgctcactctcggggaagagatggcggcggagcggggagcccggcgactcctcagcaccccctccttctggctctact

SEQ ID NO: 14291 - DNA, 2300 bp, Homo sapien
accctccctagctactccaaggccagcaatagctccctctgaaatctctcatggttggggacatgatttaatatacatttctttcctgtcttcagttttcctgctctattttcatgccctattcctgagaatgagtctagcttcctcacaacttgaagcccatcaagggcaagacctggggctgctcctcctctgtcccctggactgttggcacaccaccagtgtcctccattagggtttccacataaaggaggcaggagaagccagatctcatcagggtttatcaagggcctgatttatctaatagtcattgctgcacctaaagttggtcctagatggtcgtgaatgggtgccactaatgaaattgagggcgagtgaggtgctggtagggtggaattaagagatcctgacccctggccggcctgtggcagcagtatcccaggaagcagaattttggtcttatcctccatctcctccaagcatcccctccaatgccattagctaacttctagggtccctcactcatttgtagagttgaaacttattaatctgctttctgtccacccttgtgttggtggagaggtccctgagataaggtggacctgctccaccctcagggcacagactgcactgtgtaatcagtgctcagggtcacaggagctaatgggccatgggaaccaaaggcagggacatgaccaaggttttggtgattaggaaagggttcccagaggaggagatgtctctaccataggtcatggggaagcctatatgggctgacttcctgagcggggttaaggcagactaactcccagctagacaaagaagctcaaagaagtgtgttaaatggaggtcttccctcctgtggctggtagaccagggcaggctgggctcacagctctttaagaacacttcttctcaaggagacccaaggacactcagggattaggcttccagcatctgtgcagagaactgtcagctcagagctgctcaaaagtaaaaatgccagctaccagtgatgtcatcaccctagtcattcctctcactgtgggaggtcctgtggtccagtgggtagagcagaagagcccctgctaggctgcccgccccgcatcctgctctccaaattcctactctggatggaggaggcgaaagtggtcacattgggctaagaatgagagtaaaaaaatcatttgaagaaaaacttgatgttattcctcagagagatggcagagccaggggacctttttgcctccctcctgtgagactttgctgtgtgtccgctccagcattaacctcggctccagccttctctggacaactcccctccccttaatgcccaatctgtccccctatccatttctgagctaatctggggtatcaggctgtccatggtgttggagggggtagggctataccttaggctgagctagtgaaatctgtccataagcccggacactgtacactgggagagactgggagagaggacacacagttggatccttggcgggggttggggggaagggggctgggctgcagactggaagggagtgggggctgtgcagctgcttgggggtgcaggtaggggactgggtggaacaggaactcacccagcgtgggtccacatagtaggtgtcataatgtggatgggaacacagggagaaggggctccaaagccagttccagagtgctggggcgtccgaggaaccggcccaaccgctccccgctgcagccggcttgtccctttctcggaactaccgagggagaggcgcgtgcggaggtcggcgttcggatctcgcatccgtcactgttgccggcgcatttcctcgaagtcttacctcgaagggctgggtcccacccgcgcgccctgtgcgtgtctccctgtttccccacgccctccttgcctggctgctgcgaggctttgcaggggaaagactggcgcggggttcgcaccctgcccatgtcacaggaaaaccgtgggagcctccccgacgcggcgcatttccggaagccccctctccaggagggttgcgggaaggccgggactctgcatccagacgaacccggtcgcctcccaagaggaaagtcggagacccagctgaggggcaaaaatgccagggaaaggcgagcccagagcttggtgatggagaaattgggaagccaccccccacccttcaatcttaggatggggaattcgcaactgaagccggagcttcagacttggggcgcactcccagcttagcccaggaaagagatttaagggcgcagcagtgtggatacctctcaccccggccccgaaggtctag

SEQ ID NO: 14292 - DNA, 2300 bp, Homo sapien
tgacttcaacaagctcacgcagctggcaactgacaaacctgggattcaaaccaagtttttaaccatttattcctatattaaatgcagtactgctgtgtcatttatggatcttcagaagcaatttctgaaacctgaccccttcagtaagctttactggactgctggaaagataagtagcaggccccgcttgccttttatccaatttatcccatatgcttccgagatattaacctgcctggaccactactaggatagtgtcattctcccatgcaaatttttcatattcctcatcacctaccaagtaaaattcacattccttagctgctgttcaatgctcttttgccccaactcacctctgtagcctcattttccttaaaaaacaacttcgcattctagctggtcatgtcattatcctcatttccacaactttactcctcaacttctccttcgtatggaacaacagttccttccatcttccctcgggaaatttttctcacccttcaagtcctcactcaaataccactgccactccctattgggaagatttttacttcatttgaaccctgagagtacatggtttgtacctttcctgtggcattaactgtcaggtgtcatgggtatatttgcatcttgcttgttttccttattagatcctgtgatcccagaaggttagatacatgccttatccgtttctgtagcccctatggtgactagcatagctgtttgcccattgtagatatttaattgatactttgtagagtgaatacattaccacctctccaaccattgtctatgaattgaatatcctttggtatgcatagctttaaacattgtttgcgttttaattctattttatgtatttggttagcatagtctctaccctctgtatactttgcttctaacttgacatagattgtatgaatatctaaattctttgcaaatgaggtggacacgtggagattgtggagtccacagctctactctggctctgccgttcactggctgtgtaaccttggacaaaccacatctactctctggattattttatttattttattttattttatgagacagagtcttactctgtagccccagctggagtgcagtgcgacaatctcggctcactgcaacctccgcctccggggctcaagcaattcttgtgcctcagcctcccaagtagctggggttacaggagcctgccaccatgcctggctaattttttgtattttagtagcgatggggttcaccatattgcccagggtggtctcgaactcctgagctcaggcgacccgcccacctcggcgtcccaaagtgctgggattacaggcatgagccactgcgcctggtcactggaccttattttgcctccatctattagatgggggtaataatccctgctttacttctttaattcactgcaagtttgttgggaggataaaggaaataacagatgtgtaagtgctttgccgcctataaatcacccagaaatgtcgtttcattgcatctgctgttaaatgcaggcacatcttttgctgctggcagcccccacccatctgctcctctttcggtgaaaaattgactgtcgggtggcagggaatgtcgagcgggcggcaggatggatgatgaagaagcaaccatgtctcctgaatggcgtgtggcactggggctttgttgtggtgggtgttaggtgaagcggggacattgtcttctgaaaggccgctatgaggaagggaaaagcctgtgtccaggcagcctcgactaccagcctagtcccagggtgtacgctacagggagtcaggcagtttgggaaacttctcagactcagagcttcagaagttgacatgggctgcctgagggaaggtgtgggcccgaatgctgtgcaagtgcgacatcaacttccactaataagggtcacaaccgcccttcaacgtagaagcaaccatctcggtgcccaaggtcaagagagacaccgaagcccggaaatgccctaagcgggaatcttcggagcctgcccattggcttctgctgaacgggagggtgggccctggggcgctccgcttactgattggttcgatgccagattggcaggtccccgccggcagtgcgtgtggtgaggcaggacatggcggaggcaggaaaagtgcccttgagcctcgggcttaccggaggagaagcggcagagtggcctctgcagcggtacgcccgctgcataccctcaaacaccagagacccacctgggccatgcctggaagctgggacagccccctgccccacatggaaggtgaggcccgaaggcagga

SEQ ID NO: 14293 - DNA, 2300 bp, Homo sapien
agctccttattcatttctaggtctgtcttctccctatctcaccttctcactcccacctgcccttagtaggatataaagcatgcagcatattttagtaaatatttgttctcttttatttgtttgttttgttttgtgttaagacagggtcttgatctgtctaccaggctggagtgcagcaacctcctgggctcatgtgatcctcctgcctcagccttctgtgtagctgggaccacaggtgtacaccactatgctcagctaattttatttttgattttttgtagagatggggtctcagtttgttgccaaggccagtcttgaactcctgggctcaagcgatcctcccaccttagcttcctaaagtgctgagattacaggcatgagcctctgtgcccagccacaaatatttgttgattgattgaataacctttcctctaacctctagtccttaaatgaaaggaaagttatgaatttcccccagtctgactaggagtgagttcttagcattgtttgtggaggaagtttaaggagacttcctcagaactcaccaagtgtgaagtcagtgtgctgactctgaggtcatcagagaggcctgaggtccccgaggcatgcctgactgtaggggttgtacccctccttctgccgtcctctttctgctgtggtttcttacctggtgttggaggcagcatttactaggttgttggacttttctgagtctccaggcagtaggacctgcactcacttcgtggaagtcggggaagtctggaggaccgatggtaagggaggcttgcctggctctgtcagaagttgatttgttgttgttgatactgaagggaaatcattaatgaaatgttcctagacactgcttcctcattctggctggtgcctaaaaagaacggagagcagtgtcaccctctcttgaacattagctcagttactcactctcacctttgtgtattctcacttttttgcaggacattgtcaatacctctggccgcttcttcatcatcaacaaggaaaattacactgagttgaacattgtgaacctgcagatcacggaagaccctggcgagtatgaatgtaatgccaccaacgccattggctccgcctctgttgtcactgtcctcagggtgcggagccacctggccccactctggcctttcttgggaattctggctgaaattatcatccttgtggtgatcattgttgtgtatgagaagaggaagaggccagatgaggttcctgacggtaagagcatccctacaaaatagctgtactgctggggttggttccttcgggtggtttccaagtacccaaagaggactatagggatgttgggattcaatccctaaaggaaagaaggaaaattcttataccagttcctaaccccctacccgtaagagttttttatttttattttttatttttattttatttttattttttttgcattagccatctagagctgtccttagctctctccctctgtttgggtgttttccaaaccctagtcccatctgcctttcaggccccatgtggtgaatgggcagctgtcagtctctttgttcagctctgtcctccttcaatacagatcatcaggcagattgagcttgaggagaatccaagtcaagcctagaagccaccccaagatggcaggccacctggcctttcaggcagatttaaggtatctaactggttgtcacatggttgcctggtgtagcccctgtaggtaactgccccagcccagtcagactgttctcagaaaagccattggaacaagccagcttttggttccttggttggtccctttgataggtttccagcgctctctgctgggtggctttccatctgtgtctcacagacaaaggagagtctgatgtatccacccatctagtgtaagacagagatagcaaaggcggaacaaatggagtccatgccccgaggctgtgccctcaagctggcctagggtcagagaagggaggagatggtagcagcagaaccacagcacaccactgagcactggaaagagcaagagctgaaatcttaggttattggatatgcctagagtcagaaaagccttgggaaatttttggtgatcgatttttcctgtgaagggggaagctgctgatggagacttgtatctgcagtacttcaggttcccagctggctccccatccccaccctataacatgaccggcgtacagaaattaattggccgactgttaccaccactagtctgtccctggctagactagacagatgggtgtgcccctgggctcagtggtagcctacccggggtgatg

SEQ ID NO: 14294 - DNA, 2300 bp, Homo sapien
cctatccacaaaaagaccatgatcattttgtaagaatctcttgttgtaaggatcaaagagccacatttgttacagctataatgaggcagaatggttgcatccaaccaaagcttccatcagctgaaaatcttgatcccaccacaggcagccctgtagccctccttactgggctgtctgcagaatggcctttgtccagatgaaggtacatgccaatctttttgtcactcacacacctgaggttttgaaggacatagttttcacttcaatcaacaacatgccatagtggtcctggcctttgctagaaattttggtctggaaccaccagctgttcagttcctgttgaaagttccagaccactttagcttgatagagattgcgagggtctccttcttccaggtcctccaaaccctctctttaaatcaagtcaggccaccaggactgtttacttggcccctcagagtttccacagacactcccaggacgtctgctgtgagtcagggatgagctaagccatagaaattcctttgccaaccacaagccctgagggtagtacaaaaaatacccctaaaaagagcatttcccaaacttctatgcaaacagtagtaaccacactgccaatcaccctccagagtgctttgctagatcctttcctatggggccatttgacccttcctcactcctctgctagcctaggcagtgcactccatgaggacggggactaccttttcatgtgggtttcactatgtgcctggcacacagcacgttctcaataaatgttttccgcattaagacgcttcttaggagtcttcatgtaagttcatacacgacttccttgtagaattgtgtcaatgaacatgcaattaggctagctgaacttcaggccctgagagtctatgaagctaaaataaggcccagatgtggggtgggagggggagtaggcagaggcggcaaaggaggacatttcaggcaaagggagcagatgtccaggcaggaaagcacaaggtaacgggggcacagggggcgcaccacttttcctggaaggaaaaaacagcagatgagagaaggaggttggagccagttaccagtagaggtctatgttcaaagtccagaaggaagaaacagcaggacggggacaaagagaggaaggaggaaaggaggcacggtgtatgaaactctgtagccaagagcgctaacaaatgaaaggcaggatgggtggaggaaatgtactgtgttccaaagcttcctcttatttatgggtgctcccgggccacagaggagtaaactgaaggacttcccagctccccactgcccagagagctagcggagtcccgcctcgccccgtcacatggccagaggcgccctcggcacgtgacctacctcgcgctaggccaatcagcctctgcaggggcggggccaccgagtccgcggggcgggagtctccgtcggagccgcctcttctcgcgatccttgcggcggtcgctcctcagccgcccacgacccggagcgaaggtctcgcgaggcctgggcgctgcggcggcaggaggaggacggggaaggacggagccgagccgcggctgcctccctcgctcactccctcgcgcactcgcccgccccctccctccctcccctcccttccccggccccggctctggccccggcccattcgctgttgggtcttctgctagggaggatgtcgggttcgtcgctgcccagcgccctggccctctcgctgttgctggtctctggctccctcctcccagggccaggcgccgctcagaacggtaagcggggcgccgggggcgggccgggcgggggttgaggggcgccggggccggagggggcccggctctggcctgaggagacgctggagctcggggaagggggccgagtgggcgtctgaggggctgcgggtccgagaggaggtaccggctgcgggtttgaggaggcgcgggtgtgaggaccggaggctcctatccgagcggcgggggcgtccggggtgagcccgaggtgttgcccactcggaggctccacgtcgtggggctcgtcgtgccgggtcggcgaggggacacggaggaagccgacgtggggagctggagtagcgggggcggatgaggagggggcgcagctcttagggagggtggcacaagaccggcgtttgtgttccgggcgacggggatggtggtgtccgtcaggccccccgggagctggggtcgtccaggattctactgaggccccgtaggactggtgacatccttaaaaataagggggaaattggggggaagagagtcctgaggaacact

SEQ ID NO: 14295 - DNA, 2300 bp, Homo sapien
cataaatttactcatttattccttctataatcttggaaggtaggtgctatcattagcaccatttgacagaaaataaggtccagagagattaggtcatttgcctaagatgacagagctcctggatggtaatgttggtgttgtggacttgaatttcatctttccattagccggaacagtctatgttatgtcacaggaacaaataccccttgaatctcacagtttaattcaacagagggtacctgttctgtatgggttagcaggggggttaagcttattatgctaactcagggactaatgctgacacaaggttcgttttgatatatgctttcatcgtcatgatcagtaatcactaccaagacgaaagagtatgggaaagagtctaaactggaaatgaaatgcttctgcttgaagcaatgcatgttactttacacatttcactgacccaagcacatccaatgccactcccgacttcaaggggacaagaaaatgcacttctaccatgagtctattaacaagcaaaccagattgttggcattaatgattaatacaaacattctgagagctggagccgttcgtgtcctcctttggcttcagcttccctatccacaaaaagaccatgatcattttgtaagaatctcttgttgtaaggatcaaagagccacatttgttacagctataatgaggcagaatggttgcatccaaccaaagcttccatcagctgaaaatcttgatcccaccacaggcagccctgtagccctccttactgggctgtctgcagaatggcctttgtccagatgaaggtacatgccaatctttttgtcactcacacacctgaggttttgaaggacatagttttcacttcaatcaacaacatgccatagtggtcctggcctttgctagaaattttggtctggaaccaccagctgttcagttcctgttgaaagttccagaccactttagcttgatagagattgcgagggtctccttcttccaggtcctccaaaccctctctttaaatcaagtcaggccaccaggactgtttacttggcccctcagagtttccacagacactcccaggacgtctgctgtgagtcagggatgagctaagccatagaaattcctttgccaaccacaagccctgagggtagtacaaaaaatacccctaaaaagagcatttcccaaacttctatgcaaacagtagtaaccacactgccaatcaccctccagagtgctttgctagatcctttcctatggggccatttgacccttcctcactcctctgctagcctaggcagtgcactccatgaggacggggactaccttttcatgtgggtttcactatgtgcctggcacacagcacgttctcaataaatgttttccgcattaagacgcttcttaggagtcttcatgtaagttcatacacgacttccttgtagaattgtgtcaatgaacatgcaattaggctagctgaacttcaggccctgagagtctatgaagctaaaataaggcccagatgtggggtgggagggggagtaggcagaggcggcaaaggaggacatttcaggcaaagggagcagatgtccaggcaggaaagcacaaggtaacgggggcacagggggcgcaccacttttcctggaaggaaaaaacagcagatgagagaaggaggttggagccagttaccagtagaggtctatgttcaaagtccagaaggaagaaacagcaggacggggacaaagagaggaaggaggaaaggaggcacggtgtatgaaactctgtagccaagagcgctaacaaatgaaaggcaggatgggtggaggaaatgtactgtgttccaaagcttcctcttatttatgggtgctcccgggccacagaggagtaaactgaaggacttcccagctccccactgcccagagagctagcggagtcccgcctcgccccgtcacatggccagaggcgccctcggcacgtgacctacctcgcgctaggccaatcagcctctgcaggggcggggccaccgagtccgcggggcgggagtctccgtcggagccgcctcttctcgcgatccttgcggcggtcgctcctcagccgcccacgacccggagcgaaggtctcgcgaggcctgggcgctgcggcggcaggaggaggacggggaaggacggagccgagccgcggctgcctccctcgctcactccctcgcgcactcgcccgccccctccctccctcccctcccttccccggccccggctctggccccggcccattcgctgttgggtcttctgctagggaggatgtcgggttcg

SEQ ID NO: 14296 - DNA, 2300 bp, Homo sapien
cattctctgaaccaaggagacccctgcatgatgggatggtcattctagctatctgtgtccagatccaagtgtctgagtctcagatgagctggtcctacacatgtgctatctgtgccctgcccaagctgtttccccctcctaggggatcagagccctctcaatctgctgcttccaggaatgagagccaatacacatttccttccctcctgacctctgctcttgaatgattattttaaaatctccccccatagacacactataaactgctctgtgatgttccttcactgtccaccatggctgagtcatgccagattataaatcccttaggacaggaccagcgtcaccaccgcaaggcacaaggcacaggactgactctttgtgaagggaaggaaagtaagtttctctagatctgttcaatgccacctccagggtcctgcagcagggctcctagctccctcagcccaaggacacctctccatgtgatgctacttccccaggttgctgggccaactggaggctactcatcctgagacctgtaaggccagacccaggctggacgaggctggtcagggcctggcagggcagtggggagcagcgtggaatggtccagagttcctggaggtggtcagggacaagacagctgggcctctctgctgtcatccctaggagcagtcagcaattacacagacacagctgctgtgtgattcaaagacacatatgcacgtagactcaaatacagagttgcttgaatgtgttcacaaatatacacacccggccgggcgcggtggctcacgtttgtaatcccagcccttttggaggccaaggcgggtggatcacaaggtcaagagatcgagaccatcctggccaaaatagtggtgcgcacctgtaatcccagctactctggaggctgaggcaggagaatcgcttgaactcaggaggcggaggttgcagtgagccgagattgagccactgcactccagagccagactctgtctcaaaaaaaaaaaaaagacaaaaaccccccacaaatatacacacccatgcaccaccacccctacccatacaccacacgcacacttaaattcagagggcaaatcccggttcctcccttcatagctatgtgtccccaagttacttaatctctttgtatcttaatttccttatttccgatctgtaaaaatgagaataatggtattcacctcaatgagttgttgtgaagattaaatgagataaaatggtaaagagcttacaacagtggcaacacatgcagagagacgcacatgttttcatactcatttcccaagccctgcccagtactgccactggcactggtggtgagcctggcagcagtacaaggttggagtcccttcatccctttgagccttggttttctcatctgtgaaatgggaataataatatctagccggcggggctgtttggaggaactaaagaggcccagcatggaaagctcctaacctaactctggcccacaaaagtctccctacgttttagctgtcactgtccctgtgaggaagaacagatccaagaacaggtgcagggatgggctgcaccacagcaaaatctggacaggcccgacccccatctcctcccaggctggagcggggccctgtaaggacagagcccaaggccactaggtgtcaggcctgttggagccaagtccggccagcagtctggggtggggctgggggcagggctggtcggatggccgtgggtggaaggaaaagaggaaaaccagctcagtggaaattgtcctgcggttggctcaggcgcccacgacactgtatttatagagagctccttgcagctcttaattcctcgcagtcgagttaaccctttctgggctgtggtgccagcatggtgtggaggaagaacccaagactggggttggacagcaggattccagccctgttctgccgccagtcgatgaccagtcagtcacctatcccctctcgcagaaaggaagattcggctcttggaagtgtgggaacggggtgggggatgggcagcgccctgctccgggagccgagggttttccccgccagggtcaggcctgggggcggggcggggcgggggcgggggccaggccgtgtgctctgcccagcgggctggctcaggcctcggtcagcagccgccaccgcggggccaatccggcctcagggacgcaccggagccgcctttccgggcctcaggcggattctccggcgcggcccgccccgcccctcggactccccgggccgcccccggcccccattcgggccgggcctcgctgcggcggcgac

SEQ ID NO: 14297 - DNA, 2300 bp, Homo sapien
atatcctcatcacatttcaaattctcatcagcatctctgctctgagacggcttcctccgtggggaagacaaagctgagggtctggcgccatcttgtggccataaagaagtgcctgtctctacccacggctgctctgatttctctagagcaagaaagggttttgtctgggtgacttaccaggtttcattcccccaaatgtcccctccaaggggcaccctggttcgactgacagggcatgagaactggcctggggcaccaggggtttcagcaagagatccaaggctagcttaagaactttagagatctctaggtactgcaaagattatgatactgagtatgattcacaataaaaataataaccataaagtcaatgttatttttctaaatgcaggaaacctttaatgagtgctgtattcaattagcattgtttcaaggttgatcttcccacattttgagtgtgcctgctttgctagtgctcgaagcacacaatctaaccattaccggagaatggtagtgccagggtgggggggttcgcttcccctcctcccctcctcctcctcctctttttttttttttgagatggggtcttgctctgttgccaaggatggagtgcagtggcgcgatctcggctcactgcaacctccacctcccaggttcaagcaattctcctgcctcagcctcctgagtagctgggattacaggtgtgttccaccacccctggctattttttagtagaggtggggtttcaccatatctgctaggctggtctcgaacgcctgacctcaggtgatccacctgcctcggcctcccatgccgggccttttcccctcacttctgactcatcagcaagtcctgttgattccctcctaaataaaccttgaatctgatccctctcttcttctctactaccaccctttgaagccacaccaccctcacctcttacagggacagctgaaaccgcccctaactggcctcccccttgccctgccacagtccagtctccacagaggagctagagtgagttttaagcattgctactcagattatgcgtgattaaaacactccccagtgattcccattactcatagaaaaagttagattcctcactggtctcttcaagtcatctttggtctgggtgggacatgccctcccatcagatgtgtctgccacactggacgctccccgatattttcacacagcaaggccagtcttgcctcagggccttccacctgctgtttcctctacggggttctctgtatgtcagctctttttcattccctataaatttcagcttaattgctttaaagagcatgtgcctcaccaccatatttaaaggtacgggtattctttcttgtataaaaacaaatcgtgtttcgttaggaaaagaaaaaaaaagaaaaaaagaaaaagcacttgtgattctctctcctccagagaaaccactattgacatttttggtggatacttttttggactccccaatttataacattacttacgctcatggggaaatgcacatggtgcaggcaggtgtaaagtacctgccagatttttgaaaagctgttgctttacttactaacctgctggctccttttcctcacataccttagtcacatgctgacgagaatctgtgtgcccatttgtctctctctcccattaaaatgtaagttctgtggggatgtgaccgtagtattgctctctgttgcatttctgacttttatgcttggcacctgtaggtgctgactatattcttgactgaatgaggtcctaagacaataaattactttgggtctcaggcctaaaaggaggggtggacagggcctggggttagcaggggcagggagcgggactagggaggcccacccctcctcagtcccccttatatgttctccactccccctacccccaggagccctggaggtccaggtccctgaagacccagtggtggcactggtgggcaccgatgccaccctgtgctgctccttctcccctgagcctggcttcagcctggcacagctcaacctcatctggcagctgacagataccaaacagctggtgcacagctttgctgagggccaggaccagggcagcgcctatgccaaccgcacggccctcttcccggacctgctggcacagggcaacgcatccctgaggctgcagcgcgtgcgtgtggcggacgagggcagcttcacctgcttcgtgagcatccgggatttcggcagcgctgccgtcagcctgcaggtggccggtgagcaccaggagggggacgccttccccttagttcaccctccattccccct

SEQ ID NO: 14298 - DNA, 2300 bp, Homo sapien
tagtcagaggctggggatggctggaggttgggaaggagagggaagaagagtggtcagttggcagataggtgagtacttgtgaggtagacaggtggaaggatgagcaggtagacggctggttggttacatctgttggaggttgatggttggcagggctactgagcgagcggatgggtgaggtgatgggtgggtgggctggtggagggtaggtggatggtctttggctgggtgtgtggcgggggctccaggttgagtggatggtctttggctgggtgagtggtgggctccaggctgggtggatggtccttgactgggtaagtggtgcactccaggctgggtggatggtctttggctgggtgagtggtgggggcgccaggctgggtagtttttggctgggtgagtggtgggctccaggctgggagccccttcatgttgtcacaggctcggctctgctgtgctctgctctcgggctctaacccgtgtctagcatttggtccgcaggtcaggcccactcaggccctgttcaccagcttcctgcactctcaggtgggaaagtgctggcatgaaaatgggcttgcaaaagatttttgtttattctgagttcttgcctttgcaggagctgaggaccaggatggggagggagaaggctccaagacaggtgagtctgaacttggagctggccctcttggctgggagagggacatatgggaaaggagagaggactctaggatctggaggggccagatttgctgtaaggtttgaatgaaatgtgttctgtggactcagacctccccaccccggtgagtctgctctttgcccagagttaggcaggaagtggatcacccagttccctcccaggtgtggcttcatttctcctgccaacctttacccatctgccagggccgattccacctgattggccccacaccgtggagtctggtggcttcctaggggtgggagcaggggctccggagatagggagtctgggtttaagttcctgctccatctcaggtaaacagagtggccttgagcaagatgctttgcctctctggcttcggtttcctcttatgtaaaatgaggataatcacagattcataggttgtttgaattattaattgagataatgtatataaaggacctagtatcatatctagtgccaagtgcttaatactctggagtcctattactattaggcaaacagcttaagacaatactgttctagttacagactgtgtagctttgggcaaggtgccttgctcctctgggcatcagtttcccatctgtaaaatgtcatcctgaccctgccctgatggcaccagagggctgttttgaagctctttcaggtgactggagagggaggtacttgcaaaggacataggagcatggcacagtaagctgggggcccagcttgggtgggtgccaaggcactggtgcccatggccgactcccaggggatcctgggctgggagaggcaggtttccgctgagccatttgggatggttccagttaatgccagttccctccccacccccgcagaaggaagggcaggagattgacacttggggactgctataaattatgccaattaattctttgcctgttggtgcccagcgtggcaggcgtagagacagctctgggatcagacctcattcttcatgctcagaggcagatgtagttggcagaagggagggagtgaggagaagagtgtgggtgatggagttggtcagtctcattccacatggtcccaggcccacctgcaaatctgccagcctcctttagcttctcacatcaccctgtgtgtacattgggctcagggcacttccgcatctccagctggaggtggagggctcgagggttgtcccattctatagatgcagaaaactaaggcccagagaggagaatgacaagccacagagtggaactgggacctgggactggggcttgggacagcaacctagggccccttcccttgtgctatgaagtggtcccactctgctgacttgtcccgccccttccagccctcactcctccctctgcctgactccctaccccaccacttcccatggttcctccctcaccgtgtgcgccttcctttttttacagccctgcagcctctgaaacactctgacagcaaagaaggtaaagacacctgggcttgaggttgtgtctgtgtatgcacacatctgtgtgtgagaggctgagagggtgggtaggcatcatcctttcactagtgacctgaggccccctctgcagaagagcagcctcaacttccccctggtgagatggcagagggctgagta

SEQ ID NO: 14299 - DNA, 2300 bp, Homo sapien
cgataagctaacctcggacttcgactttgaactggagccggacgactggaccacggccactgtgagcagcacctctagcagtgacaaggcgggcatgggtggcccctttgacctgggccacctggacttcatgacagccgatatcctctcagacagctgggagttctgctccttcctggacgtctctaccccctcggactccgtggatggtcccgagtcgactcggccaggggctggccctgactaccgcctcatgaatggtggcacgcccatccccaatgggccacgagtggagaccccagactcctccagtgaggaggcctttggtgctggccccacggtgaagagccagctgccccagcggaccccagggacacgggagagggtgcggttcagtgacaaagtgctctaccatgctctgtgctgtgacgatgaggagggggacggtgagcaggaggtggaggaggaagaagtgggcttgccccctgagcctgcccatacagaggcccatgcaggcccccacaagccctccccagccccctacaagtcacggcgctctccactgaccagccgccactcaggctctaccttggcccctgaacagactcgaagggtcacgaggaacagcagcacccagacagtgtcagacaagagcacgcagacggttctgccctacacagccactagacagaaagccagggggaaaaactaggggccggggagggggccgggggcggtgggcacatagagctataaataaatatatatatatatatatatatatatatatttaaacaaatgaagtcataataaaatttaaaaatgctaaggatctggccccacaggccccaaagctttcacagagctcctcttagacatgaagatgcccattggcctcctaggtcccaggaggtgtgggcaggactgcccttcctccgttctcattgcggggctcctgaagggggtatctgaaagtatgtaaaactgatgggaggtctgatcctccttttgctagcccctgaactctgtggtggagtctggctgatggccagggccatgtcctagaggggactcccctgcaggaggcgggctctaaagggagtggtgtccctttaggccagggttcacagtcggggtggtctggagactgcaggactcagggcctgggggtggcatcagtctggccaggccctgcgtcacttgcacccaccatccttctactccaaggcagacttactcggctatacacagtcctgcctcacccccttccatcttagggttgcctgggacataggggaatggcaagctgctcccatggcgcaggcctccgtgctgggatgctgggcatccacagagcctgaaggatcgcctgggctgggcaggggtttgattggagggtctggaccacccccaatcctttcagctcccattctcagcctgattctgagaccaagaccaaaacctcagggcaaagcctcagccagtcctggcgtggccctaagcagacctgagatctgtgcgaggaagtaggcagccacttccatggggctaaaaattagggccgtagacaggctcctggccaccttcaccaggtgggcagccttggaaaggagcccagtggtccccactccgtcccgatgtctccacacccagcccctgagcccatctcagcaggtcctgaacaaagatgaggttacagcctagaggtaccagggcttcatctggggcatggccagcacagggacagcagctgaatatccttgggataataatgacaattatattgctcacatttattgagcaggtctctatgctacttctatgccgaatactttttatagcagcatctcatttaatcaccacaataacctgatgagacaggaagtattattaccccatttttctttttctttctttctttttttatttttattttttttatttttgagatggagtctcgctctgtcacccaggctggagtgcagtggggcgatcttggctcactgcaacctccacctgccaggttcaagcaattctcccacttcagcctccagagcaactgggactacaggcatgcgtcaccacgcctagctaatttttgtatttttagtagagacggggtttcaccatgttgggcaggctggtctgaactcctgacctcaagtgattcgtcagcctcagcctcccaaagtcccgggattacaggcgtgagccactgtgcccccacctatccccatttttcaaatgagatgactgaggttcaaagtagttcagtacctgccccaaagccacaaagcctg

SEQ ID NO: 14300 - DNA, 2300 bp, Homo sapien
agaaaaatgaactgagtgggtttctccctccttggacttctttaatgcaaacacctaaaataatattttccctgaagaatcctcacgtatagaagtttaaagcagaaagctggattcccatcagagatgagaaaatgcataacagaaaagcaatatatgggaaaccaaggcacttgggcaattatgtaaataaatggacatggtaaggatcattcagccctggaaaaaaatggacacatgtaattccctttcagaatctgaaaaaagaagaaagagggatggaataaaagccctttttgcttccgttacagagtcctgcagttctgtttgaatattaagcctccatgtggttgctatggggcttttgtaatatgactaaactgtattggctcatttggggaagggttatcacctacaattcacagataggatgccagaggttaaaagaagttcagtagttgatctatgttcaccatgttcgttttagaagccaggttgaattgagccctcagatgtttccaattcccgacctgatcctcatcttctcaaggaacaattgcagtgaatcctcagttgcctacgtggttaatgtggaagaacagagacatagataatcctaaatgatgtctatgtctcttgctctaaacatttgctttggaaacttcttgcagaccttagaatgaagccaccctaatgtgcaaggggccccatccttactccacaccttccctactcaacgttgcccacctcccactccatgaagacctaggggcagtagatcaaagggaagaggctcttaactctctcctaggttgagctagggtagtgggtagaggagagaggccgataataaggcattttgatttaaaaggccttctgcagtgccgcaggcaagcagaacagaaacagtaaatgagacaatgaattgtgtccgtggaagactccatatggacagtgattcattatgttaataaggaggtgaaagccagaggttgactgtattctgatttcatgtctggggaatctgtagctcagaagcggggagcatccaaatttgaggtcagagtccaaattccaacacccagctcctgattccaatttggttggtcgaattactatcatctcctaatgactaaggatgctttagagccagatgggacctgagtagaagtgcaagcaatgcttaaggtggagaagagtgatgctggagccaagcagagccaactccttgggtccatgcaacaaatattgagcacctaccaagtgccaagtgatggcagaactggcattgggagagggaaccacagaggaatctgatgttgaccctggcctaaaggaactcagggtaggaggtgatatggggcaggcacaaatctctgtcatacatacagagagggaagtgagatgaggtctaagacagcttcatttattctcccattcaattaaatcattaactcagctactcaggcacgatcgtaagtgctccaaataaaaagctaaacaaaactgatctccaccccagaagctaccattccaatgctgaagctaagtcaccccaggaggcatatcaaaacacattccccagccccccaggccccagcactgacatactgattctgaatctttataactggtacccaagacatctgaagcctggtttctagttattctccaactttgggcactggtctggtggaatagggagggagtccagctaagagagtccagaggaagagtcagagatagagagcaaggcttcatggcccacctctccctggaagccctccttgaccagcacagcccacactgatccccatgtcctctgaatccaacctccactgcgtgttctgcagttttgcatttttctgtttgttgttgttttttgtttttctttctttcttttcttttctttcctttttttttttttttccaaaactagcaggtttaatccctcttctcctgcttgtgtctcatctctaaaggtgggtgttcccgtgttccaggtcattgtgatgagagttccaggggacttgtgacacactgctggccggctctgttcaagtgtgggaggtcaggagcagccagttcctcctgggaatgcaacccatctccgaaaaggattaagcatcactagggctccaagtgagttctgatcagaggctgttcggaagacagcaggggccatgaccaccctctctcctgaaaacagcctctctgccagacagtcagcctccttcatcctggtgcgtgttctttgtcagctctgagtgcctccctccccagcctctggttggcactgg

SEQ ID NO: 14301 - DNA, 2300 bp, Homo sapien
aggagcgcagtcctggccaggggagtctgtgcagaggcccaggctatgttcagagcagagtttattcaaatagagcctaacaggaaacttggctcctctgactcactctgattcgaccttattaagaaaaaaagagagaggagcaggagccagcatcgggtaaggtttcacgccaagagctggctctgaggcccgctgagtggaatggcatgtgccctgatccccccacatccaaagccttgaggcagcccctgccctgctgtccgagtcaaggcgaggggtcctgccttcacgttagggcaactgagttcccttcctcacagccatcctctgtcctccctccactcctcttcccttccctccctgcctaggggtaccctgaggcctgtttccatttctccccctcctctgctgcagcagctgcccatctggctggcgggagggccctacaggaccccagggattccaagcagctgaggccaacactgcagggggcaagcaggagggagggaaggcttaaccctccaggtcccggccctcagtaagccctgcctcagcatcttgcttggtgtcagtcacaccagtggctctttggaggaatcttgtctggagtctgagatggaaaccccatgctggggagctgaggtgtcagcgttgacaagttgctggccaggaggtattggaagccccctacctctgggctggattctgggcatttaaagggtagagacatgctggagtccaagcctcagtcctgaagaacagtgcaatgggtgaacaaatgctgcctggcaaggatggggttgggaggtctatagttcccaaagaatgtccactctagttgcctcctctctaggtgggctccaggcatttccaaaataaagaatatacaggagccaaattaaggacaggtccttcataccttgtttataagcccaagagggcaatttctgcccttcggttcccaggaacacggttggagaaggcagcccaggggaggccagaagagcagtatttggagtgtgatttcttggatgccaaagcgttcaaacttctgggaccccctcctatccctgccattcccagaaggaacagagaatctcccaaagcactctcaggagccatctggcctaatcttccattggtaagccgtggcacctggatcagatagagtaagggactaagccacacagcaacaggaccaggccaggtctccggaacccccttctgttgttcaatgcttactggcttctctgcctcacagtgacccctgtcccatatcaaagacagcccccagtttcattttatccatgtgtacactcaagttattcccaggctatgcagagccaagagatgtaggacagaaaccatacgtgatgtctgggaagttgatctctcccaggatctcacaagtgcttttcagctcagggatacaccccactcttcagactgggaaagtaagcccctgaggtgtgccacgagggaaaaggtgcagctccagtgcctctcttcgcaggcccaagagctgcggtgcacctgggacctggaattagagagtggtccctgttcagcatctccccgaggaggcccaccaacaaagagggtgtgtcttttttttttttttcttcctattgagggtgtgggataatggtggaaggaacatgcaaagagggtgtgtcttaattagcactggctttagggaacaaggaaaagggagaacccgggagtacgggaaggaggctggggcagacaggagtcagaggcccattccagcccaaacgagaagccagtgagcaaggtggagaccagggatgctgtgaccaaagcagagaggaatgggcggggtggtgctgacaccccagccccgttctgcctgccagagccccacttaccaggcccgagtccccagaggtcccctcctactccctgctcgattcccttcctcagaggcaggtctgtggcttggctgggaactccagggactgagggagcactgcagctgtgggaccggcgcatagctaaaagccggcgggccatagggccccgcggaggaggccccagcaggcggaccaggaggccgaagcctcccgacgctcccagcctgttgcttattcattcagagtgggaaagcgccagccgagcggccagccagtgcggggctggccatgtaaggcccacaggcggtcctgcccgcccggtgccctgcggagagcctcgtgcagccctgggcaccgcccctgccctgccctgaccccttggccttgaaatgctgtcatcggaggagccgtcccgctcgggac

SEQ ID NO: 14302 - DNA, 2300 bp, Homo sapien
ccaagtcccaggcatgcctctgccaatattgtggcatttgagagctcagttttctctgcccagaggtggggcccatcaggctgagcctcatgctgaggtcttgcattctaagaaaagccactgcaaaagtttagcaccctctaggtaaaacatcctattctccaaggggccctagagcagctgatgcatggctataatgcgcccttctgcagggatgctgcaagtacctggtaaggaccagagcaggtggatgcatccttcatcacaccacagaaggacctgccatctgatttttcctgagctcctgcaggttcttaaagtgggattcagcacacaactcaaaagcgacaccttggatgtgatagagtgagtgttcccagtggagacgctcctctcccctagtcttggcctccagcagtacccagggagacaggcaccccatgagcagcagcccctcactgaggtcagcttggctggagacaaagcatcatccctctgctgacagaggctgaggaggaggctggggcactagcacctatactctgaggcactggagggctcagtcagcccttacttggtgggccaggcacagcaacctcaatggggagcagagaattatgggtagaggaaactgacgacagcttgaaagaggcaaggcagagttggactgcataagtattggggactgagtagaaaaccttggcccaaaagctgcctgtatggagagggtagcagggagggggattctaggacagcagagaatggctgatggccgtccagcactggccacacccaccagtcagcccttgtcacagtagccctgtctgctaacagcatgtgtggaagctgcctttccactgtgtcctcatgtgcagagggcttgggccttcccaagaggaggacgtatgttcaccccctgaaaagccagagggagtcctgtccacagctggggctctccgccagggccaggactagggtgaggggaatgaggccagtgaggtgtttttttttttttttcctcggggtgcaaaattttagggggtgccaaaaaaactcagtaacggagataagtaatatttaacacaatagtttttaaaataaaaattaatgcaaaactatctgtaatgaacaaaatatccaaatatcaaataaagacaggatccgtgttgctgatttttcagttagcctcaggctccaatatggctcggcataccactattactgactctatttaaaatctggatatttcctttatcacaggttttttttttttttttttttttttgcattaattttgacttaaaaaaatacatctcaatattactcatctcaactactgtgttttttggtagcccctgaaattctgcacccaggccagtgcctgactggtctctcttgccccagccttgcagactcccctgaggaagtccggactcctgcctggagcacacgctcccctctaacctcctgcgcactcaagccaacctcacacatgcccagtaatgggcagcctgccacacctccaggggcatcccttaaggcctttctggccctgaagactcaggtttctgatgctccttgcctcaccctgtgagctggcatagaacatctctaaggggggaaggagatgccctcattgaaatgagggagaaggtggatgaggggctccttccttttgtcctcagatgacccaagccaagtgcagaaggcgagcctcctcccaaagctcggctagtccctccaccaaagccaggatcagagcccacacctgcctggccaacccctggcactgatgatgcctgggtgcgggttaagctgggaggtgagatgccaggggggtgctgttggctgggtcgggggaagtcgggagggggcgctgctccgtgcttagcagctccggggaggcctccaggaagttctaaggaggggcccggggggcccggagcagtttccagtggccaggggtacgcgcggccggaggggcgccggggccgtactcaccgcggccgttctggttgggccggtacacgctgcccacgctgaggcggccctgctgcgcgccgttccgctccccacccggcgggggcgtgtcggagctgcgcaccggcaggtagggcggctccagcgcgcgcggcggcccgtacgcctcgggcggcgggttggcgtagggcgggtaccagcccaggcgtgggtctccgccatgggcctgcgccgcctcgggaccggggtcagggtaggcctgctcgaagccgggggtgccctcgctgtacagactgtgcgagtagcggcggtccaggccg

SEQ ID NO: 14303 - DNA, 2300 bp, Homo sapien
cacaccctcaatgattaggggaaggggcacctggatggtgctgatgaccatcccttgcagcaatgcttagacattgcttcctgtggaagtctccctgagccctagcccctgacagggagggccctcctctgggctcacaaagcccctggccccaccaatgcttgcctaatcacagcactgagatgcccctcctggtagactgccccagggaagggcctggacttgatgcatgtgagtacactcagcttggcacctaggatgctaccttcaggggagaaatgtttttgacccaaaatgaactgtggggctcagggtagtggccagaggtctgctaagcaccaagcacccccacttcagacatggccttgccctgtcccattcccctctcaatcaactggcttccttaagaactaacagcccaaagacaggccctagaagacccactgacttggtgcccagatgccaagtcccaggcatgcctctgccaatattgtggcatttgagagctcagttttctctgcccagaggtggggcccatcaggctgagcctcatgctgaggtcttgcattctaagaaaagccactgcaaaagtttagcaccctctaggtaaaacatcctattctccaaggggccctagagcagctgatgcatggctataatgcgcccttctgcagggatgctgcaagtacctggtaaggaccagagcaggtggatgcatccttcatcacaccacagaaggacctgccatctgatttttcctgagctcctgcaggttcttaaagtgggattcagcacacaactcaaaagcgacaccttggatgtgatagagtgagtgttcccagtggagacgctcctctcccctagtcttggcctccagcagtacccagggagacaggcaccccatgagcagcagcccctcactgaggtcagcttggctggagacaaagcatcatccctctgctgacagaggctgaggaggaggctggggcactagcacctatactctgaggcactggagggctcagtcagcccttacttggtgggccaggcacagcaacctcaatggggagcagagaattatgggtagaggaaactgacgacagcttgaaagaggcaaggcagagttggactgcataagtattggggactgagtagaaaaccttggcccaaaagctgcctgtatggagagggtagcagggagggggattctaggacagcagagaatggctgatggccgtccagcactggccacacccaccagtcagcccttgtcacagtagccctgtctgctaacagcatgtgtggaagctgcctttccactgtgtcctcatgtgcagagggcttgggccttcccaagaggaggacgtatgttcaccccctgaaaagccagagggagtcctgtccacagctggggctctccgccagggccaggactagggtgaggggaatgaggccagtgaggtgtttttttttttttttcctcggggtgcaaaattttagggggtgccaaaaaaactcagtaacggagataagtaatatttaacacaatagtttttaaaataaaaattaatgcaaaactatctgtaatgaacaaaatatccaaatatcaaataaagacaggatccgtgttgctgatttttcagttagcctcaggctccaatatggctcggcataccactattactgactctatttaaaatctggatatttcctttatcacaggttttttttttttttttttttttttgcattaattttgacttaaaaaaatacatctcaatattactcatctcaactactgtgttttttggtagcccctgaaattctgcacccaggccagtgcctgactggtctctcttgccccagccttgcagactcccctgaggaagtccggactcctgcctggagcacacgctcccctctaacctcctgcgcactcaagccaacctcacacatgcccagtaatgggcagcctgccacacctccaggggcatcccttaaggcctttctggccctgaagactcaggtttctgatgctccttgcctcaccctgtgagctggcatagaacatctctaaggggggaaggagatgccctcattgaaatgagggagaaggtggatgaggggctccttccttttgtcctcagatgacccaagccaagtgcagaaggcgagcctcctcccaaagctcggctagtccctccaccaaagccaggatcagagcccacacctgcctggccaacccctggcactgatgatgcctgggtgcgggttaagctgggaggtgagatgccaggggg

SEQ ID NO: 14304 - DNA, 2300 bp, Homo sapien
tggtaggcagcccctcacaagacggagcttgaggggtggcaccggcctggctccacctgccaggtcactttgagaaaagagtcagaccactctgggcctcagtttaccatatgtcccaatagtgtaaccacctttgaagagccagtgcctgggtggggccatgagttgaggaatggcaggtgggcgtagaccataacgatcctgggcaaacttgtccctgagaagaggaagtggccccggcagacattcttggggtctgccccttagtttttacccctcactgctctgccatgatgacactggcttctacagctctcattccgggcctgactcatggggcaggcagatgggtgatggagcagggaccctcccagcccagtcacctgctggggaattccaggctcaccatgcagcgtgtgcatgcttgtgatttttgtttccttgtttggaacagaacaaaggaacatgaggacatttggatctttttcctgcctcttctccatgtgtatattggagtttgccctaaatctcttctgctacaagatggggtagaaataaatacacatgcagagttgtgtcccctgcagccacactcaacttgtgcttcctcttgtgtcctgacaggggaatgtaggtgacatttctccccattcctcttggctctgctttgccctggggaatcaaggttagaggacagtcgggggaatgggataaatgccagtcctggaggtcccactggaagcagcgaggggaaattcctgaggaaatactatttgagatcctaacagtagctcttacgtgcttagcagtttatggtttacaaagtccttttgtctggcccagcatttctgagcttgacattttttgctgcaagtcggtactactgttttattttggagggaggaagctaaggctaagaaataatttgacttgcctctgagagctatggtcaagggcagagctgagccatagctagaccacctgcctccatcccaccatcgcccctcaatccagtgcttgatctaacacaactcagatagcaagtggataacaacttttattcataaaaccatgccccgtgttaattcacctttaggaagagaaaactgatctcagtcttgttgcacattgttttgatgtgagacaggcagtttggggaggtcagttccacaccaggatgtgagagtcctttaagtcccatttcccagactgagtgagcacctggtagagtgagagctgtgcctgtggttgagacagaacctcaggaggtccagcacaccgccctcaggccctggttcaggcgtacacttattcacatgcccctttttgcctgattttcttctagagaaatcagagtccccacctctcacttgctggaccttccttagccagttaccactccttacctgccagtgctccaggccagctgcctcagcccttcactgccctcctccagccccaccactgctcattgctctctgcagcaggccttgcctcctaacactcaggagaaaaactctaggatgagcactctgcttcctccagtttcaccccttcaaacccacctgcctctgtgctgctttcctgcctccttgcccttctgcctcccctctctgaggctcatccctgtactgcgcagtgctgtgggccccctgctatcccaggatgccttccctccactccatgcactctctctctgtcacctctcctttctgtgtagaaatgtgccctccctttgccacagtgccctctagctcccactccctttctccccttttcttctgcaagactttcatccatgctcccagcccctgcccctacatccttcatcctggcctccttgggctcccaagacagcgctggccaacatcacagtgacctcccacatgccagcccagtgggcacctctcagcccttcccttacatcacctggtggcagcatttgacatggtcgacccagcccccagcccccagaaccccctgtacttcctccttccctgtcatccctggttactgccacttattctcctgcccttgagtttccagggtttcatcactggcctcttctcatctgtgacctccctgggagagctcatccatctgggctgtctgctgcctgtggatgctgattattcacaatgtcctgccctagccctgatgcttctgtaccctgggccatttctccagctgcctactggacaattgactgccccacagacacctcaagcttacagtagtaaaaaaaaaaaaaaaagttgccatccctcccttcccacccccgtgtgtcctctctagtgaat

SEQ ID NO: 14305 - DNA, 2300 bp, Homo sapien
cgggagctgggcgtacaaagatgagccacacgcagcccctgctttctaagagccgtagatgtaatggaagagcaagcctgcaaacggagacattctggaaaggagagcccacagctgggacctgcaaaagcagtggaaattcaccagggatttagggttgtaggtggtggggtacgggggacacttgaaacagaaaagatagctcttgcaaaagcctgtttgggaactaattttggccattttcagatttaagagggaattcatgagaaatgatacccaaggagtgtgctaggacaagatcctagctgaggagattgaaccagttctgtgagtgatgggaagttgctgaaggatttggaaccagggaacaacacgatcagctgtgcatgatgggacagtcactctgacaacctaggagcaggtgccctggtctaggacagtggctgtgggatgcagaggagggacttgattcagagatcctgggaagccagtgactggaggtgagggagcaggatgatgccttgagtgacagctggaaaggctggtggatctgaggtggtgggggcaggagggagggggagagctggagagcgggtatgaagagggtgaggggagagccagctaggtcttcgccaatggaaaagcatgtcagactcccagctggtaaggggaaaggggcacagttccaggtgacctcactgggtcagcgccccggcttcaaacttaaaccatcgcaaccactgtgctggctcctgtgtacccattccgtactctgttccaacttagaaacagactagaaaggatgatgatagggcctggctcttgtaaaccttacagtctgcagggtggagagcaggggttgggcagatacgcaacttcctagggactgtaaggcctcaggagcctgcccttccctccagcctggtcagtactcccaggcctttagagaatcagtccatgaaagccaaatatggtgggcagccatctgcacaagggacctggaagtgggctatggcaggatggggcttcggaggccagaggcgattggctgaggaggcagagctggggaagctttattcatttctttgcttgctttggaagatagcctgctcccagactaccccaaagtcctgttggaagttaacacttctcaaaggaaattcacgagttgcattcaggttttctcaagccctggagaggcaagttaattccaggtacctggatcaaggggcatgctctttctggacctgcaggactgagggcctcacctctgtggtgctctggggcccctgccctcatgtagctctgtgctatccccttcttccttacactcccatgctccccgaagtctgcatgtgaaacttctttctttttgtgccaaagttcaggccttcctactccaccttgatcacggtgacctggccaggccattacttaacaaataagtattgagacctgccctatgccagtccctgcttgctgggctgtgggttcacaaagaggaataatttgcagactatgtcccagagaaacccaaagtccagatatggcatgtcctgcctccagtgtgagagaaggagtgctgagaaggctgatatagcatgtccttgatcctggagaagattggcttcctgtaaaccctgatgagatcttgctctctcgctccgactgcagtgcagtggcacgatcatagctcactgcagcctcaaactcctggactcaagagatcctcccgcctcagcctcccaagtggctgggaccacaggcaggcatcccacgccaggctaatttttaaaaattttttgtagagatgggctctcactatgttgctcaggatggtcctgaattcctggcctcaagcgatcctcctgcctgagtctcccaaattgatggattataggagtgagccaccgtgcccagcttcccctccagcttttctagggctgagtaggagaagaggggaggaggcgatgaccccagcggggtccgaggaacgccgatcacacccagtagccctgggctgcagttcggtcctcccagcgcagggggagccatgcgacggcggaagcgggccccggccggcctcctcttcctgcgcccgcgccgccgcgggtggccgcgcgggtgaagccggaagcagcagccaggagggcggggccgcgtagggcccactggccagggagggcgccgcgcggaggcgcggggcgtgtctcctgtcaaaagccatgctcggcaggtctgggtaccgggcgctgcccctgggtgattttgaccgcttccagcagtcgagcttcggcttt

SEQ ID NO: 14306 - DNA, 2300 bp, Homo sapien
tcaggcaggaggatcgcttgaggccaggaattcaggaccatcctgagcaacatagtgagagcccatctctacaaaaaatttttaaaaattagcctggcgtgggatgcctgcctgtggtcccagccacttgggaggctgaggcgggaggatctcttgagtccaggagtttgaggctgcagtgagctatgatcgtgccactgcactgcagtcggagcgagagagcaagatctcatcagggtttacaggaagccaatcttctccaggatcaaggacatgctatatcagccttctcagcactccttctctcacactggaggcaggacatgccatatctggactttgggtttctctgggacatagtctgcaaattattcctctttgtgaacccacagcccagcaagcagggactggcatagggcaggtctcaatacttatttgttaagtaatggcctggccaggtcaccgtgatcaaggtggagtaggaaggcctgaactttggcacaaaaagaaagaagtttcacatgcagacttcggggagcatgggagtgtaaggaagaaggggatagcacagagctacatgagggcaggggccccagagcaccacagaggtgaggccctcagtcctgcaggtccagaaagagcatgccccttgatccaggtacctggaattaacttgcctctccagggcttgagaaaacctgaatgcaactcgtgaatttcctttgagaagtgttaacttccaacaggactttggggtagtctgggagcaggctatcttccaaagcaagcaaagaaatgaataaagcttccccagctctgcctcctcagccaatcgcctctggcctccgaagccccatcctgccatagcccacttccaggtcccttgtgcagatggctgcccaccatatttggctttcatggactgattctctaaaggcctgggagtactgaccaggctggagggaagggcaggctcctgaggccttacagtccctaggaagttgcgtatctgcccaacccctgctctccaccctgcagactgtaaggtttacaagagccaggccctatcatcatcctttctagtctgtttctaagttggaacagagtacggaatgggtacacaggagccagcacagtggttgcgatggtttaagtttgaagccggggcgctgacccagtgaggtcacctggaactgtgcccctttccccttaccagctgggagtctgacatgcttttccattggcgaagacctagctggctctcccctcaccctcttcatacccgctctccagctctccccctccctcctgcccccaccacctcagatccaccagcctttccagctgtcactcaaggcatcatcctgctccctcacctccagtcactggcttcccaggatctctgaatcaagtccctcctctgcatcccacagccactgtcctagaccagggcacctgctcctaggttgtcagagtgactgtcccatcatgcacagctgatcgtgttgttccctggttccaaatccttcagcaacttcccatcactcacagaactggttcaatctcctcagctaggatcttgtcctagcacactccttgggtatcatttctcatgaattccctcttaaatctgaaaatggccaaaattagttcccaaacaggcttttgcaagagctatcttttctgtttcaagtgtcccccgtaccccaccacctacaaccctaaatccctggtgaatttccactgcttttgcaggtcccagctgtgggctctcctttccagaatgtctccgtttgcaggcttgctcttccattacatctacggctcttagaaagcaggggctgcgtgtggctcatctttgtacgcccagctcccggcaggacgtggcacgaagcagtgccagtgtgaacggatgaatggatcaaagccgggagcagggctgcccccctgcagctctgccctacctctcccgctttaccgtaagtcagcggtaggtctgcagctctccgcctctacctcctccccgctctgggcgtgtctttaaaacccacagtcggcctctctgccccctagaaccgcccccagcttctgtctcacttcctctccagaggcgggccctgagccggcacctcccctttcggacagctcaagggactcagccaactggctcacgcctccccttcagcttctcttcacgcactccaagatctaaaccgagaatcgaaactaagctggggtccatggagcctgcacccgcccgatctccgaggccccagcaggaccccgcccggccccaggag

SEQ ID NO: 14307 - DNA, 2300 bp, Homo sapien
ggcatattttaagctggttattctgagaaactgctgatacaggaatagctctgaaaagctctccttttgtaaaaaagaaaggcatttatatcttaaaagaaaatctacattagtaaaatgatctatattaaaagagggctgctccagacaacttttattatctaagaacttttaatctacatagcaagacaacctctattcaccaaacagctcctctcctcaccctcccataacttgtgttatcaccatcacccagaagctccaagctcttttccgtagctcaggatgttatacaggcttcaatcatctgacctttctttgagtctcatatattgtgggactcctgagtatacatatgtaattaaatatgggttttccgctggtaatctattttatgactatttaattcataggctatttaattcatagcccagccaaggaaactagaagggtggaggcaagccatctttccctcccctatggtttaaagagtacagagtttctggagtaatgaaaaagttctggaaatagatggtggtgatggttacacaatattgtgaatctacttaatgccactgaatggtacacttataaatggttaacataggaacttatccattaggtatattttaccacattttgtaaaatacaaaaacaggccgggcatggtggctcatgcctgtaatcccagcactttgggaggccgaggtgggtggatcacgaggtcaggagttagagaccaatctggccaacatagtgaaaccccatctctactaaaaatataaaaaatagccaggtatggtggcgtggcctgtaatcccagctactcgggaggctgaggcaggagaatggcgtgaacccggaaggaggaggttgcagtgagccgagatcgcaccattgcactccagcctgggcgacagtgtgagactccgtctcaaaaacaaacagataaacaaacaaacaaaaaacaaagcaaaacaaacaaacaacaacaaaaaaaaaccaaagtgcttaatacagtacctggcacatttgaagtgctcataaatgttacctagtattgttaagtaatgttattcttagttgtaataatgtttataaaagttactgtaatacggtgtcctctgtactttcatgaaggggagtaaaagggcctgaaaggcagcagagcaagaaacccaagtagttcctttgtcgggggaggtgggaggtgggcaggaaaggtgtggcaagagaagggttcgttggggaggcttccttaagcagaaaccacatgagctgggaggccttggcaaagatacctcttcagtctgagccagtttctcacctcggatctgggaagttggttttagttttgccgtgcctgggacatgcccctggctccaggccagcgcaacaggggtactacctccatcctccctaatctgaagtcctgcatctgaggcaaagttgaggcagggctcgagggtgggcggaagggcccaggcccggaggccactgacccttctcaccttgcccaactgctcagtggagaaaccgcagcccagcgaggccgccccaactcctccgtgtcctcttttctactctatcctaccctcccttccctgccccacccgagacggtcaggaccctggtgtctggacttcccgctttgtgtcactctctagggtacttgaccaaatcctccgttagaccctctcttcccgcctctccccaccacagcaaaccaacaaagcttaaccccatcatcccctaacccaatagtacctctgtagggctggggctggggctgggctggcggccttcagagggggtctcggggggaggcatggtgggctcctggggccgggcggggtcctgctggggcctcggagatcgggcgggtgcaggctccatggaccccagcttagtttcgattctcggtttagatcttggagtgcgtgaagagaagctgaaggggaggcgtgagccagttggctgagtcccttgagctgtccgaaaggggaggtgccggctcagggcccgcctctggagaggaagtgagacagaagctgggggcggttctagggggcagagaggccgactgtgggttttaaagacacgcccagagcggggaggaggtagaggcggagagctgcagacctaccgctgacttacggtaaagcgggagaggtagggcagagctgcaggggggcagccctgctcccggctttgatccattcatccgttcacactggcactgcttcgtgccacgtcctgccgggagctgggcgtacaaagatgagccacacgcagcccct

SEQ ID NO: 14308 - DNA, 2300 bp, Homo sapien
tctcctgcctccctgccctttcctttgaaaggattcacgtgattacgttgaacccacccagataatctagaataatctctttatctcaaagtccttaattgaataacacctgcaaagacccttttgccatagtaaggtgacatattcacaggtctcaggaatttgcacgtggacatctttagaggccactattctgctactacagtttgcatctagactctaccacttactaatcgtgtgatcttgaacaaattattttgcctcttgcaccagttttctcatccttaaaatggggataataatggtatctattccactggattgtcaggaggattgaatgagtaaatatttgccaatgcttataatagtatctgagacacaataaatgctatggaagtatctgctagctaaaatatattaaccaggccaggcacggtggctcacacctgtaatcccagcactttgggaggctggggcgggtggatcacctgaggtcgggagttcaagaccagcctgaccaacatggagaaacctcgtctctactaaaaatacaaaattagccggggtggtggcgcatgcttgtaatcccagctactcgggaggctgaggcaggagaattgcttgaacccgggaggcagaggttgcggtaagctgagatggtgccattgcactccagcctgggcaacaagagcgaaactccatctcaaaaaaaaaataaccaaataaaaatattaaaatacaaacactttgatctagcaggcctatatttataatctatttcataggaacaaaagcttccatgattaggctatataacttggatattactaaagtgttgtccatattggcaccaaaagaaaaaaaaaaggaaaggaaaacgaaagaaagaaaatgcacaaacaggaaattacctgaatgccagcaaaacgacagtgattgaatcaattgtggcccatctgggatataccagagctattaaagagaatacatctgatctgtgcctatgcacctagaggaatgctctgagtgaaagttcgttgagaggaggaagttcaaagtaattatatgacttgatttatttctttcttttttttgagacggagttttgctcttgttgcccaggctggagtgcaatggcaccatctgggctcaccgcagcctccgcctcccgggttcaagcaattctcctgcctcagcctcctgagtagctgggattacaggcatgcggcaacacacccggctaattttgtatttttagtagagacggggtttctccatgttggtcaggcaggtcttgaactcccgacctcaggtgatcctcccgccccggcctcccaaagtgctgggattacaggcgtgagccaccgcgcccggccgatttctttctttctttttttttgaacaaacatcagcccccaaaattattgtagatatctaggtcaatcatttaacatgttctgtttcttcctctgggaaatatgtataacgacaattctcactcaaggggctcttgcaaaggttaagtggcatggctgacatgtgtcaagtctgtaccatcctgcaagcagcagcccagtctggcatttgtgtaaggcggtttcagtggagagatgtgtggaagggtgcaccccacgatgctcacctggtgcttcctcggtggggaagggaaattcagaagtggtggaaagagatgattgtcgtttcgtatatctttgtattgtttcccggatgttgaaattgttactgtagtaactttttatactcatgtgttattggtagtttggatactatcaccataaccacaaacactgaattaggaaaagcagaaacctagaaacatgccatgattcaaagtctggtatttttggaagaggaatttaataacgaacgttttaagaggaaaaagtcaggagagtcctaacccaggccaaccttgtgtgtccacagcatctactgccgaggatgttccaagccgctgtgctgctcgtgcgcgctccttgacagcagccacagtgagctcaagtgcgacatcagcgcagagatccagcagcgacaggaggagctggacgccatgacgcaggcgctgcaggagcaggatagtgcctttggcgcggttcacgcgcagatgcacgcggccgtcggccagctgggccgcgcgcgtgccgagaccgaggagctgatccgcgagcgcgtgcgccaggtggtagctcacgtgcgggctcaggagcgcgagctgctggaggctgtggacgcgcggtaccagcgcgactacgaggagatggccagtcggctgggccgcc

SEQ ID NO: 14309 - DNA, 2300 bp, Homo sapien
tattacactcaccatccgaggtttgcaggacttttgttttaatattgaatagatggaactgtttacttctgcatctttgcaggcatacaaaatgtgcctaccaggactctgctttatatctattgaaagcaagaagtaatacagtaaaactttgcctggctagaggctttggaagaatggagtattctgatttaatgctattgaagtgtgaaggtgaaaagaatgaaaaacttacatttcctgttgaatgcaacttgaaaatacagccagtgattccacttttcttctctagtaagtttggacattctgatctacttggtgttttattatagaactgctagtgtgcccgagacttacattgtgaagacactttttaaaaaacctgagagggaagagggtgtaaatggtattgtgtgagatcaggctggatgagaactgacacttgtaaacatactttttaggctgaatctctgattgccgtttgttttcttatttaactcataaaaataaaacacattggatggagggtgggagcaggaaggagatttatgtcttttaattgcatgccattgtttcatatcaagacagaacatatggtatccctggctttggacctacagaaggaaacacatttttctgcctgctgtatgccagaggttcttgaacacctggagggatgactgcagcacagattgctgagccctactccagagtttctgattcaccatgtccagggtggggcctgagaatttgcacttataaaaggttctcaggttctgctgctgctgctagtccagagactacatttttgagaaccactcttgtctactaactgtaaattgtagaactctagaacaaagcttagtttggtgtaggaaaagacgctcacaggttatggagcaaatcatgaaagattcaacccttgatcccagcctagtgtggaattcaggtaacaatcaatacacagtgacataacacaattcttggttttcatgattgcaagtcatagccaagtatcaagtgagaaattcagtttcatttgcaaggcttagagaggccaggtgattctagaaaaataggccttgtatttgctttaaaccagtaaagagctttgagtgcttattaaatggaaagctttgtgtttttatttatttttgactattttattttatttttttgagatggagtctcagtctgtcacccaggctggagtgcagtggcgtgaccttggctcactgcaacttccgcctcccgggttcaagtgattctcctgcctcagcctccccagtagctgggattacgggtacccaccaccacacctggctagtttttgtatttcgagtagagacagggtttcaccatgttggccaggctggtcttgaactcctgacctaaggtgatccacccacctaggcctcccaaagtgctgggattacaggtgtgagccaccacacccggcccaaaagctttgtgtttttaaagatattagacatgtttcttgttttttaaaaaatcttaataatgtaggagaataagagaaatgttttttccaaagccgagaaatcattgtgattattttaccttattgggatgttggataatatagtccacttcattcattaatcatcaaacatgctatggattttccatttttataggatttgtgtcttaactggggtaatactggtaattcttatactccctctgaagatgaaaaatgtaggccaaaatcatagaccatgcatagaagctggataatgaagacagctctggaggaacatgtagacacacacacactgacacacatatatataaagtataaatacatatttttttaaagtttatttttaacattttaaagcaaaaaccagccctcccctctcccggagtaggcaggccccgcccctctccccaagtgggcagggacagcagtcgcatgggcagctttccttgtgatgtcacaggttcctctgggcacactgctgcctggccacgcctcctttccctttcatctttctcattgaccaatgggattggagcattaaggccacacccctattctgcattctagtgtggccctggttacgcctcctctggctcagtcacacagcagccttgtaggtgactggaggtgttcgctgatgtggccccaaccctacctccctccccaccccatgatgttagaagaatctcgacagaataaattggcagcagccaagaaaaaggtaaaaagccaagaaaaaggtcatggccccccaacctagccagagatcccctctgatgacaagaccactcccaga

SEQ ID NO: 14310 - DNA, 2300 bp, Homo sapien
ttttgcagttttctttgcccctgttagcgccaacagatttttttttccagatctcagacatttattttaataggcccctgacaaagtcataagactcagagagaagggagagtgggagaggtgtataggaaggttttgtgccagggactagtcgctcaagaattaggagacgccctgggcactggaaactacgcagcgcgaagtagggacagcgcctgtgttgtgtagtggaccagaggttgctgatacctgggacatagactgggtgggcacgggaagtaaagcctcgggactttggttaagcgcgccccactggcgtatcgcgccgcgggactgcagagccgtgagcagcggtcgccttggtgcagggttccagccacatcttcctcgcccagccagcaccctctgccgttgacccgcctctgcgcccggcaagcggcttccagcagggggcgcgcgcggaccaggcttgggccctagaacagcgcggatggagtcgctggagcaagtccccagatccaaccggtttcaaccctccccaccctcccgacgctccgggttcgcgacgttgaagttaagggtcgatccgcagaaagcggccaggggctccagctctccattcctgggtctgtctggggtcggctccagcctggttagaagccttagtctggattcggcagattctgaatctgggaccctctgcgctagcggcttggaaccttgtcaccctcccctcccccacccctacttccacacacctgattagttgtctgtttctttaatgatcaaagacgtgggcggcggcgggatgaggtcttggttcccggctccacagccctccctaactgtcattattaacgttataaacattagacccgcttctgcgcgccggacggcgccggacgaggtgcgcgcagtcttctagctgagctcggaggcagatccagaagtcgcggctcccaccccaggcctcggcggactctgcctggggcgactcgggctccagccctgcccgggcgggcactgggctctccagggtcgaaggcaggggtaaggggcgtctttcccccagggcagcctccgggaacaaaagcatttgctgtagagtgagctagagcctccgggcccgcgggagtcagctcccgcccaggggtggtcaccgcgtccttaaccaccccaggagccccgtctccctgccgaactccttggcttctgcaaccctgtcaagacagcaaggaaagggggtcttccctggtcctcgggccccgaagtttcggggttgcttataggacgggttcctgcagtccagggaagctctgggcagatagcgagcccattctcccttccattacccagattctgcctccctgcggaaggcaaaaaagaaagaaagaaaataggtaaaaaccggcggagggccttgagcctccccgcctggcgcccctcactcagtcccgaaaagtcccctggacacgccatgccggaccggactcagctcccgctgctgggcccctgcctccaaatatccttcccaggcacaggctcccaagaccgccccctcagggttcccaacacccggacaactgcccaagacgccgctccccgcccccacccccaccttgttcggcagacaaagaagggtgtgctggccccgccgtctgcctccttctcccgaccccacaaggcctagaaacctcagggactcaccccgggctagggacccaatcctggctgtcccaccacaggatccccggcagggacgggtcacagtgctctcacccctcgaccattttcgaagacaccttccctgaaaggcgccttgcgccctccccatgggtcggcggggggggactccaggcccgagcaggcggtgtgaagttctgtgttctgaactggggctgagcaagatgcgatggtctcagcccgctgggccgcccgtagcgacggcaggagtaggggagagggagggacgcttggagtgtgagcgcaccagtctgttcatatttaatttacaaagcagcctcggaaccccgggccgggtggtctctttagacgctgcgctcttagcctgtctctcttccccaccccctcccctagctcattaagatgctcaacactcaaatcggggtattgatctccacggaagccccaaaccctcgccatcgagagacccccatggcccggggtgatggctgtggggcttggtgctcccagagagctcagtggctacagaatgggtggggattctgcgtgtctcccggagcctgaacccctttcctggttatggccggtagctgtct

SEQ ID NO: 14311 - DNA, 2300 bp, Homo sapien
ccctgtcaagacagcaaggaaagggggtcttccctggtcctcgggccccgaagtttcggggttgcttataggacgggttcctgcagtccagggaagctctgggcagatagcgagcccattctcccttccattacccagattctgcctccctgcggaaggcaaaaaagaaagaaagaaaataggtaaaaaccggcggagggccttgagcctccccgcctggcgcccctcactcagtcccgaaaagtcccctggacacgccatgccggaccggactcagctcccgctgctgggcccctgcctccaaatatccttcccaggcacaggctcccaagaccgccccctcagggttcccaacacccggacaactgcccaagacgccgctccccgcccccacccccaccttgttcggcagacaaagaagggtgtgctggccccgccgtctgcctccttctcccgaccccacaaggcctagaaacctcagggactcaccccgggctagggacccaatcctggctgtcccaccacaggatccccggcagggacgggtcacagtgctctcacccctcgaccattttcgaagacaccttccctgaaaggcgccttgcgccctccccatgggtcggcggggggggactccaggcccgagcaggcggtgtgaagttctgtgttctgaactggggctgagcaagatgcgatggtctcagcccgctgggccgcccgtagcgacggcaggagtaggggagagggagggacgcttggagtgtgagcgcaccagtctgttcatatttaatttacaaagcagcctcggaaccccgggccgggtggtctctttagacgctgcgctcttagcctgtctctcttccccaccccctcccctagctcattaagatgctcaacactcaaatcggggtattgatctccacggaagccccaaaccctcgccatcgagagacccccatggcccggggtgatggctgtggggcttggtgctcccagagagctcagtggctacagaatgggtggggattctgcgtgtctcccggagcctgaacccctttcctggttatggccggtagctgtctccagggctaacgtgggcagcgcaggggggcggaaaccgggttttagccaaatgcctcgacatcgccgcgcctccgcctcctcgtcgctgaaagaaatgtcggggtttcatcagagctagggagcgacagtcgggaacagcgagtctgccgaagccggctgttgtgtgagggtgtgagacggcggggcggtgaggggccaccgcggcttgggggatagtgcgtgtggggttgaccgtgtgtctgcttgagaggctgtgaagatatggggggcagatatgggagaaatgctcgggcctgaagtccccagcccaccgtgctcaagagtagcggacgttttgccaccatccttgtctgtgctactgtctgctgcagcttccgtgccccgttctcctggagcaggcaagacctggagtgaggtgcttgggtgcgctcgagagagcttccccctgctccacctgtcccgcggtgcgcgcaggccaacgcgtcgggcagtgggcttcaagcgctggtttagccacaaaagaccagaagtaaagagttccggcttaagaggctgggcagggctgcggtgggctggggaggggggtgtcccttcccagcacgccctgcagggctgtgcgttctggtgtcgggttagactagcaggcggggcgggggggttggggcggcggggcgggggagactagggcttatatcagcccagatccaggcaaaaatggtagggagggtgcggcgctctgctaacactatcaattatgcatcatgttgaacgtggcttcggggaggaggcggctagcagcggggggtgcgggagggaagggtccgcgcgagctcggctgcgcgcagctcagcgggtcccgctcgaagtctgtcggtgccaccgcctgcatttgcaaaaagagtttaaaggcaaagacacgccttccccccccacttcagccgcgcgcctttccttcccccaaattcctcaaagatggtttgtctcacgtgttgcagggcgtaaaagcggcttgcattcaattagcagcgaagctcgcgggcgctggcgggacaggcgcgtgagggtgagttcgcgtgaatgtgtgtatgcgtgtgcgagaggagaacggtaagtgtcccgggtgcaggtgtgcccgtgaaaatgcgtgtgaatgtagcaggggctgaacacattgatgcgattattacctgaccatggatgattgtaaactgtgaagg

SEQ ID NO: 14312 - DNA, 2300 bp, Homo sapien
ccccttctccagacccggcgtggcagagcagggaagatagcccaagcaagatacacgcatgtgttgtggctgtggggaaaacggggggcggggggcaaagaaagggacaggtaagtttggggacttggtggccccaaagtaccacttcaatttttccttttgcgtccgtttcccccacctctctggctgcaggttggagaaagtccttgcgcactcccgggcctggcggggacgcgcatagcctctcccgcctcctgcttggtctacttttgttaaagccacggagaccctccccaaggccaagacacgtcggtcataaggggcatcccacgcccactgtcctggctgggctcttcgcagcctactgcacccccataacccacgtacccccacatttacacagccgctggcattgttactgtccctgatcacaccacctcccccaccccacgttcaaacacattcgcgcacacagtccctcacaccctccccatagccgaccttcacagtttacaatcatccatggtcaggtaataatcgcatcaatgtgttcagcccctgctacattcacacgcattttcacgggcacacctgcacccgggacacttaccgttctcctctcgcacacgcatacacacattcacgcgaactcaccctcacgcgcctgtcccgccagcgcccgcgagcttcgctgctaattgaatgcaagccgcttttacgccctgcaacacgtgagacaaaccatctttgaggaatttgggggaaggaaaggcgcgcggctgaagtggggggggaaggcgtgtctttgcctttaaactctttttgcaaatgcaggcggtggcaccgacagacttcgagcgggacccgctgagctgcgcgcagccgagctcgcgcggacccttccctcccgcaccccccgctgctagccgcctcctccccgaagccacgttcaacatgatgcataattgatagtgttagcagagcgccgcaccctccctaccatttttgcctggatctgggctgatataagccctagtctcccccgccccgccgccccaacccccccgccccgcctgctagtctaacccgacaccagaacgcacagccctgcagggcgtgctgggaagggacacccccctccccagcccaccgcagccctgcccagcctcttaagccggaactctttacttctggtcttttgtggctaaaccagcgcttgaagcccactgcccgacgcgttggcctgcgcgcaccgcgggacaggtggagcagggggaagctctctcgagcgcacccaagcacctcactccaggtcttgcctgctccaggagaacggggcacggaagctgcagcagacagtagcacagacaaggatggtggcaaaacgtccgctactcttgagcacggtgggctggggacttcaggcccgagcatttctcccatatctgccccccatatcttcacagcctctcaagcagacacacggtcaaccccacacgcactatcccccaagccgcggtggcccctcaccgccccgccgtctcacaccctcacacaacagccggcttcggcagactcgctgttcccgactgtcgctccctagctctgatgaaaccccgacatttctttcagcgacgaggaggcggaggcgcggcgatgtcgaggcatttggctaaaacccggtttccgcccccctgcgctgcccacgttagccctggagacagctaccggccataaccaggaaaggggttcaggctccgggagacacgcagaatccccacccattctgtagccactgagctctctgggagcaccaagccccacagccatcaccccgggccatgggggtctctcgatggcgagggtttggggcttccgtggagatcaataccccgatttgagtgttgagcatcttaatgagctaggggagggggtggggaagagagacaggctaagagcgcagcgtctaaagagaccacccggcccggggttccgaggctgctttgtaaattaaatatgaacagactggtgcgctcacactccaagcgtccctccctctcccctactcctgccgtcgctacgggcggcccagcgggctgagaccatcgcatcttgctcagccccagttcagaacacagaacttcacaccgcctgctcgggcctggagtccccccccgccgacccatggggagggcgcaaggcgcctttcagggaaggtgtcttcgaaaatggtcgaggggtgagagcactgtgacccgtccctgccggggatcctgtggtgggacagccaggattgggtc

SEQ ID NO: 14313 - DNA, 2300 bp, Homo sapien
ttgagaggctgtgaagatatggggggcagatatgggagaaatgctcgggcctgaagtccccagcccaccgtgctcaagagtagcggacgttttgccaccatccttgtctgtgctactgtctgctgcagcttccgtgccccgttctcctggagcaggcaagacctggagtgaggtgcttgggtgcgctcgagagagcttccccctgctccacctgtcccgcggtgcgcgcaggccaacgcgtcgggcagtgggcttcaagcgctggtttagccacaaaagaccagaagtaaagagttccggcttaagaggctgggcagggctgcggtgggctggggaggggggtgtcccttcccagcacgccctgcagggctgtgcgttctggtgtcgggttagactagcaggcggggcgggggggttggggcggcggggcgggggagactagggcttatatcagcccagatccaggcaaaaatggtagggagggtgcggcgctctgctaacactatcaattatgcatcatgttgaacgtggcttcggggaggaggcggctagcagcggggggtgcgggagggaagggtccgcgcgagctcggctgcgcgcagctcagcgggtcccgctcgaagtctgtcggtgccaccgcctgcatttgcaaaaagagtttaaaggcaaagacacgccttccccccccacttcagccgcgcgcctttccttcccccaaattcctcaaagatggtttgtctcacgtgttgcagggcgtaaaagcggcttgcattcaattagcagcgaagctcgcgggcgctggcgggacaggcgcgtgagggtgagttcgcgtgaatgtgtgtatgcgtgtgcgagaggagaacggtaagtgtcccgggtgcaggtgtgcccgtgaaaatgcgtgtgaatgtagcaggggctgaacacattgatgcgattattacctgaccatggatgattgtaaactgtgaaggtcggctatggggagggtgtgagggactgtgtgcgcgaatgtgtttgaacgtggggtgggggaggtggtgtgatcagggacagtaacaatgccagcggctgtgtaaatgtgggggtacgtgggttatgggggtgcagtaggctgcgaagagcccagccaggacagtgggcgtgggatgccccttatgaccgacgtgtcttggccttggggagggtctccgtggctttaacaaaagtagaccaagcaggaggcgggagaggctatgcgcgtccccgccaggcccgggagtgcgcaaggactttctccaacctgcagccagagaggtgggggaaacggacgcaaaaggaaaaattgaagtggtactttggggccaccaagtccccaaacttacctgtccctttctttgccccccgccccccgttttccccacagccacaacacatgcgtgtatcttgcttgggctatcttccctgctctgccacgccgggtctggagaaggggtttcagccccaggacatttactgagagtcggcgaatattgggtaagcaatgggggccaccccacaaccttgacccaggtggggttaggtccagcctagggcacctgatggggtgcggggctggtgggggtgctgtctggcaggaaccgggaagggagggaagggaccctcccagaagagcaaaggcagagtgaaggagcaggttcccaaagacaagttgtgggaggggctctgccaaacctgacaggcgctccaaatgggggcagggagtctgtgcaagttcgtttgtgtgaccgggcttaaggtgttatggggagggggtccttaggcaccgcagagctgtggagaaaggcgcagaatctttcatcttctccagcttcattagctagtggcagccccatgacctgttggctgaggacgcctctgcccaatgggagccgcctgagggacctgagaggaagctctagtgaccgctttcccaacacacctggtccaaacatgggggagaacctccttccccgtaaggaaggttggcagagcagcccttcttctcccctcacaggagctgcagccccgggcaggtgactttggccttagatgcagtagggcatggggatgggcttccccagatcccacatctcaagtcgtgcagtgcaggtcctcctattgcttctctgctgggtttcggtcacagtggagggctgtatgcacacacaggcacatgcctgtgttcttgtgggtgggtcggttcgtgtgaggacttgtgtccttgtgtctgtcaattgtcacaatggacaggaaagcgctttgtaccgtggtggaaaaca

SEQ ID NO: 14314 - DNA, 2300 bp, Homo sapien
ctgcccccagaaggctgctgacatactcacccacccaacagagcatgggtctcctacactgtatgaaatattctctaaaatgtcttgggcatgccccttccctagcctgggcccaaaggccctatctgtaagttgatgaggagatgaagtgggtgagctctaaaatgcttccttctgatgaccacccaacttgtccatcatgccatgaagggggcgcttacagagtgtcttccctgtgctggagatcaatagcacctgggaagttaaggcctctgccctcagtgggcttcctctctagtaaggggtcgcacattaagcacgcatgaataaataatcacagcttataggaggagctatgaagaaaagtcaggaatgtctgagagaacagtcactgggaactgagggctgaggaggtgcttgtactctgaccctgatgtgcttgcaaggagggaggtggggtgggaactatgagctcctcagagcaccctggaggtaaagctggtggcacagactttgtgcaggtgagggtgtgtgtatgggctgtgcagaacatagtgaagccccctccaccaggaagccctccctgactgacactgaggtcactgagtctcccctctggtttactgaaccctggatgtgtttcttgcagcctctggttggcccaccaaattcaggactttcctagaaattctccagcacagtcaggatgatgcaagagagggcttcctctgcaggggaaagagagggtgctctccattggaccataataatatcctcagcatcagactcgggtgttttgcaggcagcatgctggggacttctgtggccttgcttggtgacagggaatggggtgtgatgagctggggcaggcttcctggggatgctttcagccaaagatgagccctgtctgcccttggccctgctgagagggtaagttgagtcatgagcagaattcaaccagttatcagatggaaggccaaggaagcttggggagggctactgaggggatacggtaggcttgtctgtggagagcaaaattcttcagtctacaaagttcttttctgggctccttcatctttcggtttctcttccagctccctcgttttgggcctcttttgtttccccattcccctcccctgggccttcccgtttggaaaaggggtcacatatcctcaccctggaggcgtctgccccttccacacagttggtgttggaacagtggagctcagagaggccgatgctgaccgcgtagatgtccagcaccaacagtgggattttgggccctgtgggggacacagagagaactctccgggagtgcggccccttggcctcccctctgggtgcccagtgggcagtgggcctgggtggctcagaatcccagccaggagcactgaaggtcaacaggctcccgccctgagttttctgagccaggcctccctgtttcctccccagccagtggggagcgcagtgaggggcggggcctggagtcttgggagctccctggacaacaacatgcatttagcgcagctcagtctcagagccagcaggatatgttttcttaaaaaaaaaaaaaatgcctaacatcttggctttcaccgaagggttggtatctgctttgtacactttggccttcttggcttttcactgaaacacacacacatggatgcacactcacttccacacacaaacccacaccaagacagacacacacacacactcacacacaaactcatgtacatggtttcatacccacatccatgcaaacacacatacaaatccagaaatacgcaccctcacacccacaaacttgtacacacacacacacgtatacacaccaacacacatacaaccctggcttggacaaaagcttcccgttttttcttgtttgaagtggaaatctcccaccttccatgagattcaatttctcgcccttcccccgctaaaatcctcctggccccatcatttcttgggtcctttccagacagtgctgtgtctttaaggaagttgaagctgctaaaagtgagtgagagagagagaaaaaacacaacccaaaaaaatttggcatctcttcccccctcaagtttctggtgtcacttatgaaacacaggtccttgttgctgcagagaagcagttgttttgctggaaggagggagtgcgcgggctgccccgggctcctccctgccgcctcctctcagtggatggttccaggcaccctgtctggggcagggagggcacaggcctgcacatcgaaggtggggtgggaccaggctgcccctcgccccagcatccaagtcctccct

SEQ ID NO: 14315 - DNA, 2300 bp, Homo sapien
ttgcttggtgacagggaatggggtgtgatgagctggggcaggcttcctggggatgctttcagccaaagatgagccctgtctgcccttggccctgctgagagggtaagttgagtcatgagcagaattcaaccagttatcagatggaaggccaaggaagcttggggagggctactgaggggatacggtaggcttgtctgtggagagcaaaattcttcagtctacaaagttcttttctgggctccttcatctttcggtttctcttccagctccctcgttttgggcctcttttgtttccccattcccctcccctgggccttcccgtttggaaaaggggtcacatatcctcaccctggaggcgtctgccccttccacacagttggtgttggaacagtggagctcagagaggccgatgctgaccgcgtagatgtccagcaccaacagtgggattttgggccctgtgggggacacagagagaactctccgggagtgcggccccttggcctcccctctgggtgcccagtgggcagtgggcctgggtggctcagaatcccagccaggagcactgaaggtcaacaggctcccgccctgagttttctgagccaggcctccctgtttcctccccagccagtggggagcgcagtgaggggcggggcctggagtcttgggagctccctggacaacaacatgcatttagcgcagctcagtctcagagccagcaggatatgttttcttaaaaaaaaaaaaaatgcctaacatcttggctttcaccgaagggttggtatctgctttgtacactttggccttcttggcttttcactgaaacacacacacatggatgcacactcacttccacacacaaacccacaccaagacagacacacacacacactcacacacaaactcatgtacatggtttcatacccacatccatgcaaacacacatacaaatccagaaatacgcaccctcacacccacaaacttgtacacacacacacacgtatacacaccaacacacatacaaccctggcttggacaaaagcttcccgttttttcttgtttgaagtggaaatctcccaccttccatgagattcaatttctcgcccttcccccgctaaaatcctcctggccccatcatttcttgggtcctttccagacagtgctgtgtctttaaggaagttgaagctgctaaaagtgagtgagagagagagaaaaaacacaacccaaaaaaatttggcatctcttcccccctcaagtttctggtgtcacttatgaaacacaggtccttgttgctgcagagaagcagttgttttgctggaaggagggagtgcgcgggctgccccgggctcctccctgccgcctcctctcagtggatggttccaggcaccctgtctggggcagggagggcacaggcctgcacatcgaaggtggggtgggaccaggctgcccctcgccccagcatccaagtcctcccttgggcgcccgtggccctgcagactctcagggctaaggtcctctgttgctttttggttccaccttagaagaggctccgcttgactaagagtagcttgaaggtaagccagtggggaggagggctccagggccagcggcgggagcgggaggcctgttggacataggggctggttccctcttggtccatccctgctggtctgaggtgcgtgggacaatccctagcttggagccgtccagggggcatctgcttcttccacaacccacaactgaggccccagaaatcccagctgcgtttgggctgagcctctggcctcacccaagtcagctgagaggtcctggcgggggtttatttaggcagctgcctggctaagtttgaacagaacaggccacgggtgtgattccacagaaaaggcctggtgtctgctgcggtcatggccggaggagcgggagagggcgggtggagtggatgggggtggtgtgcactgcacaaggggcctcgtctgggccaaggcaaagcatacctatggggggctccggtgggagggactgcggccaggatgtgggagggcagggggaggttctgcaaagtgctgggggaggggggtggctggaaaacagatttcaagtcataaagtcagctaggaacaggccgaggcagggagaactctccactcggaggaggagctggggtcctcttccatcccgtcttcatcctgcctggctgcgtgacctcgggcaagtctccgcccttctcttggcctcagtttctccttccgtaggatgggggcggtgggctaggtggtgttgggatttagctgggttatgtggga

SEQ ID NO: 14316 - DNA, 2300 bp, Homo sapien
cctgtaatcccagcactttgggaggctgaggcatgaggattgcttgagctcagaaatccaagaccagcctgggcgacatggtgaggccctgtctctactaaaaatacagaaaaaaaaatgccaggcatggtggtgcacacctgtggtcccagctactcatgaggctgaggtgggaggatcttttgagcccaggaggctgaggctgcagtaagccgagatcgagccactgcactccagcctgggtgacagagcaagaccctgtccctccagaaaaaaaaaaaagagaataagtgatcaggccgagccggtctactctgcttcccctgggagcttcccatgtcctttagtcttataaccccagagcttggcatggggctggcacatcacagggacacgagggccccagaatgaccctgagaaggtgggactgggaaggcttgtgtaggagggatcagagggttgagggaggtagtgggtaaagcctcagtgtgaacagtcttgaaccccagacccatctgcacacccaggggggcctgacgcaggcctgagccagccttcatttgctctgcagggaagtgccctcctgccacaccagcataccacccggcctgtaccacgcctgcctggcctcgctgtcagtgagtccaacccaagttgaacctggcttgcaagctgctgccagcctgggcagtgggacctgtgttccccactggggctggtgaaggggggccctggaagatcctgggtggggggagctatctgggagttctcccagcttggaggcccaaaccaggatgcaagtccaaccttccagatgtctgtcaccccttgaccagtccccaagatgtcacatgagtgtgcactgggcaggtaggggatatcctggggcctgagtccaagccctcaaactcagaccctcaggggaggcctgggcaccccaagccctcctctgcactctcctttcagatccttgtgctgctgctcctggccatgctggtgaggcgccgccagctctggcctgactgtgtgcgtggcaggcccggcctgcccaggtttgtaccatggcctgggcacccccactcaggggacccagctgacagggtccctctgggagggtgggtgatttgttaggtacctaaaaggcagctctggctttaatgacatccctatcgccctcagcctggagctttcctcacccccacctaggtctccaggtttagtcaggacccccagaggaagggggagggactcgctcaagcccgcctgggagaaaggactccaacccagaccctagggaaacaagcctgacaggacccagcgtcagagtgtaccttctcaggcagccctccatgtgtggattgacgtgaccatcccaatgccatcttgaccgtcatcttccctgagggtatcacctggaccctaatgcttgaaggcagatttatggggactgacatctagcccctatagctggagctttcttctcctatctccttcagccctgtgactccagagcctggacaggcatgatcctgaggagatggggctgggcaagctagtgtgcgagagaccaaagggttggggcaggtgatgggtggctccttggtgtagacagcttcacatcccagacccagactgtgcaccgaggcaggtcttgctgtgctggttttgtggggaaccagcctggggtctctggttggccccagaaagagcttgccctggctggggcagtgtttgagggagaatgaacctctcagagcatgaatgcaagctgcagtgcagaagctgtgggtctgagtggcttgccctgagcccagaagggtgatgcctgggacagctatgcccgctgtctgccctctgccccgggtccacacccagcccagggcggcggctgttgtacaaggatgttgtgactcgctgagttctctgaaggtttgccagctcagacagaccaattagtgtggaggtggctgcttcctggagcttccagggtgggcggaggagcagtcttagggcttcttcccactgtatgtgtgtcccaagtccctttggcacggggcccagagcttggtagataagaggcactccacaaatatctatggaatgaatgaatgaaggggccttattcccccatctagaaagtgggactgactccacctccttgatttatggaatacagctgggaggtaatgggggtgcaggggctgagcaactccctcctgccctgtccttgcctctgtgctagccctgtggatttcttggctggggacaggccccgggcagtgcctgctgctgttttcatg

SEQ ID NO: 14317 - DNA, 2300 bp, Homo sapien
ggatgtctaacccctgacactgctgccttgtagagggagtgggctccctgtctggaactggactccaatggttggaggtggatttaaaatcagatgggagttggctgctccctaaggtaacagtctgagacccctgagcagggaagggcttgctggcctctggtgtgggcacggggactctgggaagcccagctggtgaacctcagggcacagcagccgcctgtataggacaggcccacaaatgaatactggccgccagaacaagcaatggctttgccaagctcaatttctgaagtccctcttacccaagggccaggcgctgagcatcaggggaaggcaggaggaggggtgggagggatagagtcccgccctccgggagctcacactcgcgcctggaaggcaagtttcccgcatccctgggatcagaagggccagtgtgggctcctcattacatcaaataaagctcgggttcagctctgagtcagcagatgctgatatctctgtgggatggtggagagcaacagagccctcttcctgcaagaagggccatttgggaagaagggggaggaactcaggctagcagggtgctcagcccctaatcctgccctgcaggcttgggaatttgaaagagagcctccaggatttcaagccctgtctactctgagacttcacccgtgctgtttcctctgtggggaacacactttcccccacccccatccccatcctgagcctgccaccctctgctcagcggactttcccctgcccttcagatcaccacggaaaggttcttttcttcaggaatctccccccatccccaaatgctcttggactaaatttggtttcccatggtacagaccagctcaacctgtgattccctttgtaaccctcagactttggaggggatttagttatctggctgtgtccccgctgaactgtcatctctcctgcctcagggctcagaacagtgctggcacatagtgtgtgttcaataaatttaagttaaaagactaaatgaataatgtcttcttaaaaaagctgttgaatgactgccttagctgacagggtccaagccgaagccccttgtagggtattggaaggacagagaccctcacagttttaggggcctaaacctccaccagggacagtggcctgagaactgctttctaccttcttctgcctctcgccccttcctccaggctggggcagggtcctgctcctggggagggagaatgcggaggagccctcctccctggcccagaccttcccttgctcaccctcaacctcactccaggaggagcaggaggcaggcggggctcctcttgcctacccgtgggtctggtttgtgtttaaagagctaatttccgccttgtgggggtgagttatctccttgtgaaatcaacttgtaggaacaaaaagggtttaccaatgagacacatgttgcctccttcatggaaaccctaggagaagaaacggacagattccccttccctgcctccgccccagcccagccccagcggtccgtctcactcggttgttgctgtaatgctggtctcctgtctgtgtgcggcactgcagatgtggcgggcaggggcttgggagctctggggcaggcgctgaaggcaggtatgtgtgtgaagtcaggtgcgggggtgggggtggctcctggccacacccttgcagggctcaggccgccaatggtgctggggcctcctcccccaggaggggggctttgtcaaggattatggtgtatttccatcaccgaggcccaaaggggccagaaaggggcaggctgaggctgggggaggggctcaagggagcccagctgggagggcccaggcaggcagtgcggagctggccgtgggctgcctaccctttcatctctgcaactccttcctccctgggcctcccttctggtgtgtctgtgggtctgtctaggtgggcttgggaaaggggaaggaaggggcgtctctttaggcagctcagactggacaagccttctttgaaaatggtcctttgaacacacgcctgctggtggttggtcagacagatgcgccagcgggagccccggggccccaaggggacagctatctctgcaggaccagtgcgatgggcgggaagggaggaggggacacgagaggccctgtcctcttcccgtgccagcttgctcaggccctcagtcccagacgggcttttcccagagagctaaaagtaagaaagtaaccttcaggattaaagagaaatgtttctttgtttgggttttccgtctttctttctttttttttctcttttaagcctctttt

SEQ ID NO: 14318 - DNA, 2300 bp, Homo sapien
tttctttctttttttttgagatggagtttgcctcttttgtccaggctggagtgcagtggcacgatcttggctcactgcaacctctgccccctgggttcaagcgattctcctgcctcagcctccctagtagctgggattacaggtgtgcgccaccacgtccggctaattttttgtatttttagtagagatgggattttgccttgttggccaggctgggtctctaactcctgacctcaggtgatccacctgcctcggcctcccaaagtgctaggattacaagtgtaagccaccacacctggccaaagggcatggtttctgataggcaaggatgtctaacccctgacactgctgccttgtagagggagtgggctccctgtctggaactggactccaatggttggaggtggatttaaaatcagatgggagttggctgctccctaaggtaacagtctgagacccctgagcagggaagggcttgctggcctctggtgtgggcacggggactctgggaagcccagctggtgaacctcagggcacagcagccgcctgtataggacaggcccacaaatgaatactggccgccagaacaagcaatggctttgccaagctcaatttctgaagtccctcttacccaagggccaggcgctgagcatcaggggaaggcaggaggaggggtgggagggatagagtcccgccctccgggagctcacactcgcgcctggaaggcaagtttcccgcatccctgggatcagaagggccagtgtgggctcctcattacatcaaataaagctcgggttcagctctgagtcagcagatgctgatatctctgtgggatggtggagagcaacagagccctcttcctgcaagaagggccatttgggaagaagggggaggaactcaggctagcagggtgctcagcccctaatcctgccctgcaggcttgggaatttgaaagagagcctccaggatttcaagccctgtctactctgagacttcacccgtgctgtttcctctgtggggaacacactttcccccacccccatccccatcctgagcctgccaccctctgctcagcggactttcccctgcccttcagatcaccacggaaaggttcttttcttcaggaatctccccccatccccaaatgctcttggactaaatttggtttcccatggtacagaccagctcaacctgtgattccctttgtaaccctcagactttggaggggatttagttatctggctgtgtccccgctgaactgtcatctctcctgcctcagggctcagaacagtgctggcacatagtgtgtgttcaataaatttaagttaaaagactaaatgaataatgtcttcttaaaaaagctgttgaatgactgccttagctgacagggtccaagccgaagccccttgtagggtattggaaggacagagaccctcacagttttaggggcctaaacctccaccagggacagtggcctgagaactgctttctaccttcttctgcctctcgccccttcctccaggctggggcagggtcctgctcctggggagggagaatgcggaggagccctcctccctggcccagaccttcccttgctcaccctcaacctcactccaggaggagcaggaggcaggcggggctcctcttgcctacccgtgggtctggtttgtgtttaaagagctaatttccgccttgtgggggtgagttatctccttgtgaaatcaacttgtaggaacaaaaagggtttaccaatgagacacatgttgcctccttcatggaaaccctaggagaagaaacggacagattccccttccctgcctccgccccagcccagccccagcggtccgtctcactcggttgttgctgtaatgctggtctcctgtctgtgtgcggcactgcagatgtggcgggcaggggcttgggagctctggggcaggcgctgaaggcaggtatgtgtgtgaagtcaggtgcgggggtgggggtggctcctggccacacccttgcagggctcaggccgccaatggtgctggggcctcctcccccaggaggggggctttgtcaaggattatggtgtatttccatcaccgaggcccaaaggggccagaaaggggcaggctgaggctgggggaggggctcaagggagcccagctgggagggcccaggcaggcagtgcggagctggccgtgggctgcctaccctttcatctctgcaactccttcctccctgggcctcccttctggtgtgtctgtgggtctgtctaggtgggcttgggaaaggggaaggaaggggcgtctctttag

SEQ ID NO: 14319 - DNA, 2300 bp, Homo sapien
tgcagaactgtgagccacataaaccccctttccttctaagttacccagagtcaggttttccttcacagcaatgcgaaacagatgaacacagtgcccaactggtacctccctctctcccctctggtatcagcaacacaccaccttctcagtgaggccttccctgaccaccttgtctcaaacagccaactcccgtctctcttctcttcccccacttcacttcccctctggtgttgtctcccctaagccctaccatacatcaggttccatttggtgcaggccttgactcatcttgctcgctgccaaaccagcctggggaaggcagagttaggcttcctccaaggaagaggatggtttcttttctttctttctttctttttttttgagatggagtttgcctcttttgtccaggctggagtgcagtggcacgatcttggctcactgcaacctctgccccctgggttcaagcgattctcctgcctcagcctccctagtagctgggattacaggtgtgcgccaccacgtccggctaattttttgtatttttagtagagatgggattttgccttgttggccaggctgggtctctaactcctgacctcaggtgatccacctgcctcggcctcccaaagtgctaggattacaagtgtaagccaccacacctggccaaagggcatggtttctgataggcaaggatgtctaacccctgacactgctgccttgtagagggagtgggctccctgtctggaactggactccaatggttggaggtggatttaaaatcagatgggagttggctgctccctaaggtaacagtctgagacccctgagcagggaagggcttgctggcctctggtgtgggcacggggactctgggaagcccagctggtgaacctcagggcacagcagccgcctgtataggacaggcccacaaatgaatactggccgccagaacaagcaatggctttgccaagctcaatttctgaagtccctcttacccaagggccaggcgctgagcatcaggggaaggcaggaggaggggtgggagggatagagtcccgccctccgggagctcacactcgcgcctggaaggcaagtttcccgcatccctgggatcagaagggccagtgtgggctcctcattacatcaaataaagctcgggttcagctctgagtcagcagatgctgatatctctgtgggatggtggagagcaacagagccctcttcctgcaagaagggccatttgggaagaagggggaggaactcaggctagcagggtgctcagcccctaatcctgccctgcaggcttgggaatttgaaagagagcctccaggatttcaagccctgtctactctgagacttcacccgtgctgtttcctctgtggggaacacactttcccccacccccatccccatcctgagcctgccaccctctgctcagcggactttcccctgcccttcagatcaccacggaaaggttcttttcttcaggaatctccccccatccccaaatgctcttggactaaatttggtttcccatggtacagaccagctcaacctgtgattccctttgtaaccctcagactttggaggggatttagttatctggctgtgtccccgctgaactgtcatctctcctgcctcagggctcagaacagtgctggcacatagtgtgtgttcaataaatttaagttaaaagactaaatgaataatgtcttcttaaaaaagctgttgaatgactgccttagctgacagggtccaagccgaagccccttgtagggtattggaaggacagagaccctcacagttttaggggcctaaacctccaccagggacagtggcctgagaactgctttctaccttcttctgcctctcgccccttcctccaggctggggcagggtcctgctcctggggagggagaatgcggaggagccctcctccctggcccagaccttcccttgctcaccctcaacctcactccaggaggagcaggaggcaggcggggctcctcttgcctacccgtgggtctggtttgtgtttaaagagctaatttccgccttgtgggggtgagttatctccttgtgaaatcaacttgtaggaacaaaaagggtttaccaatgagacacatgttgcctccttcatggaaaccctaggagaagaaacggacagattccccttccctgcctccgccccagcccagccccagcggtccgtctcactcggttgttgctgtaatgctggtctcctgtctgtgtgcggcactgcagatgtggcgggcaggggcttgggagctctggggcag

SEQ ID NO: 14320 - DNA, 2300 bp, Homo sapien
tctctggcaaaacttcccctaggtcagtcactgaccctggcacatcatgtggcctctctgggcttaagtttcttttggatgtgttggagtctggggtacagcaggagtctccttcagccttataatctggccttagctaaggctctgtctttgccagtaacttactgctctattctacttaactcatgacttctatctcatagtccaagatggctgcctgagatccagctatcacaactgtttttcacccagctagaaggaggagggggtaaagagaacacctctctttttgagaacacaacctgggaattgtgctcaacactctttttccaagtcactggccaatacctagtctaagggctacatctagcttcaagggagactgggaagtgtgcaatattgggctggggacggaatcaaattcacacagctcagtgatgccttcacagctccttactcacagcaggcttatttaaaaagaattacacatgcagtatgagttttaaaatatgcatttcaaacaagtgaaaaatcctgcttcattctccaaaattcacccctcccccaagtgtgaccactgtgaacagtttgctgtgtgtctgccagattcactttttatgtgtacacacatacatacacatatgtctacctagttaaagaagcataaaatgagatcacgatttatgtattgttcagcaacttgctttcttggttactgttacttggcaatatgtcttggaggttctgccacgtcagtccagagaattacctcattctttttatcagcaaaatagtacttcagtgtgtcaacttatcagcattgatggatggatattggggttgttgccaattatttttgccattacaaacggccttgggaattttgtctccatatatatgcatgcaggcattccttgggaatggattcctaaaagtgtgccaaaggttaattttctctttatgtgggtttaaccctttggaactaaaaatcctcttctccatggacaagatggtgatcagatccaagctggctggctgcttccctttctcggcttgagctgctctctctctccctctctccctgcctctcctgggcaggcctggctctggcattgtccttctctcttccagggtcttttactatcattggaagccaatctcacatacaaaagcctgtggtcccacctttttatagatggcactccctttctccttcaaggaagagactgcctctccagggcccttctcctgagaatttagggccccgcttcttggcccggcctttatctactctctccctgccctgcttgccacagcacctaggtggagcaccctctgagcaccatttccttccccagtcttgtctgcatccctgcaggataccccctctaggaaggggagggaggggtagggagagcctgtgctcaggtgaggggggatgcagccgactgtccagcagcgttggaggttgcaggcatgtacttggggtgaagagcaggactccagaaccccagcctgtctgtgagaagtgagaaatagaagagaaagctccgagggggcctttttcacttcccctgggaatagatcatacctggaattccagccctgaagccctgtgatgactccccttagctgtggtcagggccctcagcccagctgggcagcagcaggatgcagatccggttattaagagccgagctggtggttcccctctggcaattcatcaggcagtggccccctgggagtgatggatggggacaaatggaggtaagtagggggttcctcagcttctctaaggccacatctggggaaactcagccatcaaagccctgtgcaggcttctccactgaggtgactctgagggccaaggagatcaagtttcgagcaaacggtttgggggtgtggagaggctataccgctggagacaagccgccctgtgtgttgtgtggggccccagcccctgctctgtgcctgagctggagatgggggtggggtgggttcctctgatcccggaatcaagggcgggaggtctgtgagggcaggaggaggggcagagccagactggagaaggggggagctgccttccgggaggagcagatcaaacaccttttaaagcaggtgctggggacacttctcagggccaactgccgagaccacacaaccagccacccctctaggatcccagcccagctggtgctgggctcagaggagaaggccccgtgttgggagcaccctgcttgcctggagggacaagtttccgggagagatcaataaaggaaaggaaagagacaaggaaggga

SEQ ID NO: 14321 - DNA, 2300 bp, Homo sapien
tccctgctctccctcaccctggaatctccctgaatcatcacagcttggggctggcccctggacatttgaggagcaagcccacttctctgggctggggatatagagctcaccttgctggaggaaggggaggagaaggtagagcagctgggctcatgctgctaaggccttctcacaggcaaggaggaagcagctctcgggggaggttaggacaggcacaggagctggtgtctcaggggtccttggtctggggaggtgaacaaccagcaagtcaggaggtagaagggccctactggtggctgctgagtgcacagggcccacttgcaccctggagccagacggcctggaaccagtgcccaatcgcattatcttcccaggcaggaagatggcaggggcgtggctgcagaggcagaaagctcagatgccaaggagggtagctgggtgagagccccgagccccggggactgaggcagagctgcagggcagggcaaggaccacagtgaggcaggcaaggtggccagggcacaaaatgtgaggctctgtgtcgggagcggagcgctcgcacagccctgagaatgagtgcttcattaaagtttgcttcctaggcacctggcttgcatcttcagtcctgctgctagagaaggagcaatggctccccaccccctgaacctgctgccctagcctcctagactaagcaggcctgagaggttgggggagatgcgctctagagagactgggggagcagccactgagacctttccacacatacacactgtgctgggacatgttggcccacaagggagataaagcacagtgctcacagccaggccattcctggtcaggcccccagccccagagccccaggagtaccactcttggcaggcctagacggggagaaaattaggagtggggttcctgactaccatcccccaccagtgtctgggtgaccttggctggtcctttcagttctaatcaaaagcaaagcctcagtttttctgtctctaaactggggagaaccacatccttgctgctgctctctctggagtgggggtagagagggaggctgggaggcctctgcaaagccggagtctcctgcctcctggctgccaggctggtcctgctcttcggccagattaaaagaatctccaacttggggcccaaaataggtagaaatgaggcaggccacaggggccccccaaacacttctgaacactgcccagtaccccaaatccctcctcttctagcccaggatttctgatcattcttcgaagcccagttcagacctcacctctctatagagcaaccccccaccccaggccaaggactagtctctcttcattctgccatctcacctcaccaaaagcacttaggaccctgcctggcgtgcagcaaatgctctttgtctttgtaataatttcttgcagtgctcagaactgaaccataatctttggttcgtactctagtgccatcactgacccatcatggctttctttaattgtttaattataatttattttcaataatgtaatgaatttccattaactgaccacccaatctaaaaacccaaaagtttagaatgtatgctcttaccctcttctctccccgatcttcccacccaccctccaagaagaaaccatcctcttgaagtttgtgtttattattatcaaataaatggaagactataggtacccaaagaggcacgatggctggtagattcttcaacagaagtagctgttttaccgatcaagctgcaacactcttgagagcagtgtctgcttcctcttttgctgcagcttgagcagcatggggctggccacaccacagggttggtggagactacttgaggcaccaagagcaggaagggtggggcctgagtgccaggcggcaggtggaacacagctccaggaatagggaaaagggcttcgcgttctagctcactgcacctggacaggtgcctgtgtgacttcggccctgccctgtgacatcacacagtgttgcccaggtgacccagctaggtggaagagcttattgttttccaggcctgggcagagacagggcccccctgccccatctctccaccgtcctaggtgtgccaagagtcaattgcctcattgctgaccctgtccagctggccatggccctcaacccccaaggcccttccacccacagaccatctcgctgctgagagatccaggacctgctcccacctggccaccctccccctccccccacatccaggccccagggctggtgtgtggcacccctgagaccacattgacctccatactgtctactacccataa

SEQ ID NO: 14322 - DNA, 2300 bp, Homo sapien
tcgtggtgctttggctgggagcactggaatctcccagttgaatttcctcaggtctgcctacatcagggtttgtgtttggagagctgcagatgcttaaagagaaggaaaatagtgacaaccacgaggagcatttgcacagaatgttacagcttgaaaacacactcttctccctacaacaacccaaggggagagacaaggctttttattaaagtgttgacattttgaagagcagaaacatgaagttcagagaggttaaattacttgctaacagtcacagagcaagttagtattctggtactagaacccaggtctgctgacttcatatcccttacctcaatctcccttcttcaagccaacctcaacaccttcagtgccctctcccccttctttcctttgagcatggatcccatatgacaagctcttgagataccttggcaagtgttcagggtcgctgtggggaagacagagaaagaagaatacttaataaagccctcagcttccttctccaccccaacatccaaatgacccatccagttccaaatgacccatccagttccaaatgacccagcggctgagcccgctgaacctgctgagccctcaagggccagctgctgtccctggtgctgaaaccccttgtctcaagagaagcagagggcaagggtctccccaagtgtttccctcaggcacacccctccgccccatcctccctttcctgttctctgttttgtatcctttcttacctcatctctctcattctttctccatccctcctctatccttctcctccttttctccctccccatctcttcttcctcctgaaatcatagacttccagaatataaagatgcctcaagtgtcaccaaattcaacccttcctatcatctactttctagatgtgttatgttgatcaagttatataaccctctgagctccattgttcatattttaagaacagagatgatgatacctacccggggggttgtggtgagaatttgttggaatcatggctgagacatgcctggcacatagtagatactcactaaataatcatgacagtcccgctcactaaacaggactgtcatgattatttataggacattggtgttcttcttaaagtttttaccggccgggtgcggtggcccatgcctgtaatcccagcactttgggagtctgaggcgggtggatcacttgaagtcagaagtttgaggccagcctggccaacatggcaaaaccttgtctctactaaaaatacaaaacttggctgggtgtggtggcgggcacctgtaatcccagctacttgggaggctgaggcaggagactctcttgaacctggaaggcagaggttgtagtgagctgagatcatgccaccacactccagcctgggtgacaaagtgagacgctgtctcaaaagaaaaagtttataccaatattcatgccattttatgagaaaatatagtctctttggagggtgtttactaagtggtgcattattcttagtatttagactagttttcccttacttgtagtagacttttattgatagctgtattaaaggatttccttgagcagatcactttttcttactgaaattcagtttccccacctgcaacatgtgtgagataatctctccccatcctgcctcaagagctggcataagtgtttgtgaccaagggaaagagtcttattcctggaaagaggtgctatgcctgcttgcctgtgtatctcagtgtgtgcacatgtgtgtctgttgccacaggggactggactcagttctgtgtgtgtctatctctgacctgggagtttctagaccatgggagaaaattgcatgttggggtcctaacagctgccggcatggagctttgccctgtgcaggggctcagactgtgcttgtgggtttgtgtgcacaggggtgatccacacatgtgtgtgcatgttgattcctcagtgtggcccctgctccctactctcaacaatgtctctcacctctcactgtctctccttactgggagagaaagggatccatttaaaaataaacctgggctcattttttctctttccagatgtgatcctcaaggtggtggacaacagaaagaaacaggagttgttgtcctacaaaatccccatcaagtacctgcgtgtcttccacccctaccactttgagctggtgaaggtgagtcagaggcctggggaagtgccgggagagcaggtgggaaccaccttgaatgtccccagctattccctcggagcagccctgagcatcccacacccacccacagcatgacaagtctaggaccatgtgg

SEQ ID NO: 14323 - DNA, 2300 bp, Homo sapien
gactcaatcgattggcgcacagcaggcaggggaggacagggccccttgcagggaggggtggtgaagcctggtctgggaggcttcttgccccaggatcttggggatagcagggggcacacacccatttccctggtggggaggctgaggggcaggagcaggaagatttaaggcccacatctcagtgccagccagtgactggtgccatccagggaggatggccgactccaccacgggcctccctttcatttccctggaggggtgctagaccctccagagcccctcatgagagttgcacagaggagggagtaatatttctggagccactcttatatgccagacgctgctcggacgtgtacactcgcagcctcatttaatccccaacagcgttatgagatgggcacagtgatgcactccattttacagaggagaaaacaggcttagagaggttaagtgacctgtccaaagtcacacagctgcttagtaacagagcccactatctttccacttcaccaggcccactcaaataagaactaataggagtatggggattgtcttgtgccactcccctacttgtccctattgttcagaggaagtgtccccattaagaaaaagtggagtgggccaggtgcagtggctcatgcctgtaatcccagcattttgggaggctgaggcaggtggatcacgaggtcaggagatcgagagcatcctggctaacacggtgaaacccagtctctactaaaaaaatacaagaaattagccaggcatggtggcaggcacctgtagtcccagctactcgggaggctgaggcaggagaatggcatgaacccgggaggcggagcttgcagtgagcccagatcgcgccactgtactccagcctgggagacagagcaagagacagagccagactccatttcaaaaaaaggaaaaaagaaaaagagtaagtgaaacatgaggcctgcaaatgagaaaaggaagcgccctccacaacaccggcagaagccagaggccccccaaccctgtgcagagtgctgagctgggcacccagcagcaggggtggagattttgaaacgggtagaggtgactgtcttggcttgtccagtcagggattattattgtgccaccattgaggccccaaagaacactgtaagtcatctattcattcattaaacaagtaaacaaatatttatgaagtcccagtgctggtcagcatcttgctaggtccaggtggagggccctatcatgaaagcctttgggaccaagcttgtctgggacagacaggctgaacccagttcagctggggaaaggcaggcaggcccctccatgccccaggagggggtctccgcaacccaggctgaagccagttatatcagacattctgccttcatgaccagggccgtttctaggtggcgggctggcttgtttgggtttgtttttttttttttttttttttttgcttcccagtgagtttctttcaaaaacatccacccatgtctccgctgaactaaagagaaaggaatttgtccagagcatcaggaaagcagccagaggaagtccccagggaccaggcgtggggccctaagccacactgcagctgcagggaggagagtgagcccagcttgtgctgctgcggggtggggaggactcctgaggggacaagggggaatcagggagcagagagactaagggggagggggaggaggagactcagggacagagggtgaggctcagtgggagagaaaggggagacagggtatgggggtaaccaggaggcagagaaagtggagaagagcggagggagttgagggggaggcaggaaccaaggtgtagccaagggcaggtgagggaggagggactctgagcctgggccaggggagtcagaaggccggagccctgaagggccccacagccctccccggccctgctgtctccatacaattctgtggccaaggagtgaaccttgcatgatttcagccaccccacccagacaccccccaccctggaacaaaggggaagtggccccatgggcctgcctgcttccagctcagggctgggcttggtcaccaggcaggcacttgttgtagcaacagtccctggggacccatcctggggaacaggactgctagcagtaaagatgggggagccagggcccccatcccctccagcccccaaggctgccccaggcctcattgacagcttctctgtaagtcgccccctcgcccactggttctgggaagatgggttggctcgcctagcagcaggtgtgttggggtgtgttgcccagcaaccagtagaggtgttcc

SEQ ID NO: 14324 - DNA, 2300 bp, Homo sapien
gccttctgggttcaaacaattctcctgcctcagcctcctaagaagctgggaccacaggcacacgccaccacgcccagctaatttttaaattttttaatagagacaaggtttcaccatattggccaggctggtcttgaactcttgaccttgtgatctgcctgcctcagcctcccaaagcactgggattacaggcatgagccaccactagatattcttaaatgtcagtgaattcaacctgggagctgcttggggcgagcctgcctccccttctattcaaagtctcactgagataaatgcatatctgattggttcctttggaaaggctaatcagaaactcaaaagaatgtaaacatctgtctcccacctgtgatctgaaagcctccaagcccactccttgccttgagttgtcccacctttcaggaccaaaccaatgttcattttacatatgttaattagtgtctcatgtctcccttgttaaaagtaaaaattgagtacagcaaatgggataaatgctttaggtaaactttttgtgtaaattaaaaccttaaagttatttttggcactcatttaatatctgggtcatttccaagtaagaaagggttgtgatatggggaaatatgtttctaaaattgtggaattgttcttatctataaatgcccatatctgatatttcaggatttcttgctttttagggtttcactaaaattttacattacaaaggataaggtttctagttaacacgtaattctgtatacaaaaagtgcctgaaagggttattactaaaaaaaggaaagaataattttgtctaattcagaagttatctaaaagttagttcaagttacagttttgaaaaggttatttatgaaacaatgtagtaaggaaccattaagtaggggagaaagatgaggtacagtttaaataataaaatattctttaaaacctgataaagaattggaaacatttggctaattaacatttttatagttaaagctcttagtcttgattaaagtaagaagtattgtaaaaatgcattggcagtttggcaactcttttttttaatatagttaagcatgaagctggatttagtgtggaaccaaattccacatacatgcttacattgcttcatactatgtttactgttttgcatggatagtgctggagtacttattggtcatacgcctaaagtgaatttgttaattgcacaggatgtatgataatattagtgaacttaaggatactgaattgtgtatcaggaataaaatattcattatgtgggtttttgggggccctatgtaacactgtagcctccagggtaaattgaataagaaaatttagggttggtttcctgcttatttgtttttgcttctagttttcatttgtttgccatttgttctcctctgactttgcttgtgtatgcatgtatataaaaaccatgatttttcttagttcctagtggaaggttttcatttagttctgtgttcctgtgcatttctagcaagtcatcattcattccatttttctggaattcccaagctacctttgttgggcctgcaggaattaatggagcatactagcttttttatccttaaactaactttttggattttaggcttcctgatactttaagtgtgttgagtatactctcacaaatagaattttagtcatatttctctcactctgcctagtttctccaaaatttgtaaactatttatgaatattcttaattcattgcaatgtgtttgtttgcatacagtcaagcagggtccctggggccactcagggagagaatgtcaggcctctgagcccaagctaagccgtcatatcccctgtgacctgcacgtatacatccagatggcctgaaataactgaagaatcacaaagaagtgaaaatggcctgttcctgccttaactgataacattaccttgtgaaattccttctcctggctcttctggctcaaaagctcccccactgagcaccttgtgacccccacccctgccagccaaaaaacaaccccctttgactgtaattttccattacctacccaaatcctataaaacagccccacccctatctccttttgctgactcttttcggattcagcctgcctgcacccaggtgattaaaaagctttattgctcacacaaagcctgtttggtggtctcttcacagggacacgcatgaaatttggtgccatgactcggatcaggggacctcccttgggagatcaatcccctgtcctcctgctctttgctcagtgagaaagatccacctatgacctcaggtcctcagaccaaccagc

SEQ ID NO: 14325 - DNA, 2300 bp, Homo sapien
cctcagctcaagggacccagagcccctctgagtcagctgtactgaattacagccccaaatctgggtcaactggggagagacgacgaggattagggttccaaggtgaaactgtgccattgcgctccagcctgggcaacaagaatgaaactctcttaaaataaaataaaataaaataaaataaaataaaataaaatagcctaaggatgcatttctcagaacttatccctgttgttcaatgatgtgtgtctatacagtggggccataactaagacgtatgttgcccaagctggcaagatagctctgaccttctcttgggcccctcatttcccccaaacacaggttgtctgcagtcttgaccaatggctgccagggcatggactccgctgcaggggccagtgggaggccccagctcaggcaaaagcacaggcagatatttcaggagtctgctagggctggcactgagggcagagacagaggggtctccctgtcctttggagaacctcacgctgcagaaattccagactgaaccttcataccgagtaggggaggagctgtctgcgggtttgagcctgcagcaggaggaaggacgtgaacattttatcagcttctggtatggccttgagctggtagttataatcttggccctggtggcccagggctacagtcatcctagcagtccccgctgaagtggagcaggtacagtcacagctgtggggacagcatgctggccaagggtcttcccccacgctcagtcctggtcaaaggctgccagacctttctgagtgcccccagggaggggctggggcgtctcagggtgcccactggcgagggagctggcatctccacccgcagtcctcgccccttcaatgagatcccctctcctggtgacaatggctggctaaacctgtaccatttctggagggagacgggcacacacaaagtccaccttcaccatgtccagaatttccagaagtatggcccgatttacaggtaagcctggcagagggtgggagccgaagggacagggaggaggaggggcctgggtagccctgctgtagtccccactcccccaacaggctgttctctggttccaaactcctgtctaacttcttttttttttttttttttggtaatacaatacagaaatatatcagggatatttcaaaattcaacatttgaatctgtgaatgtcttaagtactctaaaccagacatctacttttgaaacaattggtggcaagaccgccagccatctgtaaggaagctctttaatgggtccaaaccccaggtctggccaggcatggtggctcacacccataatcccagcactttgggaggccgaggtgggcggatcacttgagatcaagagttcgagaccatcctggccaacatgatgaaaccccgtctctactaaaaatacaaaaattagctgggtgtggtggcaggcgcctgtaatcccagctactcgggaggctgaagcaggagaatggcttgaaccggagaggcagaggttgcagtgagccgagatcgcaccattgcaatccagcctgggcgacagagtgagattctgtctcaaacaaaacaaaacaacctcctcggtctgaggaggggagactggtgaggctaagttttgaattcctggccctgtagctgtcagcccagccagcgagttttaaaaattgggagaaggccgggtgcggtggctcacgcttgtaatcccagcactttgggaggctgaggcaggcggatcacttgaggacaggagttcgagatcaacccggccaacatggtgaaaccctgtctctactacaaaaataaataaataaataaataaataaataaataaaataaaaaaaattagccgggcatggtggcgggggtctataatcccagctactcgggaggctgaggcaggacactcgcccgaacccaggaggtggaggttgcagtgagccgagatcatgtcactgcactcccgccctgggcaacaaaagcgaaactctgtctcaaaaaaaaaaaaaaaaaaaaaatcgggggagggagatttgaaggtcagagcacagagtgaaaaggtcgcagcgtggtcaagtttggcgctagcgacagacccagcattcctcccagcgcacgccgccgcccgggccgcgctattccgaaattgggtccgccctagcgtggcccccggcctgctcctgcgctcttcgcgggtcgctcacctccgcctcccctcgacacagcccgagcccatccgccccccgggtcgacccgcgtttacctcagggcgaggtccaggcgctcggc

SEQ ID NO: 14326 - DNA, 2300 bp, Homo sapien
ttttaagccactaaattttgggataatttgttaagcagcagtaaacagctaatacattcagccttgtttggagtgagtgatgtgtttctggaagctctttcagagaagtgagggagctattctcccagaagccacagcaaacctttccctgtgtttcattggcccaaactgaatcgctggcctatgctgtgatgtgaccatggccattggagaggatgaggcaataacctccagcccgggccacttctggggaggcggtcagtgccccacaacactgggggaggtgcggaggcctgaacggaagttggggtggctgccaagaggaccacaagttcttccatgccacatcgattagggctccttctgagggaggaatgtggggctgcgtagaacaatgggattgactttaagtcagaaagttataaatgtcacctcagtgctgagacccttggaggaaaaactagtccttggaagactgcttttctttgtggaagctcatcaccctgccgctgctcgtgagacactgccttccttggctgatgtcattccaggctcaaggtcatcagtgaggcaaaacaggctttctccatactctctttatcagaaggttcatgactgatgaggtagtggtcactccagcgggaagagcaacaaccactcttgataagtactttttttttttcttctaaaaactgttgctctaaatttgttgaaagtggttcaacagtattggagtctggggtcaagtggctgtgtaaggacaacttttgccattgtgggtgatctatgggctgacacatacaacagaagaggccaggaggatgtcactcgtgtgtgtgtgtgtgtgtgtgtgtttggtaacagctctattgagatataattcacacaccatacaattcacccatttaaagtatgcaattcaatggcttttagtgtatcagagagttgttcaataattaccacaatatactttagaatattttcattttcatcatcctaagaatccctacacactttatgtcccatcctctaattcctctatccccctagctctaagcaaccaccagtctattttctgtctcttagatgtgtgttttaaatgccttatttgccagaaaataagattttggggaaaaaaagcaagaagttgtaccttccaatgataagtataaggtatagtgtagattgctgtcatgaaatgctctacatggcacatgtatgttttctgacctacacatttttaccaagtgggctgtaattttgttgaaatgacttgaaaactctacaggtgactgacccttgttgtttgggaaagtggtaggtgcagggtgatggggggtgggtgtgggggctgacctgggctggaaggatgggtctggggatatgatatgatgggagggggtatggaagcagctctgaggggaaagcagcacagatcaagtgtgtggacagggaagagctgacatcctgagttccatggcaaccagatttgccaaggtcttagagtgtgtccagagtggagcctgaccacagacctcagctcaagggacccagagcccctctgagtcagctgtactgaattacagccccaaatctgggtcaactggggagagacgacgaggattagggttccaaggtgaaactgtgccattgcgctccagcctgggcaacaagaatgaaactctcttaaaataaaataaaataaaataaaataaaataaaataaaatagcctaaggatgcatttctcagaacttatccctgttgttcaatgatgtgtgtctatacagtggggccataactaagacgtatgttgcccaagctggcaagatagctctgaccttctcttgggcccctcatttcccccaaacacaggttgtctgcagtcttgaccaatggctgccagggcatggactccgctgcaggggccagtgggaggccccagctcaggcaaaagcacaggcagatatttcaggagtctgctagggctggcactgagggcagagacagaggggtctccctgtcctttggagaacctcacgctgcagaaattccagactgaaccttcataccgagtaggggaggagctgtctgcgggtttgagcctgcagcaggaggaaggacgtgaacattttatcagcttctggtatggccttgagctggtagttataatcttggccctggtggcccagggctacagtcatcctagcagtccccgctgaagtggagcaggtacagtcacagctgtggggacagcatgctggccaagggtcttcccccacgctcagtcctggtcaaaggc

SEQ ID NO: 14327 - DNA, 2300 bp, Homo sapien
ctcccctctggccctgccaagggtcctcagggaatccgagggagctggcttctcttcctaaactgcccccacctccgtatcctataaatggctcctgggggaggctccctaaaggtagtccagattggagtggggagctggggcggtgtggagaaaaacaggagctaatgggcctggccagctgggcagcgctgctgcggaaagcccaggctggaagctgggccccagagcccatgcctggtcttctgaaccctctgggcctcagctctggatatgagaccctgtttgacctcaggtagatcactcaccctctcagagccccagttgctcatctgtcagatgagaataatggttgcttcctttggggcttatcctgaggctgtgtggaaagcatttcaggggtacctcacccctggcagattgaactaatgcttctccccttcccccaggtgaatatcggctccacaaaggggtcctgtctggataagcgggtgagtgggggagggggtatggaggggtctgagccacttggtaaagggagaggagaccctgagggtctaaggaaggaagcatggccctgccccacgagtcccagactgatggggagacgtggtcctctgtgcttaggggatggcgtcagctgcacacactctgggctgtcccgggaggctgtcacctatgctaagcccttctgacaccttcttccctgatcctgggggtcctagtgctaggcttgccagggccttccagcaaccaatttctctcctcccttctctcttccccgggcaggactgcgagaactacatcactctcctggagaggcggagtgaggggctgctggcctgtggcaccaacgcccggcaccccagctgctggaacctggtgagaaggctgctccccatgtgcctgatcagctcaccttctactgcgtgggcttctgcccctcatggtgggaaggagatggcgagactccaatgctggccttgccctgggaggatggggctcctggccgagaaactggccgtcatgggaggcagtggctgtgggattatgtggccatccaaccctctggatctcccacaggtgaatggcactgtggtgccacttggcgagatgagaggctacgcccccttcagcccggacgagaactccctggttctgtttgaaggtagggcagtgctggagcaggcgccccagggggatgcttctgaactgggctgggagaggagtggtcagctctttgtccagtgtccggaggagggacttccaggagctgcctgcccttactcatttctccctcccactgaccccaggggacgaggtgtattccaccatccggaagcaggaatacaatgggaagatccctcggttccgccgcatccggggcgagagtgagctgtacaccagtgatactgtcatgcagagtgagtcaggctccggctgggctgagggtgggcaagggggtgtgagcacttaaggtggcagatgggatcctgatgtttctgggagggctccctgagggccgctggggccatgcaggaaagcaggaccttggtataggcctgagaagttagggttggctgggagcagaggaacagacaaggtatagcagtgggatgggcccagccctcttcaggaacacaaacagagggagccccagacccagtgcagggtccccaggagccaaagtttatcctctgctgagttcacgtggaggcagcccccaactccctcctcatcagggctctgccaattgagcagaagtgacataggggcccccagggaccttcccccagtccccaggcatgaagtcattgctcctgggccgatgacatctttgtaggaagagggcaaaacaggtgtggggtggaggtgcagggtctagggcccctcggggagttggacctgatgttctgagtcctattccagatctgatttgccatggtttgtgcagacccgaaggagggaggagagtgtgcagggttgggatggtctcccgggcaagcttcccagccttacgcccactcgcctctgtccctggcagacccacagttcatcaaagccaccatcgtgcaccaagaccaggcttacgatgacaagatctactacttcttccgagaggacaatcctgacaagaatcctgaggctcctctcaatgtgtcccgtgtggcccagttgtgcagggtgagcaggggcgtgagggctgctggctacgtgtctgtgcatgaataggcctgagtgagggtgagttctgtgtgtccgtgtgcatgtagaagttgtgtggatgtatgagtgggtct

SEQ ID NO: 14328 - DNA, 2300 bp, Homo sapien
cttgagaaaccacctgagtttcaatccgtcctgcctctagttgtgcgatcctggcacttcacatcccttgtctgtgccttgatttcttcatttgtaaagggaggtgactaatagctcctatctcataggagtgcgaagattgaatgagttgggagaggctatgagatggcacagcacataggaaccacagtgttagcaattgttattgcagtcagaaaacccatcttcgttctaccatttaccggttgacctcgggcaggtccgtccttgtccctccctgtacctcagttttcttctctgcagtggagttacgctccctccctcagtgagaggaagagagtggaggactggcagagatgaggtaggtgaatgtgggttatgtgttgtgagttgccatgcacatgggcagtgttatcattgattttgaatccatttgaattcttagttccaaaaggcagagacaggtgatttcttagtttgccctagctttgcatagagaggacagacactgagggcaatacctgtctagcaggtgaaaccgaatgtccatcttagaggctggcctgggccaggctccactgctggcttcagggccacaggcttaggtgcaggcctgaggaggagctcttagactgtccacagcctccctctctggggcagtgtgcccctgtgtatcaggaggctgttggcttcacccagtgggccaggaacctcactctgcactgtctctggaggtaccttgagtttaccttcctggcctgctggggtgcctcaggactctgagggaagaaggaggggacaactggaagcaaaatgtagaatggtaaagccaaacttcttggtagcaaaactttcctggttccaggaggtaaaaacaacaaccaaatggtcctggccccatggagcagggcagagggcagagggcagccagcccaccgcctttgctggtgtctgcagtgcgtgaatcgtgtctaggtctgtgagttctgaaggttggatgttcacctctactccttcctcggcctgtctcctctcagtgcagctagacatccagtaaacactagataagtacttactgagctgggtggattttccattcatggttccctggggcacaagtggaagtggtaggtctgggccctgtctggtctagagagaggagacccttttacaaagggcaggcacgtagttctgagaggaggagctgatggcagagctggctggactgctcaggtaactgcagagggtctgggcctggaccccccaagggagtccccactgaatggtcaggttgcctgagatagctgagccctaggcactttgcgggcagagatccccttaagctgctttgaccctccctcccccacagtgagtggggcacgggggatgctcccctctctacttggggaaggggccttcctaattatatccccctccactcacatggaaatgagtttggattttctgagcgtacaccagctggcttggggggaggcagcccagaaggctgctggctgggaaagggaggagaaaggagagggaggggaaggagccaggccaagatgaaaaatttccagtgttctcccaggcaaagcaacagcgggtccctgagtgctccccacatatcatcgttgtgcctgctggtaggctcagcagggagccgtgtccacttaggcgaacgcatcctccgaggaccatagtcctcagggtgcgaaccacttagctggccatagcaaggttgttgggtgttggactcctctgcgcccttggagagaggtcctccacgacttctacgccaatctttttacggggtgcggggagtggaactgaggcccagagaggggatagggcctgccgcccctggcagaagaccacaagtctggcttgtccgcagctgggctttccccgtagagttgcccgggagagggtggcgaaggttcccccagcagttccgctctcgctcaggaaagccagtgaggcgagaaaaggctgcgaggggcggggggaggggcggggtggggtcagcgctggctccgcctcctggcgcttgggtctgcctgcggccgggcgctggctcagtctcggctgattgccgctgtcgctcccggggccacgggatgacgcctcctccgcccggacgtgccgcccccagcgcaccgcgcgcccgcgtccctggcccgccggctcggttggggcttccgctgcggctgcggctgctgctgctgctctgggcggccgccgcctccgcccagggccacctaaggagcggaccccgcatcttcgccgtctggaaaggtagg

SEQ ID NO: 14329 - DNA, 2300 bp, Homo sapien
ccctctcccttctgtatgcccctttttccaattttcttcaactgttgcttgaaccagtagaacagctttataacaagttccctgcctcttgcctctccctatcaaatatctatgctgccacctaacaacacccatcatttttttttttttttttgagacggagtctcgctctgttgcccaggctggagtgcagcggcgcgatctcggctcactgcaagctccacctcccaggttcacgccattctcctgccttcctgcctcagcctcccaggtagcagggactacaggcacccgccacgacgccaggctaatttttttttttttttgtacttttagtagagacggggtttcactgtgttagccaggatggtctcgatctcctgacctcgtgatccacctgcctcggcctcccaaagtgctgggattacaggcatgagcgactgcgcctggccacaacccatcattctaaaacacagatctgaccaagtcacttctctgcttagaactcttccaatgtcgggctgggcgcggtggctcatgcctgtaaccctagcactttgagaggcctaggcgggcggattgcctaagctcaagagttcaagaccagcctggccaacatggtgaaacccgtcactactaaaaatacaaaaattagctgggcgtggtagtgcgcacctgtagtgccacctactcggaaggctgaggttgcagtgagccaagatcacgtcactgcactccagcctgggtgacagagagagactctgtcgcaaaaaaaaaaaaaaaaaaaaaaaaaaaagccagacgcggtggctcacacctgtaatcctgtcactttgggaggccgcggaggacggatcacttaagatcaggtgtttgaaaccagcctggccaacatggtgaaactacatctctactataatagaaaaaatttgcagggcgtggtggcaggcgcttgtaatcccagctacttgagaggctgaggcaggagaattgcttgaacccgggaggtggaggttgcagtgagccgagatagcgccactgcactccagcttgggcgacagagactccgtccctccctgccccaccccggccccccagaaaaagacctcttccaatacctctaaaccatctatataaattaagtctaaacttcatcgcctggcttacaaaactccctgccagcctcattccccaacagagccctacccctgcaaaggacctccacaacatgtaagtacacactcataacaaagctctcccctattttacacctctgctcatctaactctgcatgtaatttctcttccctttttggccttttagcaaactcctaccgaaaccaacacagattcaataacctcagtcccctctctttcctctgttgttcccacatcccctcagaacaaaagggctacaaatatctgcttgccccctcctccaccccaattcttgaatgcccttgaaaacaaaagactaaagttttcttcatccttgtccccatacctggcatacatggaaccccagaaaataaatcagaaactctgacggcggaagaatcttgcaaagcaagataagttcttgttatagtcatcattattgcttccaaagagacctctgatagagaagaggaaagaaaaggctgtgaagctgcctagcagaccttcaagcatcctcaaggtatcttccacctcaagtttatgccagaaggaggtcgttttatataccatgtctcacttaatcctcacaacggttccctaaggcaggcattagccacattttaaagatgagggaagcaagactcagtaaaatcactggcccaaggtcacagatcgctagtaatggggcaggaacactatccggtggcgacctcaccgctccagtgggaccagctacttggctgacacacatcgagcccgcgctgcccagggccccagcgccctcacccgtcccgcggaaggaacccggccgcactgccgccggtgtaaacactcactctggccctctcgccggaaaccggaaattccgcgctgcattctgggagttgcagttcccgctgtggccccccgcccccttataaacagccagtctacaagaggcgctagttgcaaagcttccggttctgggggaaggcgtggcttccgcgctctttgaaatgtccggcgccggaatgtctgggtgctttggttggagagggtcccatttccagtcattcttcagcctggtgattcccgcgctcccctgaggagcatatgaagtacgtcggttctgccaggttggaacgcgctgctggacactcggcc

SEQ ID NO: 14330 - DNA, 2300 bp, Homo sapien
gaatatacatatttaagattcagtaaaattatacttttagaagcataaaacaaagttaacaattgtcatctattggtgatagaatagccatgcccctcttaaagccaaaaggctagcagatatcaagacctactctaaagttagagaaatcaagacgtgtgacattggcacaatgacagaaaaatacacccatggcacagaataagagtcaaaaattgacccagacatacatagtcaccggatttatgacaaagctgccactgaaattcagtgggaacaaaatttttaaatagtgctggatcaattgtacacccatatggaagagatgaatcttgatgtctaactcctatcatatacaaagattaatgtgaaattaatcatagacctaaatgtgaaagataaaataacacagaagaaaacctaggatagtatcttcataacgagggcaggcaaagatttcttacataggacacaaaaggcactaaccatcacaacaaaatttcaggccgggcgtggtggctaccgcttgtaatcccagcactttgggatcacctgaggtcaggagttcgagcagcctggccaacgtggtgaaaccccgtctctactaaaaatacaaaaattagccgggcgtggtggcaggtacctgtagccccagctcctcaagaggctgaggcatgagaatctcttgaacccgggaggcggagggtgcagtgagccgagatcggccactactgcactccaatctgggcgacagagcaagactccgtctcaaaaaaaaaaaaaagttttaaaatgaaattaaattatctaataccattaagagtaaaaaaaaaatcatgaactgggaaagtattcacaatatataattttgataaattatggagctcaggtgcaagtaacttagtaggcaggagaggaaggagtctaaagaagtctagttaggaaggattactgaaagagggggtatatctaaaaatgggtaggatgggaaagggagactttgggaacagccatgggttcctaatgcgcccacaacatacatgggagttatcctgaagataaactccctgaagacagtgaaagccatttcaaaactccccatataacttatgagaacagaggggtgatctgcctttaatgttaggccttctgagatcctgcgatctgttcgctctcctcagtaacattaccctgctcaattgctgccttaatcccaggtcgcacattggaatgtgggaattcagcgtttacatttacccacacaggatcagccttcagctgctacgatcaacttcagtattttcatataatcacttttttctttccttagttcttgaattattaattccttgagaagagtccaatcagaggtagtctttcttcagtattttcggtaatcctaatttctgtgcaaaaaaatttctgttccattttaaccgtgcagaactttctgttatctaaaacacagtttctctatgagagttcagtgaaaattccccttcccaaactgattctatgaatgactgttagataagcttcaccactgcatgtagagggtgtaccaggaacccaagttagtagctctcctcaaagacccaacttttggagggggtcatcgtctggttcctggtatgcctccacaggtaggtccgcctcaggaagtcagcggcgaggagcacagaagaggctgccttcaccaacggacagcagttttcatcgtgagggccgtcggcaaccgcttggatgtgtctaaaggggccgtttgggaaccggcccttctggagggaagggtcggagtgggaggggatccgggatccgccttacggccgagtgtccagcagcgcgttccaacctggcagaaccgacgtacttcatatgctcctcaggggagcgcgggaatcaccaggctgaagaatgactggaaatgggaccctctccaaccaaagcacccagacattccggcgccggacatttcaaagagcgcggaagccacgccttcccccagaaccggaagctttgcaactagcgcctcttgtagactggctgtttataagggggcggggggccacagcgggaactgcaactcccagaatgcagcgcggaatttccggtttccggcgagagggccagagtgagtgtttacaccggcggcagtgcggccgggttccttccgcgggacgggtgagggcgctggggccctgggcagcgcgggctcgatgtgtgtcagccaagtagctggtcccactggagcggtgaggtcgccaccggatagtgttcctgccccattactagcgatctgt

SEQ ID NO: 14331 - DNA, 2300 bp, Homo sapien
tgaggtaggagaattgcttgattccaggaggcggagattgcagtgagctgagattgcaccgctatactccagcctgggtgacagccagactctgtctccaaaaaaaaaaaaaaaaaaaaaaaaagaaagaaaagaaaaaaagaaaaccatgaatccacccccaataccttcaattccagtctaatgccacagggtttattctagtttcctcattactatatttattctttcattttaaatagaagcttcactcccattattctcaaaatatttacttatttgatcaatctcttgtcctgcccctccatgaaccatttccttacctggcttggactctgatattctcagctgggcagctagagtcaccacccctactttcctatggaaactctcctcatgcttgggctccagcaccccattcttaccaccaccagtccccctctccacaccacggactccctcttcattcaatctgggctttcatactctcagcccagttgtgaaatgggactttttacaaccaaaagattaagaatgtacactataaattgtgactttgatgaaatcagtaatatttcttcatataggcctgaggaccaaattaactatattctgaacttagttggggttctaaaaggacctgctggccatgcatggtgggtcacacctgtagtcccagcactttggaagattgaggtgggtggatcacttgagcccaggagttcgagaccagcctgggacaacatagcaaaaccctgtctctatagaaaatacaaaaaattagccaggcgtggtggcacatacctgtcccaactacttggaagcctgaggtaggaagatcgcttgagccagggaggttgaggctgcagtgaagcgtgattgtgccactgtactccaggccaggtgacagagtaagaccctgcctcaaaaatataaatataaatataaataaatgaataaataaaagtacctgctatgttttagtatttaatctacttggaacttgtttttgtatgatataaaatggaggtccaattattttcctgacagatatcatcatttattatataatccatccatatcccactgaattaaaattgcactgttcacattttatgttcttaaaaacagatatctattcctggattctcttttctattccactggtttatttgtctatgcccaggccaatattatattgatgctattgtggtatctttatagtgtcttctgagatctagtaagccaagtgcacccttactgtacttctttctacatttattggctatttacaagtactttattctttccaaataaatcatcagataatttaatccaattaaaaagaaacctgttggatactgtgacagttgcatcgttcagcagattgagtcacgaagagatgtataccatctgtctgatgtatctggggtggttgggaaaaaaaaaactgttgggattatactggaatttttttctttttttttctttgccccagctgctgggatataataggaattttatgaattttatatatatttgtagagttgtcctttttgtgatagtgtcttaatattcaagaaagaaacaatgaaggtcatacaatgcctgctcattattcagatcttgattcatttatttccccaacatatatatttgagcacctactataggctagacactgttctagatcctggggattcaactgggaacaaaacaaagtttctgctttttcaaaaaagcagaaagtttagtagtaggagataggtaataaatataaatacacacacacatatatatatgtaaatacatatgtaatacgtcagatggtattaaatactatggcaaaaaatgaatccagctaaaggggatatagtgtgctgggaggagggctgttttttaatttagtgcaaaagatgatgtggtgatatttgacacatatatgaaggacatgaaggagtcatctgtgcattccaggtgggggagacagcaaatgcagaggtgggagtgtgcttggtgggttatgctggcagaggaagagcaggcagcccggtgtggctacagcagggtgagcagccggaagaggggcaggaagtggagacagaaaggttgctgggaggcgccataccgagtacagccatggagaccactgtgagtactgtggctaaataactcagggagaagggaaattaccctgaattttgagcagaggagtgacatgatctgatgatcttaacaaatcattctggtggacaggagtggaagcagggagaccagttaggactctggctttgtcttgc

SEQ ID NO: 14332 - DNA, 2300 bp, Homo sapien
tcgtgctcggcctcaacaggacaatttttttgtttttgagatgaaatcttgctctgtcacccagactggagtgcagtggcgtgatctcggctaactgcaacctccgccgtccaggttcaagcgattcttctgcctcagcctccccagtagctgggactacaggcatgcgccaccacacccagctaatttttgtatttttagtagagacggggtttcaccatattggccaggctggtttctaactcctgacctcgtgatccgcccacctcggcctcccaaagtgttgggattacaggcatgagccaccacgcccagcaacaggacaactttctatgacaaggtacaagcaaggagaaacacataggtccatccagggtgagggatttcgttggggaaaaaggagtgttgtggtgggattaagattaagtaggggcaggactgtattaatgtaccactgaatctaaaatggataaggaaggaagtgaagaggggattaatgtataagagataaagtagaggctttcaaccgattagatgctctgctctgataaagtgaaagaacaggccgggtgcagtggcttacgcctgtaatcccagcactatgggaggccgaggcgagcggatcacctgagttcaggacttcgagaccagcctggccaacatggcgaaacctgtctctactaaaaatgcaaaaattagctggcttggtggcgcacacctgtaatcctagctactcgagaggctgaggcagtagaattgcttgaacccaggaggcggaggttgcagtgagctgaggttgcgccactgcactccagcctgggcgacagagcaagactccttctaaaaaaaaaaagtgaaataacagtaataacagttatgctgtaattctattttttttggggggggggaacagtgtctctgtcacccaggctggagtgcagtggcacaatcatggctcactgcaacctccgcctctcctgggctcaggtgatctcccacctcagccttccgagtagatgggaccacaggcatgcgccaaaacgcctcattaaactttgtattttttgtagagatggggtatcgccttgttgcccaggctgctctccaactactgggcccaagagattcgcctgcctcagccttccaaagtgctgaaattacaggcgtgagctactgcatcaggcctataattcaaaagtagtcaagctgagagaatagcaggctgtggttgaaaagagggttgttcaaattactgagtcgtgacgcgatagcgtttggagggacaaggtccaggttttaactgggattgggaggctgatataagggtcgctaaagacgaggcccgatgttgaatgggttggccacataggctctgaaattatcaaagatggtcagacgggagacagacaaggagctggatacacagatcggcagattatctccaaacggggtgaagtaggtgacagagtctaaggggaagggctgaagaagcaagtgtttttacaagaggtgacagcacctggcacataatcccgacctctgcaaactgagacctgagaatactaattcatgtgagaaagtttcaagggacgcaacattctcgggacagccaggtctctgtcccaggaaggagcggagaagtttagagacaagctgatctaaacacgagaacctctgaggaagaccggcttgaaggcaggagattgaggaggggaccgaagcgacggcaaaccctacactcctctgctctttagttactttcctcccagccaaccgcccaagccacaccaacctccgcaatagaaaacgctcggagaacacgatctcccgcccagctcttttcaactccccgcggaagtgctcacaccggaacccctctgtgtccgcactttgccattggccgaggcttccgcccgcttccattcgcttcctcccacaactcagtcgggctgcgcggtccgtaggagtcacttccgcctcgtcccaccccgccccccggtccctttctagcagcttccggcttcggtcccgccccgccccctgtggccccgccccgcccccgcccccgcccctggctggcggtccagccccgcggcgccgcttccggtgcgggccccgccccggctgtggcccccggctgcggaggagtccgagacgcagctgccgcgccggggcctgagctgccgcctcctccgccgcccgaaaacccggagtgccccgcacaggtaagtggcccgggtccgggctccctcaggcatggcgggagaggaggctgcgacaggtggaggggccgaggccag

SEQ ID NO: 14333 - DNA, 2300 bp, Homo sapien
agttcagggccagggcccacagggcatctgctgatgggaaggcagagcctcggggctgcccagccctggcacctgcttcacacggaccattctctgaccgcccccgccaaacctcatgctccccacttgcccttattggcctgctttcccaaaaacagcccactcatcctttccccagccctcttcagccctccccagtcctccccagccttcttcagccttcttcagctcagccctcttctatttcttatggggccatcttggcctcaccatccccacacgtgccgatgtcaggttcattgaaatacctcagatttgtaattgttgatgtttgagtcttcaggaagtatttgcatctctgaaatcttttttatatgtgttttgctgacttttgttttttttttattttaaaatttttatcgtagcaccaaagaaatgaaaacagatcacccccaaagccaagcaagtgattgggtaacccggcccctctggcccttccctcaagcccagtgaggaggtgggtggaggcatgcaggggagacgactcagggatcgcgggggcggggaggtggagtggagaggcccgctctcacaccgggtcgggccctgaaactgtaccagttctgaagaccgttttctgccacacccccacccccagctgaccagggaggcagaggacacctccccatcactcagcattcccagctcagggcacaggcaggctggggtcctcgctggccttgccagaggttgagccgccccagggtatgaggagatgaataactccacagctcctcctggaccctgcgcgggagcaggcagctcctgtgctgtaaagaaaattgattcgcttgcggctcacctcagtcgaggaagccctggaatgttcagcagaacaccaccactgtgacatggggctgtggcagtgggagacaccgcgcgtggcgtgggtgtgtgtggcagcgtggctcgcattcagtcctgtgtaggagaggaaagggaatcaaaagcttgagcacaaacagatacctcagcccggtaagctgcagctctgctcaactgcgtcttctctcagccctccacacacactcacccccactcccacacacatacacacacacacacacataccccatctcccgagggctgacctcctctggcctcagcctgcagggtgtgggcagagaagggcatctgggacgtggtgccagtgaggagcccagttggctggcactgggcccatttgaaggtgtctcagacatttggccagtatgtctttctcaggggtttggtcacaaaggatggactcttcccacccagaggatgcagggaaagcacactgtgtctttccggtcattggatcctctccctttccccaggcagctcgcctggccacaccgttggagtgaaccctcactgccctcaaggacaacagcagggtgtcacccagagcccgatgaggggtgccagcaggtgcccccacgagtggggccttggcccaagcagagcttcccctgaaggtgccatcagccagggcagctctgtcccctcctgctctccatcttatatgtattctaaccaggaaaaatgtgatagcacatgggtagcctaggcagtgagtaaatacctcagatgtcctcctgcagcaagtgtctatatgttgtggttattttctatcttacatgttctcgaatgtttatatttcaataaacctctacctcttcacacaagcaggtctctctcagttgctttgagtggcctttccactggacagtactggggagaggtgagctccttcagagtgaaaggggactgagtgaactactcctgaccccttgatttctcctgaaccttctccccttcacccacgccttcttcaaagggaaagctcactgagctcactctcagctaaccttgtgtgttagcaggtttctctggcgttaccccagaagctcctagaaaagcctgcccggcagcaagccacaggccccgccacgccattggccaggattgagtcacgtgccctccccagagccaatgggagcgagggggcagggtgaccgggaatgaccttagactgcccgccctgcgcggagggagatccactacaggctgcgcctctgcccctgcgaggggcacccctgggtctctgggaaacggaatggagggtcttatggaagagaaggtttggaaccaccgctggagggaaggggagaagaaagcaagcaggagtggcgcgaacaggaagggactagggatagaagccgggcttggacacagtgaggcacgaaccccgacag

SEQ ID NO: 14334 - DNA, 2300 bp, Homo sapien
gagcctcgccctgctggaagtgcactgctagtctggttcatcagccactctgcacaggacccctgcccaggacccagggtctgcattttaggccatccttgctggataggcccagagcccagggtccccacctgcctgtagaaggtgagtcctgggttggccttctaggggtccagggagggagtaaaaatggcctggacagtctctgaggggctggaaggccctgcatgtggggcccaaagtggcactggcttatgcatcacgtgcaggttaagtgcatccggctcacctagcacctcttcctgctaggagacaaatctgccgagggcccagccctctgtcactccactaccttctcactgacattgcccactgcaagtcctcagacttgaccaaagaatatagcccatccaggcgctgaggatatatcttctgaccctcaagggtctggtttgagaaatagacaaaaacaaacaaacaaaaaaaaaaaacaacaaaacaaaaaactgagattttcctctgtacaaatatatagtggcagactacactgcagacttaaggaacagccccctatgagcacagttgtgtacccatttgagatacactgatttagaccaactcaacctttatgaggcccaaagccagctaagctttctctccttttccttccatcgagatcagcagatcagcttcagtcaggtgccttgtggcagagcgtggatcccacatggggtccttagaatactacttccctatggctcccaggcacctcgttggtgtctgtatctctctctgtgtctgtgtgtgtgcatatctgggggtgtctgcagatgtctgatgtgtatcctgggggtgtgtgtgtgcatgcatgtctgtgtgtctgtctgtccatgcacacatacacttgcccaggagactaagggatgctgaccaggagaaggcagccaccaagctggaggtgaagtcaggtggacaggagctgggacatctaaaccctagatctggcccctgtcccatgtccatagtaaccccctcacccactctccttctcaagtggatcaggggctatttacaacactcctcccctgtctctctgggtatatgtatgtgcagtttcctcttgctgaaatgcccttcatttcctctctcctcctggaaaatgcctgtctatccttgtgtgagggttcagaggctcagaaaccccttctctgggagggactctcctatctgccaccccttaaccagctcccactgtgcctcttccctcatctggcacattaaattattacttgcaaaataggcacagtggttcatgcctgtagtctcagaactttgggaggccaaggtgggagaactgcttgagggtcagaagttcaagaccaccctgggcaatgtagtgagacccccatctctacaaaaaaaaaaaaaaaaaaaaaaacttagccaggcatggtgatgcgtgcctgcagtcccagctacctgaggcaggaggatcgcttgagtccaggagtttgaagctgcagtgagttatgattgcaccactgcacctcagtctgggtgacagagaccctgatgcaatcaatcaatcgattataaatcaatcaataataaataaataattgcttactcaattaccgggtgcccccaaaccataagctgttgaggacaaggagtgatctgatttgacattgcttctgcacacagaagagggccaggcatgtagcagatgctcaataaatgcatgctgaaaacatggatggagaatgatggggcatgatgaggaagaggcagaaaatgggaaggaagtataggatcaagatgggggcatcctaaggaggggtaagagactaattggtttgtatgggaaagactgggcagtggggaagacaatggggagaacggggttgagggggtggagaagaaggtgggagacagtgcccacctggggaggccaggtcccactctgcctctggagtctctgcagttcctcctctttaaatttcagggcaactgccagccggtgccagcgtgccttccaatattcagccatctcctcatgaagcctgggatgtgattcttgtgcctctagctctttcctgaggggcactggtacctccaggacctggagtgtactggaagaaatggtgcagtccaggtacagcatggaccccagatcacccccaccccactccctttcagtgattattgtcttatgaactaggagggggagtggggcagagatgcctctttcatggctccctgcacacacagaacccctttgtactgggcacttctactcc

SEQ ID NO: 14335 - DNA, 2300 bp, Homo sapien
cctgcccttagtgagaagctgagctgtgcccagcttggtccgggaggggctcatggtccacagaatggagtgcacatgcaggccagattgtcctgagcaggggggcaggccagggcagccccaggaaggctttccagggaggtgaccctggggccaaggctcagaggtgaattaactgcctccagagaaggcaaagtcagatgaggcagacagaggagacagtaaggacaatagaacaaggagggcatcagagcagctgggcctggcgggcagtgaactgagccctaagcttggtggaagtggaggtggggggcaaaagggagaccaaaaggggtgagaggagctgtggggtttgggaggatgcagggcagcggcacctccccagtgcccttgagatatgctacagacctcaactccacagaggctgaggacccagacaggagcttgggcctgaggggcagtggaggtggagcaagcctcctctgaggtggggatgggagtggaggagttacccaaacctcacctgggggcagatctttctccaagtttctgaaaggtgtgaaagtcacaaaagaatgaagctctaagggtagaatctcaggcaggatggcctccaggctgcaaagtgtggagagggagacagctgggagatggcttctgttccacctcagaaaaagagagttgcttcgtggctgggaggtagggactcctggattctcagtggtgggcagttttgtgggaaggtgactaacttaccccatcagagcctatagctcagggcagggctggggacagaagcttctctgagaacatccatcccggggacagaagcttctctgagaacatccatccctcagggctagtatcctggagccatggaaactcaggcaacactaagtggtgggaggaggagacaccagagaggcctcctactccacctcatctgagctgatgaaaccccgagatggaacctggctagtgtggtcgaggccatgggtaccaggcaggaatggcatctcagatggcctgggatttttcaaaatcttcagcttttgagataggaccttagggggcaggacctcagcagccaatctgggtcacccactgtacactgaagcggctcctaactttcttttttgagacggagttttgctctcttgcgcaggctgcagtgaagtggcgcgatctcggctcactgcaatctctgcctcccgggtttaagtgattctcccacctcagcctcccgagcatctgggactacaggcgcgtgccaccacgtctagctaatttttgtatttttagtagagacggggtttcgccatgttggccagactggtctcgaattcctgacctcaggtgatcatccacctcagcctcccaaagtactgggattagaggggtgaaccaccgcgcttggccgattttttgtttattttttgagacagggtctccttctgtcgaccaggctggagtgcagtggtgtgatcatagctcactgcaatctcaacctcctgggatcaagcgatcctcctgcctcagtcccctgcaaggagctggaactacaggcatgcgccacccagtccggctaatttttgtaattttttggaaggggacccagttttgaattagcttctgttgtttacttcggatagccatggtggagctggcagagatttaggggatactaaacacccctacaaatcacgccttgaaaccccccgtttcagggagagccgctggcgaaggacttgatgcgcagccgcagctcggaagcggggggctcccctgcgacacctccccgcttcaggggcgggcccagacccgcggggaggggcatgggcggggccgcggctggctggcggccgccggggcggtgctggggaaacccttggcgcccccgcggagcggtcccaaggagggggcggtgcctggagggatggtccgccccgactgcgggtttctagccctcgcgtggcgtggggacaattaggcgccacgccctgtcgcttcactgcgcgacgctcgcgaggccggggacgccactcccagaccgggcgggacgcgcacgctcacagtgaggtctcaaaagatccccacctcagttttctcatctggaaagtggggcctcgtaatcctgtccgacccggcgcgggacagtaggtgtcagggattttggtgaccccacgctcgaggcctctgcaaaagggggctgtccagtggcccagagacgcagccggcggggcttttgtctagcgggggagtcttaactgagaggccacgcaggccggcaggaagccgct

SEQ ID NO: 14336 - DNA, 2300 bp, Homo sapien
ctggagccatggaaactcaggcaacactaagtggtgggaggaggagacaccagagaggcctcctactccacctcatctgagctgatgaaaccccgagatggaacctggctagtgtggtcgaggccatgggtaccaggcaggaatggcatctcagatggcctgggatttttcaaaatcttcagcttttgagataggaccttagggggcaggacctcagcagccaatctgggtcacccactgtacactgaagcggctcctaactttcttttttgagacggagttttgctctcttgcgcaggctgcagtgaagtggcgcgatctcggctcactgcaatctctgcctcccgggtttaagtgattctcccacctcagcctcccgagcatctgggactacaggcgcgtgccaccacgtctagctaatttttgtatttttagtagagacggggtttcgccatgttggccagactggtctcgaattcctgacctcaggtgatcatccacctcagcctcccaaagtactgggattagaggggtgaaccaccgcgcttggccgattttttgtttattttttgagacagggtctccttctgtcgaccaggctggagtgcagtggtgtgatcatagctcactgcaatctcaacctcctgggatcaagcgatcctcctgcctcagtcccctgcaaggagctggaactacaggcatgcgccacccagtccggctaatttttgtaattttttggaaggggacccagttttgaattagcttctgttgtttacttcggatagccatggtggagctggcagagatttaggggatactaaacacccctacaaatcacgccttgaaaccccccgtttcagggagagccgctggcgaaggacttgatgcgcagccgcagctcggaagcggggggctcccctgcgacacctccccgcttcaggggcgggcccagacccgcggggaggggcatgggcggggccgcggctggctggcggccgccggggcggtgctggggaaacccttggcgcccccgcggagcggtcccaaggagggggcggtgcctggagggatggtccgccccgactgcgggtttctagccctcgcgtggcgtggggacaattaggcgccacgccctgtcgcttcactgcgcgacgctcgcgaggccggggacgccactcccagaccgggcgggacgcgcacgctcacagtgaggtctcaaaagatccccacctcagttttctcatctggaaagtggggcctcgtaatcctgtccgacccggcgcgggacagtaggtgtcagggattttggtgaccccacgctcgaggcctctgcaaaagggggctgtccagtggcccagagacgcagccggcggggcttttgtctagcgggggagtcttaactgagaggccacgcaggccggcaggaagccgctccacaggagggggctcaaggagaggggatctcctccctccagactccggccccgccagagtagctctagggtatcttcccagaaactgccccgcacgcactggcgagctgggagcgccaccacggctttcaaaaaacccgcacacaccaagataataatgtgtcgttcgctcgtttcgcgcaagcggagtcgcgtccgccttcccgagctccggcacacagacctcaggccgctctcgcgctctccggggccccgagaacaatgcccgtcctctccgcgcgcaggagggagttggcggaccacgcggggtcggggcgacggagcgggcccagccccacggccaggtcggggccccacctctcggctctgagagcccagccggcccgggccgcgcacctgtcaggtcgggggacctacgtgcgccgcgacacggcgggaggcgggccgggccaggctcgtcccctcggccctcccggaactagtctcctaggccgcggcgcccgccggagcggagagggctggtgccccggagccttcgagtcgggggctagagcggccaggcctccgagccgggtcgagccgaggctggcgacggctgcgtcacgcgagggggcggggctgccacgggcggaggtcgcagccggaagcggaagaggcgctcggagcggggagtggggcctagctgcagccggagcctgggagacggtaagtgtgggctggggtccgcggcggcgacagcggcggcggcggccgggggtgagtcggcggggcaggcgcgctggtgccattcggtctcggcctactccctttctttctcctcttcggcccatatcgggccgcgacctctcacccctgacccgctgcttc

SEQ ID NO: 14337 - DNA, 2300 bp, Homo sapien
aaaatgtgcttggccaggcaagctcaggactgaccatgactggaggttggctgtggccaagtgtgagtgttgggaagaaggctggctccatggaggcagtcagggattgacgtatgggtggagcaggttgctggcctcacatggccagctttctccgctggtggcagatccagcctggcaatttcatttggtggatataagtcctcactgaacagggatagtgaggtggggctcttttacctgccagatggctaaccctctggctatcctgggataggcggagggtaggatactagagccagagagctagaagaagggacagtaacggtactgttggataaaggcaaggcacctggcagggcactgtgggggtctaaaagggtgctaaatgggcctctggaaagaaagttagatgcgctgggtccacgtccccttgggttgaccctcaggagggctatggaatgtttgtgaggcctgtgtgcctctttctccaagggctgctcttctagtctcttgtggctcctcatgctcacttgtggtccttactcccttgagtggggtccagttcagggccctagccagacagcgttcagcttctcaaacttgagggctttgagccctcgcctcctgtgtacagccctttgcctggcctttggctttacagagcattcacttcacgggaccgcccccccgggcgggagggaatagagtgcaggaggctcccctttctcctgcctttgatctccctgtggtagtgttcaccgtccccacccagggttactgcctcagcccctggccctggctcacccagttccctgagcacccaggccaccaggctagtgatgctctgctgggagctgtttgtttgttcactggcagagaaagttgtttcctattgtctgctgtttgaccagtgtgacctcagagttcttcttcacttcataaacctctgggaggggccgccttcaaacagaacaatgggcctcttcaggagcaaccgggaagccccagcagccccatggctggaggtggctggctgtgtgtttagcagggctctctgttcctcgtggcctagatgcatcactgtaagcgataccgctcccctgaaccagacccgtacctgagctaccgatggaagaggaggaggtcctacagtcgggaacatgaagggagactgcgatacccgtcccgaagggagcctcccccacgaagatctcggtccagaaggtgagagggaactagataggagggaaagactccttctgtcagctgggctcagctgtggcagctccagactccttgagatgactccatccctgcccagctgtccctggatccctgccctgtcctctttgggctcctccactaacctcacctgcatgccttggcctcagcagtagctaccatccttgccgcccactctttctctgtcttggagtgccttttcttctccccacacattcccccattttctaggccagcatctttccgcttaacctcctaagccttccttggtgaggattaggaacataacctcacccctggaaagtttgctccctgggcctatcttagctcccaggtcaaacttagagttgcagcaggccacagggaactctggaagggtatagaacccttggaggcactctaccatactccccttcccctgtacccctcctcctacagctggaggatgctgtcgttggacagggctctggagggcgggcttagtacctttgcaccctcccctctctgcccacttcccaccagtgtggatgcttttagcacaggctgtccccctttagccctttacagtggccttaccacaggtctcttgcttgctaacagcaaggacccagctgaccagcgtccccatcccccttttggcagccatgaccgcctgccctaccagaggaggtaccgggagcgccgtgacagcgatacataccggtgtgaagagcggagcccatcctttggagaggactactatggaccttcacgttctcgtcatcgtcggcgatcgcgggagagggggccataccggacccgcaagcatgcccaccactgccacaaacgccgcaccaggtcttgtagcagcgcctcctcggtgagtggtagccagagtgtgctggctggggcttaaaggcctcatctcttcctagccttctctcaggctggctggtccgggtgagtactgccagccctgtgcacgtgcactggtgtgcgtgcatgtgtgtgtgtatgtgttgtctggtccaggtgtagggctgatcacagggtcctggcctctgtgtcttctggct

SEQ ID NO: 14338 - DNA, 2300 bp, Homo sapien
cctgagcacccaggccaccaggctagtgatgctctgctgggagctgtttgtttgttcactggcagagaaagttgtttcctattgtctgctgtttgaccagtgtgacctcagagttcttcttcacttcataaacctctgggaggggccgccttcaaacagaacaatgggcctcttcaggagcaaccgggaagccccagcagccccatggctggaggtggctggctgtgtgtttagcagggctctctgttcctcgtggcctagatgcatcactgtaagcgataccgctcccctgaaccagacccgtacctgagctaccgatggaagaggaggaggtcctacagtcgggaacatgaagggagactgcgatacccgtcccgaagggagcctcccccacgaagatctcggtccagaaggtgagagggaactagataggagggaaagactccttctgtcagctgggctcagctgtggcagctccagactccttgagatgactccatccctgcccagctgtccctggatccctgccctgtcctctttgggctcctccactaacctcacctgcatgccttggcctcagcagtagctaccatccttgccgcccactctttctctgtcttggagtgccttttcttctccccacacattcccccattttctaggccagcatctttccgcttaacctcctaagccttccttggtgaggattaggaacataacctcacccctggaaagtttgctccctgggcctatcttagctcccaggtcaaacttagagttgcagcaggccacagggaactctggaagggtatagaacccttggaggcactctaccatactccccttcccctgtacccctcctcctacagctggaggatgctgtcgttggacagggctctggagggcgggcttagtacctttgcaccctcccctctctgcccacttcccaccagtgtggatgcttttagcacaggctgtccccctttagccctttacagtggccttaccacaggtctcttgcttgctaacagcaaggacccagctgaccagcgtccccatcccccttttggcagccatgaccgcctgccctaccagaggaggtaccgggagcgccgtgacagcgatacataccggtgtgaagagcggagcccatcctttggagaggactactatggaccttcacgttctcgtcatcgtcggcgatcgcgggagagggggccataccggacccgcaagcatgcccaccactgccacaaacgccgcaccaggtcttgtagcagcgcctcctcggtgagtggtagccagagtgtgctggctggggcttaaaggcctcatctcttcctagccttctctcaggctggctggtccgggtgagtactgccagccctgtgcacgtgcactggtgtgcgtgcatgtgtgtgtgtatgtgttgtctggtccaggtgtagggctgatcacagggtcctggcctctgtgtcttctggctctttccagtggcaactgtaggaactctggctccgatgctggctggcccctggcctgtctatgtctacacagtgctccagacaaaggccacgtggtgcaagtggctggggacacttcttaggacacttcttagggatcctagtagagtggctggtatggtggtctgcagctatatggcctggtccttcccacccagagactgcctcctcgtgtaactgagtgctctgatgtggactgcacccacctctgcgtctcatctgcacaccccttcccaaaggcccccagtctggagtgcctcacaggaccggaggatttgcctgtcagccagctcagactgggaacttcccttctgatctccagccaggccctctccagccgagcctctttacgaggggcagtcgcggtgaggaggggcaggtgcctgtgtgatggggcatgtgaagaaatggcagaaaggctgccgccccaggcctcgtccagttgcaggccacatgcccagagcagggcctggccagtattcctagcatggagggttgtaaggtctctggagcccacattgcgctcagtcccctggggaagcaaagccagttgtgtatttccgaggttacgtgcggtcttctcttctcccccatccctcttccctgcctccctcctgccggccttgaggcccctgaggagcagtggagaggccaggtgtcttctctgcccagcgctttctgtgacttctttgagtggctacaggttgagggttgactgtgcgggcgattgcagcgtggccctttcacctctttgcacactgccacatgctgccacag

SEQ ID NO: 14339 - DNA, 2300 bp, Homo sapien
agcagcttggctgtgagtggcagctgtcaggcatgtgcaagtctgcgtgggcgaacagaggcaggcaaggacaggctgggcattctgcagctgaagccggagcagccgctgaccagtctggatggttggacccaggcggggccagctgccttcttgcgccgccgttctcactgcatcttccgctctggcccaaagccacatgggagggtctgggagggagagactcggaggaggaggaggagggagtcggggcgatggctctcctcacagcgtggccctcagcagcagaggcaggtcatcttcctgagcgtttgtggcgctcctcttaaagataatgtccgagttttctttacatacctgtagctgtttttacttttctgtttttgaagtcagtttgtgtcttgacgtgtcccttgcaatatccctatcgttatatatgctgtgtgccttatgaaatgctgggatctggaaaatccaaccaaccaacccaccggctcctcaccgtctccacctctgcctttgactgacacctcaatctgtcaatcggaaccgcctaccatgcgattggtcggatggcgtttcggggggcggtgcatgcagagaagccaacagagcagtaagcgcagcagccggagtgtggaagatgacaaggagggtcacctggtgtgccggatcggcgattggctccaagagcgatgtacagccacctttcgtaaaactttacctctctactttctaccccccttgttagacgagacctctcctgcctggaggggcctctagtgcgcgtggtgccttagcggggccaccagtaattgcctgaatgacacagacactagcaacttccatttttaagagtgtagcagtgagagagaaaccttttttgtttttgagaatttgaatgctgtgaacttgcaggagctgccaaccccctgccctccagattctcatgcccaatttcttttctctcctagatgagattgtggggaacctgggtgaaggcacctttggcaaggtggtggagtgcttggaccatgccaggtgagcgagctgcggcagtacagctggctccggatgtgatcttcctgggaagagctggcctgaggttcttgagggtggcagctatcagagcttaacttttttctttttgaagggtggcatcaaagtagggttccgacctgtccatgttggggttttgctgaccccctgtaataagggagaaattcttgggtcctgcagttatgtggcatccctacccaagaattgttggtcagtgaaaggttctgctccaatctcttcacttctccagggctgtggtggtggatatcagaacagggccaaggccccggctcccctgtggcttggagctgcttcctgtgataacttttaggttcttggcttagcaaggggctaggagtaccaataagcccagcccaagcataagtcccattccctgagggtctgcctgagaggctgtgcagatctcagtcgagagaaacatgaccctgggctttctcaccaagcaggctgctgccttcttcagtgtgactagggtagtgtgtggtctccgctgagtgtgcctgggagagtggggtatacctgtgtgtgtcatgctgcacctcactctctcccaagcccaacagtacaatagttttttccccttaccattccacaagactagaacatttgcttcctctcctataggtctgggttggggaggccacctccagggagccagttgccaccctgccataggctctctagttggtttggcacttcagctacaaagtgcttgtgtcctcattggagccacatgccacccatatgtggccctctcgctatttcagagatgaataaacatgctcagggtttgcctgcatcatactccagttaacagcagagctggccaccactgcgctgtagtgctcctacattaaatggggtgttcaggtcattcagacccaggcgtccagcctttcctgtggccacgagatagactgagaggaagtgtccatttgctccaagttcctatgtaaatgcctgtacgactcagcgtggcccaagaggttagggttgggaccagtgggtggagggacatgcacaaccacaccgtggccaggtggagacatggcagactcaacagccgggatgcatgtaggcattctgggctgctcctctctcaggagctggagggaaaatgagcctctggagtcactagggggcaggtggagggtccagggaaactttacgggactcaaagggagccagggccagtgggggttgtcatgcagaggcagaat

SEQ ID NO: 14340 - DNA, 2300 bp, Homo sapien
tggggctctcacatagtaggagatacccaaaggagggcctttctgtggcagacacactgagcactctcctccacgcactgtgctgagcctgggcagatgggtgaatccagcacagaccctcacgaagctcagcagagtgagcaagtggagaaaagcagcaccagtcctgcggagtgcactagcactttccatctctccctcagcaactctgaggcagggctgcttccatatcataagtagggaagctcggagggcttggaccagaaccgtggacatctcccctaccccccgcaggaagcttagtccttgcccagagctcatctgggtattgggtgatggctggtggggagaggtgctcttgctctgatttctcttgcactgtgtgtatctgcattctggtgtgtgacccggtggcctaggagagagttgggaactgtcttcatctgagagagggggtgaggcaggcccccagcacacagcctgagccctgcccatcctcctcctccagcctgtgtgtcttgatgtctgactggttcaacttccacggtcacatgtgcatcgcctttgagctcctgggcaagaacacctttgagttcctgaaggagaataacttccagccttaccccctaccacatgtccggcacatggcctaccagctctgccacgcccttagatgtaagtgtccaccctcaaaagaagcatgggcagccacatgcctgcagccaagtcatctggttacttgttgtccccattcattccagcacgttactaaccattctcctgggcctgagggacaccagatcccctttggcggaaaggcctgtctttgggtgggaatctcagtgtgaggatggaaaggctagggctccctccagggacctcctggaccagcctctctacccccaggcactcaggaagaaaacagaaacgaactgctctggaattggcctaaccaccaaccctgcctccctgcttcatgcatgggataaaaaggtagaagcctgacctgacagatagcaccacaggtcctgcccacatggagaccctcggtctaaccctgacttgtcatctccctgccagcctggaaaagcattatttggcagtgccagggctcagcgcagtaggatttgcaatggttgcagcagtacagaaaggctccttggtgaagttggtaggcgttgagctagaatcgctcaaggtcaccccgcatcgctcccctaccctgagcactgctactgtgataggctgcaggccactggggtgggaagccccacatggatgagaagacaggtgtcttcctcctcccacaggatctgcaagatgggacagggacaaggattccaagcaaggggaacagcttggtgaggcctggagcctgttaacgggctgagaattggctccagtggagtagactgccactggggagtggtgggccacatagttgtgagggtcttgagtgccagatgggatccttgagctgaaaagtgactactagcaagaagccactgtcagaaggggctggaggggaaaggcttgcctgcttatgactagcaatgagaggcggggctgtcttcctgggtatgcgacctgtgcactcagtcgcacaggaccctgtgcttgatttaatgtccttttgccaccaccttaatattcttagtaacttgaacaggggacctgcattttcattttgcaaagggccctgcaaattatgtagctggtgcagggaagagggaaccacctcgaggctgttgctgtagctctgctgagagacaggtgaggaggcctggtctctgcagaggagaggtggagggaggtttttcgaatggcaaatttctttcctacccccctgctaaagtatcagaaccctccaaggcctcaagtacagagaacccttgagagggaggccagcacagaggcaggctgtagtccagctccctgctgaggtgggggtgtgaggacctctggcagttgctggcattggaagaggggtctggcctagagctggcaggagagccagcttctcagtgcctacttccccttctttccctgctaccttagttctgcatgagaatcagctgacccatacagacttgaaaccagagaacatcctgtttgtgaattctgagtttgaaaccctctacaatgagcacaaggtattggtgggggtaagggtgaggccctgtttcaggggtgggttacccgctggtgcagactcctgacctggcaggcctgccttgcctttcagagctgtgaggagaagtcagtgaagaacaccagcatccgagtggctgactttggca

SEQ ID NO: 14341 - DNA, 2300 bp, Homo sapien
tgccaacaaccatgtgccatggtctctcgattctctctgcccttggcacatgctactccctgtacttagaataccttcttcttggccaggtgcaatggctcacacctgtaatcccagcactttgggaggcagaggcacgcagattacctgaggccaagagtttgggaccagcctggacaacatggcgaaaccctgtctctaccagaaacacaaaaaattagctgtgcatggtggcacatgcctgcagtctcagctacttcatgaggctgaggtgggagaattgctcaagctcaggaggtggaagttgcagtgagctgagattgtgccactgtgctccagcctgggtgacagagtgagaacctgtctcaaaaaaaaaaaaaaaaagaatgccttcttctttcttgcttgcccctgttaatcaccacttgttcgtcagggctcagcttggatgccactgctccagaagggtgactggtttctccagcctggggcaataatatggcttactggagaattttgtttcctctactacagcactatactttctagagacctcattgggctactagaggaaaggcacagtattttattcttcgtgtccccggtgtctagcagaaggtctggcacctggtatcagtctgtctacaaataaaataaggcactgcccttgatatatgagcataaggggcaggtgggaaggtgccaaactccagctcccctactcagttgtcagtgtggttctggaagctctcaggtatggagactgatttgcatcccagccacgtaaagtaaatgatgagtgccaaaggccaggtctccgaaggttcctagaaggaaggcttctgatagttagcaggagtctcaggcccgatggctgctatcaggagagagtcaaaaggcagcttgccagaagaataatgaggacatctaggagatgggtctgaggaggggcaaagaaacctcacagcatccaggaaagtgacttcagagagacactcccatcagatgagcagaaactgcctaatgaactcgtatgtgtgtatgggaggcactgtggtggtggccaggcagagcatccttactccacattgagtccctgccagtttatagacatttacctgttaggtcctccgaggagggtcagtgccatctgactggcacacacacctgtcatctccagtctccgctcaagggtcagcccatgcttctcagccacggacaacagctttttatgcagctcataggaaatacttgggacaaccaggccagagtctgcagttcaaaaggagaagagaaagggaaagtgactacagaaaccaagtccaaaccgggtatactctatccaagattctgcaaatgccaacattttaccatggatcacccctggcccatcctcttcatcttccgggactaaggcacgctctgcagctctgcagagctcaagtagtgactggtgaaccaagtaacaacttgttccaggtcaccacagagtggggacaaacttaagctcccttagcaatttagctttagaccacaaaggccaaatctaccaggatatatttagtgctatcgagaccagcacacagcctgtaacagcaacctatcaggcacatgagaagagaacatgattttcccaaagtgggggaaatgccatcttgggcagcggggcttcctcacaagcaggccccttgtccttcctgagaagtggaacagacactagctaaccctaatggccctctggtccctgctgttctcctcaactgtagggcaggaggacttgttccatctgcttccctcttcctcttccttctctcttctatttaccccttcctttttgattaagaaacttagctagcaaagttgttttctcaaataatttatcattttctccccatctgagttgggtgtaacccagtactcacgaaacagggaagcagtacaagttaagtaagctatggctggctttaaaaaagggtaacttttataaaagttggggagaattagtcactgaaagtacactgtggaaaatacttggtttttcaaggctcaaagccaacatctacagcagctggtgtatgtgaagaagtctatagtattattatatgcaccagtgtcaacataccaggaaagaaacagcaaacccaaaaatttggatctgcaatggacagctcttaccttgacaaccaaggtattgctccctccaagaagccaatgccatcttacaaatgccaaagccactgggctaaccagcagaccctttcccaaagagccccacttggcttcaccggccagtggaccaa

SEQ ID NO: 14342 - DNA, 2300 bp, Homo sapien
ctcagaatggattgtagacctaaatgtaaaatggaacactataaaactcctggaagacaacacaggagaaaacctaactgatcttgggaatggcaatgactttagggcaataccaatagcataatctgtgaaaaatataattgataagctggacttcattaaaatttaaaacttctgctcttcaaaagaagaatgagaagacaagccacagactaggagaaaatattataaaagacgtatctgatagaggactgttatctacaatatacccagaactcttaaatcacaacaagaaaataacacaatgtaaaaatgggcaaaatacctgaatgaacacttcatcaaagaagatatacacatggcaagtaagtatatgaaaagatgttcaatatcatatgtcattagggaattgcatattaaaacaataagatactactacacacttacttgaacggcaaaatactgacaccacaaaacgctgacaaggatgtggagcaacagaaaccctcattcactgctgtgggaatgcaaaatgatgcagccactttgaaaggcagtttggtagtttctcccaaaactaaatataccatccaatccagcagttgcactccttggtatttacccagatgaattgaaaactcatgtctacacaaaaatctgcacatgatgtatagcggctttattcataattacccaaacttggaggccaccaagatgtctttcagtaggtgaatggataaaccgcagcacatccagacgatggaatattattattcagcacaaaaaagaaatgagctatcaagccatgaaaagacatggaagaactttaagtgcataagtgaaagaatccgatgtgaaaaggctgcatactgtatgattccaactatatgggattctggaaaaggcaaaactatggagacagtaaaaggagcagtggttgccagtggttaggggactgagaaggataaataggcagaggacagaggattttcagggcagtgaaactatcgtgtatgataccataatggtggatacatgtcattacatatatgtcaaaacccacagaatgtgcaacaccgagagtaaactctaatgtaaactatggactctgggtgataatgatgtgtcaaagttgggtaatcaattgttaccaaatgtaccactgtagcacaagatgtccatgaggggacaagttgtgtatgtgcctgtgtgtacaggggatatatgggaactctgtactttctgttcagttttgccctgaaccaaaaactgctctataagtgttcattaataacagtaattttaaaagacaaggaccccttctgacctagggaatctctggtgatggagggggaagggtgaagcagtcccctagaaagtgtagattttacaaagttcttcaactgattttgtagagctaggtttggaactgctaccctactctatgctattcgcccaagtagtggttcccaaaccaggtgtcaggcttcaaggctgtgcaatattcctcattacacggtcttggccctaaacgcatgctttcccgtctccccacaaatcaagactctaaaatgccaggggtagaagagcggcactttcctgtgtactgagtatgggggaagggagagcagtcaagcacggactggctgattttaacccccaaaagggctgaagctgatacgctttgaagatcgaccacggcaggaatatcttgttttctttaatccatcagggggttgtcgcacttattaagtcccacagctgcagtttagcacggaggggctgtcacgtcaccaggcctccctgaaagtcctccgctccagctctgcgattggcgctggggtaacaggaggggaagcgggtgcttttcatcgagcctgcaagaggggggcccaggcatcgaggctggggagtcgtgggtagagccccgattccagccaagacgccacaggacataagtaagcgtggagggcaaaatgactacccaagcgcaattctgtaaggccgaagggacgttcttccaacctcttaaatttcccgggtgccacgcccctcaattgacggccctggattccaaggtgtcgcgccggaagtgacctcacggtggtggcgtggagacgtgggggcgcttccggcagcggcggcggtggtgaaggccgatgctgtgggggtgggcgtggagagaattcttctgtgggtcctctggtgttgagtggtcggcttggtgtggtgtgcggaggagctccaggcccgtcggcgcggaggtgggagcgaagggaggctactggtttgtggacggt

SEQ ID NO: 14343 - DNA, 2300 bp, Homo sapien
ctcactgcaacatctgcctcccaggttcaagcaattctcctgcctgactccactccccccaaacccccctcaccgccccagtatctgggattacaggtgagcaacaccatgcccggctaatttttgtatttttgatagagatggggttttgccatattggccaggctggtcttgaactcctgacctcaggcgatcctcccgactcggccttccaaagtcctgggattacaggcgtgagccaccgcacctgcccaggtacactttttatccagatatctatgcacattgattcttgactccacactcctgcctctctccgcaaggccttccctgacccccttgttttgaattgcaatctgccctcacataatccgtacgccttttctgtttaatttttttcaaccgcactttttaccctctcacattctctagatttggggcatattacttgtctccttccatcagaatgtaaactccacgagattaggagtgctgtcagctgtgttcccttctctgtcaatcgccagcgcctccgaacagctcctggcacatagtagttgcttggtaaatatttgtgcaatgcacgaggccgcatatgaccggaatgggaggtgaggggattattttctggcctggaccagcgacggatggtggtgccaccgggttggggagcacgtcggggatggcgcgtaacgatgttagctggggccaggttgagctaggcacgcaaatacaactttttttttcctggaaaccctgtaacaggaaggttccggagggcgggacagcgtcggaggcaggcagctaggccatgccaaatggcactggggcttcgtgtcgtgccacaggcgtggaccgaaaatgcggacacatgcaggctgcctctcctcgcaggcagaagccacacgcagacctagaccctttgcaccgcatccccttattcaatcgcgcacccgccacccttcgacagttcctctccctccaccccaaccccacgccgcgcgcgaggctggccctttaagagccccgccccgactccctcccccctcgcgtgactgcgagcccccgcgccgggccggggaatgggtcggctgggtggctgcgcgggcctccggtccttctcacgcaacgcctgggcaccgcgcctccgggccaggtggggcggggacgggccgcctgacctctgccccctagagggatgtcgccggcgcacgcaagctagccgggggtagggtgggggctccgcgccaggtgccccctccgtggtccctgggcccgagtctttccgtggccccccgccgccggatttctgtgctctgccaatcaaagcactagccaccccgggagccaagagggaccctcaagggccggtgggtcctggctggagggaccgcgcgttgcaatcagcactaaggcgatcctagaggctgcgaggagccgctagtgagcgctcagcgagcctgccccttcgccatccattccgatccttcaatcaagaggcgcgaacctcagctagtcgcccgggctctgggggacaggtccagccccgcggcgcctctggccttccggcccccgtgacctcagggctggggtcgcagcgcttctcacgcgagccgggactcagtaaccccgggaaggaggtcaccacggggcagccccgcccccgcctgccgagtcctggtaggctgtagcgctggggaggcatctgcacgcccagcgttccagtgggtgcaaaaatgacgaagaggagtccccgcgccccaggatggagcttcccgtaccctctcttcgggctgtcctgggacttctccctcaagccccctcctcggctgggttctgcactgcccttgggacgccttggaattgggacttccaggtgttcccagccctcacccctctatgtacaggcaccgagatgtgtcccatagtgggttcttgcccacccgaccccccacccccgccgccctccgccacctttctctccaatcccagagagaccagcccggttcaggctgcttctccctccatctcagctcgctccagggaaggaggcgtggccacacgtacaagcccgcctataaaggtggcagtgccttcaccctcaccctgaaggtgacagttccttggaaccttccctgatccttgtgatcccaggctccaagagtccacccttcccagctcagctcagtacctcaggtgagttgctgggggacttctggcttgccctttctctcccaataaaaggaacattttggtgcctccaggacttcttaggtagctacctgtctagcacctccaaa

SEQ ID NO: 14344 - DNA, 2300 bp, Homo sapien
acagagagaaagaaagagtccattttctataaaaccgagcctaacctcaaaccttgacctttttcattgagtcatctgaacccaatggagatatagacaggaaacaactttcctcttctcccattcatggccttcaaacatgctctgtttctctattggattccccatccatctgccttggcatcttcacaggttgatcccacagttttctcattttcaggaataaaagcccactccagtctaaatcaaaacttccctctcacatccatgccgggcacagtggctcacacctgtaatcccagcagtttgggaggccaaggcagaaggattgcttgggcccagaagttcaagaccaacctgggcaacatggcaagacctcctctctacaaaaaaatgtttaaaaataaaaaaattagccaggcatggtgcacacacctgtgattgtggtcccagctactcaggaggctgaggcaagaggattgtttgagctcaggaggtcgaggctgcagtgagccatgattgtggcacatgaaccccaacctgggtgacagagcaagactctgtatctaaaaaaaaaaaaaaaagatagcaaacttccttttcacatccaatttaaggcttgtcctcctcctcctcttagatctgactgagatctgggtccatattaaagactcctttagtacaacaaacaccatatatcctcacgtaagtccatgaatatctgacatttctcatatctactttctctcgatttattgatagataggtatacattgttttaattttatgggtacatagtaggtgtatatatgtatggggtacatgaaatgttttgatacaggcatgcaatatgaaataagcattcatggagaatggagtatccatcccctcaagcaaggataaacctttgagttacaaacaatccaattacactctttaaaggtgtacattttttttttttttgagacggagtctcactctgtcgcccaggctggagtggagtggcacgatcttggctcactgcagcctccacctcccaagttcaagccattctcctgcctcagcctcccgagtagctgggatcacaggcacatgccaccatgcctggctaatttttgtatttttagtagagacggagtttcaccaggttggccaggctggtcttgaacacctgatctcaggtgatccgcccatctcggcctctcaaagtgctgggattacaggtgcgagccatcgcgcctggcctagaggtgtacattttttaacagaaccattcaaaaggaggttgtggggatcatgacacttccatgctacagcattaatctcctaagaataaggatacactcccacataccatgacactctgttcacacctaaaaaaatttacatttattccagaatatcatctaatctccagtccgtgcttacatgtccccaattgtccccaaaacatcttttatagatttttttaaaattttgtttaaatgccatatccaatcgatatggcaatcaaatgcaaatccatattgcatttggttatgtctcttagtctttttgcataaggggggcctctctttaggatgcaaaatctttatcatctcttcttttccacttggggacttgggctgaaaatcaggagtggctggaacacgcccatttactgtttggttttgcaggttgttggagggtactacagaagaacatccctctggagaggggccgtgagcctggttggcctagactgagtgccctggcagagctcttcctcatgtgtgcagtgggaaagaagcccagatcagtccaaaggcctaacccccactcccagaccctaccctactcttcagagaaataggctccctaccctgaaccctaaagacagctgtaccttcatccccagggacccagcaccccttctggcctatccccaaagagtcaccctgggtcttaggtagtaggtggagctgagggataatggcccaaggccaagagttgatccttccaactttgttcagtgatccagctttcatatcaggtgatcaggacaaccaggccaatctgatagggggcggtgtttataaaaaggccactcacctagagccagaagctccacaccagccattacaaccctgccaatctcaagcacctgcctctacaggtacctttcttgggaccaatttacaatctctgggatccccaactatagaacctggaagctagtggggacagaaagacggggagcctgggctaggtgtaggggtcctgagttccgggctttgctacccagctcttgacttctgttt

SEQ ID NO: 14345 - DNA, 2300 bp, Homo sapien
ggagccaggattcaaatgctggtctatttgactccaaagttcacagctgggccacagcacacccaggggaaaaagtcaagtgcatttggggataaagaaaggttggtgacaaaactggaacagggattagagtattttccccaaatccccagtcttttctttcccattctgctagctgattcagccaggggaggggagatgtcaatttctccctcccagaaggctttgcagagctgctgaagtgctttcttgtaggctgagaggcggccccccatccggccccatattatcattccatcttgacctcagaggaaagaaagggaaaccagctctgctgagcaccctttccactccctcacccccaggccgttatcttgctgaatctgcactatctatcatgagagaagtatattttgagcctgatcttacaaaagaggaaacagctcagagaccttaggtaactagccctaagtcacacagctagtaagtggacgggttgaaatttaacttggagacttgaaccccaaattcatcttttttctgttacaccacacctatctctgaaacttactggctgtctcctcaaaggacatccctctccaaagggctggctccagctgggaaaccggcctaagggtgccctgggtcagagggccgacctgtggttttgggggcaactcctcctggcatccgaggctctttaaaacaatctgcagccacactgtctcccagctccgtctcccacagggctgtttgccctcttctcgctccctcgggcctcttcatgcttattttgtgttccaagactttgtcagcatgccccacttcctcccccccaaccccaagagtgcctcttccctctgtccacccaagcctgacccttgcttcagggtctagtccctagaaagtcccccacctttacctcctccctacgctggagtctctggtctcgccctcatcactgtatccccattctgttccccggtctcaccctcatcactgcatccccattctgttcccccgccaccctgcactctcccacccctgtcatgcctgagcacgctgtcctctcctgtggctcagagcaggtcatctccctgcttttcgttaacagtgatgtaacagcccttgcttaacggagggctcctcacgtgccagctactgcatactaagcactttaaacgtattaactcatttcctcccctccccacaaaaacttaagaagtcggtgccattatatatcacctattttaccaaatggggaaactaaagcacagagaggttaagtaacttgcccaaggtcacagagctgctgacaacttctttattgcctccaggctgaacataaactccaagaaagtcccatgaggctctttggatctcttttgcccctgttgtttgcaggaacccatctcccaccactctcccccacccacactgcaagcggcagccgcctgagctatatttagatcccagaagccaccaagctccctccgcactccccgcccttgtgcatgctgttccctctgcctggtcccggctctgtgaggtgtgaggtctccccgttagccctagttttctttctgcctcctgggaaccgtgtccaccacctctccactttgatcaattatttccttgccgttgtctgtcggcctgtcagcctacccccacccgaccgagaacgccttgacggtagtgaaatggtcttgccaatagactccagagcaggctccgccacgatgtcagcgccaggaaatgttggtgaatgaatgaatgaaggctttctgctgcgaatcaggcccactctccacaaacagacctgaggagaggggcccaggcccggcccccagcgcttctgcagcgggaaagctgcgtccagagaaggctgggaggttgctcccaggccggctgaggagagaccctcggagccttcaacgcagccaggcggcaagtgggggcagggcgtgggcgcggacacaccccccgcagtgcccccggcgcccggcagggggcgccgccccgccggcccacgccccgccgcgcgccgggcaggccccctcgcgcaggcgcgctgccgcgggcggaggatccgggccgcgcttcctctcgccaggcctgcgagcttcctcccagcggagccctgggcgagccgaggttggccgccgccgccgccgagcccgctgccgccctcccgctcctgccccacccgcgccttgcccgggggcttctgccggggtggggtccgagccgggcgaccgcccggctgcgccgccgtcggggccgtaacccggcccgccgtc

SEQ ID NO: 14346 - DNA, 2300 bp, Homo sapien
ccccagcccaagaacagccatgccagcctcatcttcgcaccctgttccagtagccaaggaagggaaagaagctgggagattaagggtagggggattctggagcctcccagagcttcccaggagggagttggacacatcgggaaactcatgttagcctccccctcctcagcaggtgttccccaggtctaacctgagtgtgtatcactgtgacacacctgcttcctcttgttctacttttgtggagaccagggtaactgggagtgccctcctacagccaccccgtgggcagtagcaggacaccagtctcctcctggcaaccctgggcctaagagactgtagccccagatgaccctagggtggcccaggactaacctaaggaaggggtcctcccccaggtggcccattcagtgcagaggtcccttgggcacacgacttcagactccagctgccaaactttggcctgtggagtatctcctcctccctggtcttagtgtaagggaagtgggcatgacaactgccctcctgtcccacagcttgggatgggatgaggtcacagggtggggtccgccccaagatgctggcctggcctggctcagatgagagccctttgggtgtttctcagtttcccccgcccttggttggggacaggatgggtggaggagcaggccacccccaacgcccggcagggagcactgcctcccttccccctctcctctgggtcccttcatccaagggctggaaatagaatccgctaagtaatgattaaagtcaaattcagacctaaaaataaagagctggtgaaggaagagctggtgctccctgcatggctgaggggagaagtgagcagggagaggctggctttgggtggctgagcccctgctcctcgggatcagaagtactccaccagttgggggggtgctcttttatctgccatgatgtggcccattaagtgtagacggcaccactcagggcagactggcaggacccattagaaaaaaaatcccatttttcccatggggaaactgaggcccagaaaggagaagtggtttgtcaagcgactatttgagagctcccctcagcaggcccccagggactggagggccctgtgcagcccagcctgccctttctgcctgctcagtttctcttcctggttttgaggtgctaagatgaagtcagcttctcatcacacactagctgtgcacacaccctccaaccgcagcttccctccacccctccttctgtggtctgggcccagagtcgaaggaacaagtagaagagaggctgcttggtgcccccctggctgtcctgatcatggcatggttgtaagcctcgtgggcaggcgaaaacctgggcatcatctgccccccttggaccctggctgctgcttctcagcccagcctgacacctggtcctcatgcagactcgcgcatctatctatctgcagcttgtgctgtccgtgctgcagggagacaggagggaaggatgaagagcaaaccctgagagcgcctctgctggcgggtagaggagacgaggagtcagtgaggggaggcctgtggttctcacttcctggcagagctggtaggagctctgaagctggggctctgcgtgggctggggcagcctggagggcctcctggaggggaaggtcctgtgaaagttgagaagtgtttgaagaagaagcgtggtaggaggagaggtccttgtttgaagcttctgccctctctagggctgctggctcttttctgtgtgtccctcgacaggctcttggcctctctgagaggctggggtatgcagacaagcaagaagtgggcacagaagtacctctgcttcccagagcagaacagccaagctctgggcagacctcccctcggtgccccccacctgtccattttcagggtgtcgtctgtcctgcacaaggaaaggtgggaagaaaggtcccctaaccaaggttcagacaactctgagctcaagtacccacacagctagttcctcctctgtcagagatcaccagtccttgccctatggggtgtttgaaggattaagtaactaatgcagtgccccaaacccggttgggtcagtcagctgtaattcccgtgttctcattctgcagcccatcctgctggaggagtgtactggtaacacccccatctcccttaagtagtagcaagtctgtcctttgtgttgatccccacagctttaccttctgagctgtgtgttctgcagatcctggttctgaagtggggagaccagaaatctgggggccgaagttttagacagcttatgggcctccagccgtcagtc

SEQ ID NO: 14347 - DNA, 2300 bp, Homo sapien
gctactctggaggctgaggcaggagaatggcatgaacccggtgggggcagagcttgcagtgagcggagactgtgccactgcactccagcctgggcaacagagggagactccatctcaaaaaaaaaaaaaaaaaatacaaaaattagccgggcatggtggtgggttggtgggtgcctgtaatcccagctactcaggaggctgaggcaggagaatcgcttgaacctgagaggaggaggttgcagtcaaccgagatcccgccactgcactccagcctgggtgacagagtgagacttcgtctcaaaaaaaaaaaaaaaaaaaaattagctagcaaggcacggtagtgtgtgcctgtagtcccagctcctctacaatcctgccattgcacttcagtctgggtgacagtgagaccctgtttcaaaaaataataaaagtagaagatataaggaacccctgcatcccgccatccagcttcagcacttaccaactcaaggtcaattctgtctcatctctaccccacctgctcaccaacaagccctggaatattttgaagcaaatccccgatgttacagcaattcatctgtaaagcttttgtatgtttctccaaaagacactttaaaaacataaccacaagccaggcgtggtggctcatgcctttatttccagctattcaggaggcaggaggatcctttgagcccagaagtttgagtccatccttggtaacataggaagacaccacctctcaaaaaaaaaaaaaaaggccaggcgcagtggctcacgcctgtaatcccaacactttgggaggccaagtcaggcggatcacgaggtcagaagatcgagaccaccctggttaacacggtgaaatcccatctctactaaaaaatacaaaaaattagccaggcatggtggcgggcacctgtagtcccagctacttgggaggctgaggcagaagaatggtgtgaacccgggaggcagagcttgcagtgagccaagatcgcgccactgcactccagcccgggcgatagagcgagactccgtctcaaaaaataaataaataaaataaaataaaaaataaaaaacataaccacaataccatattagttctcaattttttttttcgaaatggatttttgctcttatcacccaggctggagtgcaatggtgcaatctccgctcactacaatctctgcctcccaggttcaagtgattctcctgcctcagcctcccaagtagctgggattacaggcatgcaccaccaggcctggctaattttttgtatttttttttagtagagacagagtttcacaatgttggccaggctggtctcgaactcctgacctcaggtgatccacctgccttgggctcccaaagtgctaagattacagacatgagccacagtgccctaaaatttttaacaattcctcaatatagtcaaatatccattgttcaaaaatatccattgttcaaatttccccaatatctttttttttttttgcagttgggttaaaatttggctccaaacaaggtctgcacgttgcgtttttgtgctgtctctaaagactcccttcttttttccatgtaatgcttttgttgaggaaaccaggctgcttggaaggatgagcctgggggaattcgggagagggagagagggggcagggaggagagaaggatgggtgtccagatagatgtgccatccatgctgggggacacaggcagaatgtggaggcctgtctccctaactgggaggggaggccagggctgctgaagggtgggggccaaccctgggcacccccccttcccctctgccgcatccaactgctggaagtgatgggagacagaaagatggcctgagtcaggagcaggggcagagctcaggttgtcgtggggtcccgctgcccacgtcagactggaggtgagggatgggcggggcctgacagcaggcctggaaggaacaggatgtctatgctggagatagagggagaggacagtgccaaaacccagctcctggccagtccccagctcctccctgcctggccctatcccaggatcccctccccggcctcccagctatgatctaccccggggcccagacttcaggcgccttcacgatgccggcggtcagtggtccaggtcccttattctgccttctcctcctgctcctggacccccacagccctgagacggggtgtcctcctctacgcaggtttgagtacaagctcagcttcaaaggcccaaggctggcattgcctggggctggaatacccttctggagccatcatggaggtgaggggcaggggtgggga

SEQ ID NO: 14348 - DNA, 2300 bp, Homo sapien
tcaaaaaaaaaaaaaaaaaagatgtgagttctgagaaatggcacgattcctaactaaagccaggacaaaatatcccttttttttttgtgagatggagtttcactcttgttgcccaggctggagtgcagtggtgtgatcttggctcactgcaaccttcacctcccagattcaagtgattctcctgcctcagcctcctgagtagctgggattacaggtgtgtgccaccacacgcagctaatttttgtttttgtttttgtttttttttttttgagacggagtctcgttctgttgcccaggctggagtgcagtggcgtgatctcggctcactgcaagctccacctcctgggttcatgccattctcctgcctcagtctcccgagtagctgggactacaggtgcctgccaccacccccagctaattttttgtacttttagtagagatggggtttcaccttgttagccaggatggtttcgatctcctgacctcgtgatccgcccgccttggcctcccaaagtgctgggattacaggcgagccaccgcgcccagcctaatttttgtattttttaagtagagacgggttgtcaccatgttggccaggctggtcttgaactactgacctcagatgatccgcctgcctcggcttcccaaagtgctgggattataggcatgagccaccgcgcccagcccaaaatattcctttaagatgataggccctgtcagtagggtttcttccagtcctccttcatagagacacaggaggtaacaaaaaggtgggctgtttctcacagcaccaagctgggccctgcttcaggaccaggatggcaaaacttatacaacactcactgctatgggccttgccaaatctgggtgtcacagatcatgtgagggagcagaggcaccttctccaagatcacccagtgatgtgtgcattgtctgttcattcattcgttcaccctgatgttcctctgtgcccagcccagagataccaggcagagtgaggctgaaggagcccatggtctggggcaaggtctcacccacaggccttgtaaggctgaaagccttctgcaaggatttcagaggcagtgacagcttccagaggccctgggacttgtggccttgcagctctgagcctccctacccccatccctggcctttatagagcaaacaggctggattagctgcctccagaacgtcctggcagagtctgggccctgggccaggttccaggctggcaggttggagggtggggagcgagctcgagtagggcctctgagttccctgcccccagttcctgccaagactgcctcagtttctctcccattcctttttcctaccatgcagggctccttcctccccgccccaccaccgccagtggcaattctcacacacatactccatcctgcattctttcatcgcagtcctgtgggccggttctcaccttcacatctttgctttcctgctttcctcaccttggaatgccccctaggtcctgtccaccaggaagctctggcctcatttggccacagcctagagtcttgggccttcttgcagttactccctcctaaagtgctctcctgtgttctgtggtctcaggcacttccttttttgtcacaaggcctcagtttcgtcatctgagaaatgggaagggttagacacaaatctctctcgtggtggaaaaagcttgtgctttggagtcatatggagctgaattccatccaatccacttagttccttaacttttatgagcctcaccttcctcatctgttagatggggtcttataaaaacagacagcacacactgcggtgaggcttcactgacgacgtggatggtgctggcattcattgccctccccagcaaaggcccctccagctgtgctgggctctgactcctgcttccctggctggccgcttatttaatggtaggccttggcattgtcgccttctcttccgggagcccagcccgggccaagtgagagagtgaagggggagatggggtgtagtggagcctggggcttgagctgcccttgtccacagacgccatcctgggcctggaggaagtgcggctgacgccatccatgaggaaccggagtggcgccgtgtggagcagggcctctgtccccttctctgcctgggaagtagaggtgcagatgagggtgacgggactggggcgccggggagcccagggcatggtgagtgtcctctcccagagctgacagagcggggtgggtcagggaggcgggtgatgagccccggggtcccagtatcccacacggttccctgagctgaggggctggggacct

SEQ ID NO: 14349 - DNA, 2300 bp, Homo sapien
agatgagatggcttgcccaaggtcacatagctcggggcacaaacccaggtggctgctgtggtgctggcttctcccctgccctgtgctgcctccctcttggcggaaggcggcactgtcagacgctctgctgtgagtagcctgaggtgtccagagacactcagcgtttaacactcttctcctgactccccagagcctgccgagccgacctgtcagggaggcagcctggtcacattgtccttggctgccgggacatgtccaggtcatccgtcctgagtcagctgcattctgagccctggcagctgggagaggaaaaggaagccagaggcacagaggacttggagtttaaaagaaggaggagggagaggccaggcacagtggctcacgcctgtaatcccagcattttgggaggctgaggcgggctaatcacctgaggtcaggagtttgagaccagcctggccaacatggtgaaaccctgtctctactaaaaattaaaaaaattagccgggtgtggtggcgagcacctgtaatcccagctactcgggaggctgaggcaggagaaccgcttgaacccaggaggcaaaggttgcagtgagccgagatcgcgccactgcactccagccagggcaacagagcaagactccgtctcagaaaaaaaaaaaaaaagagagagagaagaaggagggacgtaagggtgataggacgagggtgataggtgggtcgggggaatggagggcagaaactgtattgttggtccaggcctttgtccccttaaggaagggccacagggaggcccctggccccttctgtaaatccaagtcccaacactccgtcaggcagggcttgcttcccctgctcctctctcttctgccaagggagcagggtacaacaagggagactcaagctagacaaggtacatgtcccatgccagctcgcccagcggaaagggaggtggcacagcaaatctgggcagagtggcttctgggactgccctcactgtccaggccttgagtcctgtatatcctggctggattccaactgcccacaagagtcaggcatggtggctcacacctgtaatcccagcactttggcagccaagacaggtggatcacttgaggtcaggagtttgagaccagcctgaccaacaatgtgaaaccccatctctgctaaaaatacaaaaattagccgggcatggtggtgcatgcctgtagtctcagctacttgggaggctgaggtgggaggatcacttgagcccagcaggcagaagttgcaatgagccacaactgcaccactgcactccagcctgggcagcgactctttctcaaaaacaaacaaatgaacaaactgcccacagggatggagctagccaagggctgggctcctgtcattgggacttccggaaccggccacaccccttcagagcacggatcacctactgggggcagaggctgcgcgtgagtcacccttcctgcttctgacagggctctgagttacagagctgctatgtgtgcgtgcccacggccccaacacaccagtgcctgtgacaccacgtgaggtccctggcacacacgggccaacatccacaggggatcctccatccctacacagaatcctaacactcacccagagcacatacatgtaagggctcacatgagaccaggagtgcgggtcacctccatgccattctgataccaagccctagggccacctgccatcccacggccaggggagccagggagtcagaggtagggacacccccccactgctcactctctccatgtccctcagatgtccttgaacagtggcctcactcccagtgatccaggtgagttctgtgtggatgtggggcccctgcttttggtccctggaggtttctttggggtctcagcagccaccggcaccctggcaggtgaggatcccactggacaggtaagagcagaagggcagtgatgaataaatcaccctcagcacaccttctaaagagcactggggtggcgtcagccacttcaccacatgacctgggcttctgtgacccttgggagaagtcatgtctgccttgagacttgcaagtctcaaatgggataaaacaagagaagctttgatttcagtgctggccacataagtgcccctagctgtgagttgcgggacaagtggaagacagacagcaaagaggggcatttaggaaaatggagcaaagaaatgtgacaccatggagagtccacggagggtcccacagcgggaaagctgagggcaaccagagcgtgggagtccttgaatgccaggaccttggtctggtttctgag

SEQ ID NO: 14350 - DNA, 2300 bp, Homo sapien
tcctaacactcacccagagcacatacatgtaagggctcacatgagaccaggagtgcgggtcacctccatgccattctgataccaagccctagggccacctgccatcccacggccaggggagccagggagtcagaggtagggacacccccccactgctcactctctccatgtccctcagatgtccttgaacagtggcctcactcccagtgatccaggtgagttctgtgtggatgtggggcccctgcttttggtccctggaggtttctttggggtctcagcagccaccggcaccctggcaggtgaggatcccactggacaggtaagagcagaagggcagtgatgaataaatcaccctcagcacaccttctaaagagcactggggtggcgtcagccacttcaccacatgacctgggcttctgtgacccttgggagaagtcatgtctgccttgagacttgcaagtctcaaatgggataaaacaagagaagctttgatttcagtgctggccacataagtgcccctagctgtgagttgcgggacaagtggaagacagacagcaaagaggggcatttaggaaaatggagcaaagaaatgtgacaccatggagagtccacggagggtcccacagcgggaaagctgagggcaaccagagcgtgggagtccttgaatgccaggaccttggtctggtttctgaggaggagagtgacatggtcagagctatgctggaaaggtggccactgtgcagttgctactaccagtagcagctgtgctctgggggcctaagagtgtcagatggtctgctgccatggctctagcccaggatgttttgggatcgtccagttctgccacaggggcctgcctctgactgagtgtgaggttcaaccctcaccacccacccgtctacctgtcaaccctcacacctttcctaggaagtaagcaagacaagcatcagacggtggcccaaagtcacccctcttgcctcggtgggatatcatggcggttagggtgaaggctgagcgagggggttgctgggtggaggggtcttacttctccttcatctgtccccttccagatgatcatgatgtcctgtccttcctgaccttcagcctgagtgagcccagcccagaggtgatgccagccctggcctacctgggaatggcagcccagggaccctgccctcacccatgtcatggtgccctcagacctgccattccagcccttacctccacctggcctctgagctctgctcaggccagaccttgtgcagggcagtgctgcgggccagggccggtgtgtgaggtctcgcaggctggctggctcaggctgtgacattacagttcagagcgatcagtgccaggtctcaaaaggtgcagggggctgtgggagcacagaggaggagtcccaaccagccagggggtcaaggaaggctgcctggaggagatgagcttaaaggagcctcggaccagcacatataggcttgaggccacagcagggagggaagatggtggggatctgcgtgaaggcagaactcagagggctggaaactgcagggccagctggccagggaggaaggctgggctcgtggggaagcctgtgggaaggctccccttgcttctggatctcccatgggtttggggcccgactttctgtcttcctcccctaggttccccctcagcccttcctggagatgcagcagctccgcctggcgaggcagctggaagggctgtgggcaaggctgggcttgggcaccagggaggatgtaactccaaaatcagactctgaagctcaaggagaaggtagggaccgagagagcgggcaggtggcgcccatctgagtgtcacagcatcctccacccttatgaccaggggtcctttaatcagtagggaaactgaggcctgaggaggccacatctaagcaggccctgggcccaagtgttctgtgctatccccaccttaccactcagactcatcttccaggagagggtcttggaggcagcagccacaccttctggcacccctctccaagaagccaccccaaagataagataggctgtgttaccccaccatggctggctgcccatcccagctctgccctaatccccaggggaaaggctctttgacctggaggagacgctgggcagacaccgccggatcctgcaggctctgcggggtctctccaagcagctggcccaggctgagagacaatggaagaagcagctggggcccccaggccaagccaggcctgacggaggctgggtgagaagccctacaggcatccaaggctccacctgcgggcctgaaag

SEQ ID NO: 14351 - DNA, 2300 bp, Homo sapien
gcactggcatctcttggttctcagctataaccattggatttaggagaggggacacttcagctcagaggggacctgccgagtccccaaatcacaaagagcacagtgcgggatagggcccattctctcaccaagcactactgaccacctgctcggcccccagccccatctgggtcctgctctcacggagctcactcacacaggtctaactgaccctgtgtcgtcaatgccatgatgtcaggaagctgaggggctacgagagtgcaggagaacacacttgaccccccttggttagggaatcaacctggaagggacatttgatatggtcattaaggtgactaggagttttccaccctgacaagataggtaaaggcatagaggcagagggaacagcatgagaaaaggcagggaggcatgagaaaaacataatattttagagaaaaagtggcaagttcagtaatgttggagcaaagggcaggacgagtttgtgaaattgggcaaagagatctgaaaaagtgagaggaggtcactagttttgcttggtgtgtgtttgctgaatgaacgtgcaccgtttagagatgtggggtgtgctaaaggcctcagcaatgagactgacaatctttgttggtggaatttcaagacaagaagagtccgtgtgggctgggatggtcctggaggaggagtaaaatgagctaagctttaaaaagcacaaggtagaaatgctcacaggcttcagcacatgcacaggagtgcagtggtggcaatcagcctggagccactaggacagaccttacatgcccagggggaaagcgtggaccatatgcagcgggccaaaggagccacagaaagtccaagaacagcggaggttgtggtgcagtgagtgtagcaaggcaagcatgagagtcctggtttttcaaaagcccataaaggagagacgcaagtaacctgtaaccttctctctggcagcaggcaggagctgaacaagagccttcaggagtgtctgtccacaggcagccttcctctgggtcctgcaccacacacccccagggccctggggattctgaggaggcagcctctccctgccagcatgcctgcctgacccacctcagagcctgctttgcatcactgggaagcaggcagtgtcttgggtgggggcttggtcagtatcctctccgtctgggtgcccagctcccacgcacacctgagctttcggcatgctcccacctcgttaaaggtgatttccctctccccatgctgtgatatgctggtcttctttccagcctcaccctaatctctgtgaaggcttccaccccttctgagtacctggctgggagtgcgctccaagcaggcaaggaggccaaggcctggcttaacctccaaaagaccggataccccacgggctttgaaccctcgactatggagggaaagagagccatgactgtatataattctgtcctcaaactcacccataacagagagcagtgtctcccagtgtccctcctggcccagctcagccagcatcactgagcagctctctccctccccactcctagctgctccaggggcagcaggggaggcgcgtgacagagcaaccctgagaggccaactcgtggaaccataactgggattcccgctcgcgccctcaggtctccctcccttttccagcgtcaagctctctgggcagctgctgggttcagtgacttgggtgggtggggagaatggggggcacccaaggctgggtttttaccccttgctgctacctggatctcccagctgaaatcctagttattagtggcccaggagaggagaaagttggaagaggctatggaacagggttccgggagtgtatgagctcaacccctctcccgggagagcgaccccaccaccgcaggccctaatcctctgtcagcagtgcccagcggagctcggcgttgaaggaggcacgtgggggaggcgggagtggggagcgggcacgtggtccagccttctcagccccgtgctgccccccgcccccagtgaggaggggtttggggaggtgggggcgggcccgggcgggggcgggcggcgggcggtgccaagcgtggggcgcgggcccgcggcgggagctgtccgcgaaacctagtgctgaagtaggcgcggacgtgcccggtgcctggcgcgtggtagcaggcgcccggtgccccggccggcgaagaccatggcgttcatggtgaagaccatggtgggcggccagctgaagaacctcactgggagcctgggaggcggcgaggataagggagatggggacaagtcggcagccgaag

SEQ ID NO: 14352 - DNA, 2300 bp, Homo sapien
caaatgggaggaggcaggcaaccgtttcctgcccttgccacgagatgtttttcaccactgcagttgggcatcctaggcccccaaaggtccagtacctttctccagggatctgggtggggggtcaggcagtgccaggcttctggtgacccctttgggagtataacctggatggctggcttcctggtgggcccaaaggacaggcttctctcaccccacccctcttcgccaggtgcactccctctaccgacggacaggggccagcttccagcaggcccaggaggagttttcccagggcatcttcagcagcagaaccttccacagagctgcttcatctgctgcccaaggagccttccaggggaattagtcctcctctcttctctccccctcagcctttctctcgcctgccttctgagctgcactttccgtgggtgccttatgtggtggtggttgtgcccagcacagacctggcagggttcttgccgtggctcttcctcctccctcagcgaccagctctccctggaacgggagggacagggaattttttccccctctatgtacaaaaaaaaacaaagctctctttccttctctggtgatggtttggtaggattcttttgtctctggaagcagtgggactgaagttctcttcgtcctgtgcacacacagacacccccacacagttgggatcacaggctgacctgggcccatcccagctggagctttctgccagggtcctgggccttgactcccccaccctgcaggcctggcctgaatctggcttcttagacacagcccagtccttcctgcctgggctgggaataagcctctcacaggttctggtggacagatctgttccccaggtcactccagtggtctccaggcttccagagaaggctggttgcctcaagctcttctctgcctcataaacggatccagagaaggctggttgccttaagctcttccctgcctcgtgttcctgagaaacggattaatagccctttatccccctgcaccctcctgcaggggatggcactttgagccctctggagccctccccttgctgagccttactctcttcagactttctgaatgtacaatgccgttggttgggatttggggactggaagggaccaaggacactgaccccaagctgtcctgcctagcgtccagcgtcttctaggagggtggggtctgcctgtcctggtgtggttggtttggccctgtttgctgtgactacccccccccctccccgaaccgagggacggctgcctttgtctctgcctcagatgccacctgccccgcccatgctccccatcagcagcatccagactttcaggaagggcagggccagccagtccagaaccgcatccctcagcagggactgataagccatctctcggagggccccctaatacccagtggagtctggttcacaccctggggggtgtgtcactgtgatgggacacgtaggagtccacccttaaaaccagcaccctgtccctcgaggctgccgagtgggtgtgtggactggggtgccttcccacaaaactagcctccggctctgggcccgagacagccgcaggccccagccactgaatgatactggcagcggctggggttttatgaactcctttctggtattttttcccctctatgtacaaatgtatatgttacgtctcaatttttgtgcttaagtaaaaataaaaacattttcagacaacacgggtccacatgtctggtggacttgggaggacggggcagcccacaggattaggggctgggcgccgctgctaagattggagagcggggacagttaagatgcaataaataggtcaaggcccttcctcagaaaagtgaaaagcagctgggaggcctgggaagccaacgcggcctcttccaaaggcgccttctcgtgccagtagctctcctttcagagctgcgggtcctggggaggggccctgggagcctcccggacgccgtcgcccccacacacgcccgctccgccgcccgcgccctcacgtgggcgatctctagacgcctctgcgcccgctaggagtccccggagaccacgccggccgtcctccgttgttaacttctaggctcgcggggcctccgtatccccacgtgggccctgcaggaactggcggggcgcgtgacccggcgaggcccagagacaggggaggggcgccgggagccgggcggatccgcgtccccgatgcgcgctgcatttccggcgggcggcgctgggggcagcgtggagccacccagtgctcggcccgccccgcaacccgccggaaccgccg

SEQ ID NO: 14353 - DNA, 2300 bp, Homo sapien
aggcatctgaacttgcatttaaagggtaaggagaggttaaccagaggatgatagtggggcatgggttaagtgcataccaggtagaaggaacacatgtgtaaaggccctgagacaggagggcacaaggaaggtttgagcaactgaaaagaacttgcatggctggaacagtgggtgggggttgggggctagaaggggtcagaaggggagaaacgtaggggcagatcctttaggaccttgaagacaaactaagaatttgggcctttatgattttttttttttttttttgagacagagtttcactctttttgcccaggctggagtgcaatgttgcaatcttagctcactgcaacctccgcctcccaggttcaaacgattctcctgcctcagcctcccaagtagctgggattacaggtgtgcaccaccacacccagctaattttgtatttttagtagagatgaggtttcaccatattggccaggctggtctcgaactcttgacctcaggtgatctgcctgccttggcttcccaaagtgctgcgactacaggcatgagccaccttgcctggcctgatttttttttttttttttttaactgagacagggtctcactctgtcactcagctggagtgtagtggtgcaaagatggctcactgcagctttgacctcctgagctcaaacagtcctcctgcctcagcctcccaagtagctgggagtacaggcacaggccaccatgcctagctaattacgtgtgtgtgtgagatatgtatatgtatatatatatatatatatatatatatatatatttttttttttttttttttttttttgtagagccagggtcctggtatgttgcctaggctggtctcgaactcctggcttcaagtgatcctcctacctctgcctcccaaagtactgggattacaggcataagccacgcacccagccctttatggaaattaattgaaaaattttaacaaagttctgtgataattttgccccctttaaacatatctttgattacaacatgaagaacaatagaccaattaacagcactgtattagttcagggtaaaaatgacagtggctgggattcggtgacagcagagatgaataataccagacagatccaaataaataaggtggatttggccagacagtggttcatgagtataatcctagcattttaggaagccaaggcgggaggatcacttcagcccaggtgtttgagacgagcctgggcaatatagtgagatccccatctctacaaaaaatccataaattagctgggtatggtggtgaccagctgtagtcccagctactcaggaggctgaggtgggaggattgcttgagcccaggagctcgaggctgcagtgagccatgattgcaccactgcactccagcctgggcgacagtgagaccctgtggggggcgggggcgggggaaagcggagctgtggagagtgaagcagccacctcccccatgattgaggctgtgttgctgaattccgtgagtcacttcataaatgtttgatgtccaggttcaagtcccaactcaggtcccaaagctgatgggcccaggaaccctcgtccctaaaacgatgaaacgacatcagagggcgagcagccctagaagaagcaggctcagctcgggtggaggactgctggatggtcctggcacttctctttccccgagcacgttctgcagaagaagcgctttcctagttctcccaaggcctctggcctcacctgtcacccctgtcctttgcccagggatcagtttggacttcttcccaaacttggtctacagagaagtgaaggggctgtttcctgtcccacttttgagagtttgctttagaaacataaaattggaaggtgtcagattgataggcagttgggaaggactccggccacgcctctggctccgtagacgctccgcgcagccaagacccctgaatccccagcagagcgaagatgtggacggaagccgaatgcccacccaccgcactattgtgggctgggcggggggggggggggggggggcggagcgaccccggtgccgtcatagggccacgccctcgggggagggcatcgcgcctgcgccagaaccgctgcctcgctcccggaagtggagggtctacacgaagcgccgctgggtctgggtgcccggaggcagcagcgttcgcggagttcgcccgctggcccccgatcaccatgtcggctttcgacaccaaccccttcgcggacccagtggatgtaaaccccttccaggtagagcccctctcccgccatccagctctcagatt

SEQ ID NO: 14354 - DNA, 2300 bp, Homo sapien
cctgcggccttccgcagtgtttgtgtccctgggtacttgagattagggagtggtgatgactcttaacgagcatgctgccttcaagcgtctgtttaacaaagcacatcttgcaccgcccttaatccattaaccctgagtggacacagcacatgtttcagagagcacagggttgggggtaaggtcaccgatcaacaggatcccaaggcagaagaatttttcttagtacagaacaaaatgaaaagtctcccatgtctacctctttctacacagacacggcaaccatccgatttctcaatctttcccccacctttcccccctttctattccacagaactgccattgtcatcatggcccgttctcaatgagctgttgggtacacctcccagacggggtggtggccgggcagaggggctcctcacttcccagtaggggcggccgggcagaggcgcccctcacctcccggacggggtggctggccgggcggggggctgacccccctacctccctcccggacggggcagctggctgggcagaggggctcctcacttcccagtaggggcggccgggcagaggcgcccctcacctcccggacggggcggctggccgggctgggggctgacccccccacctccctcccggacggggcggctggccaggcggggggctgtcatgagtcttgtattatccattttattattccttagtgcatggtaaagcttcctttaaaatgcaagctgatttatttgagccagaggaccccaggggaggtgagatagatacccacacctgggcagaggattacagggaaaacggcacccgctctttcccctgggcacatatggtagaggctgtgggaatgagggtattgcaggggtgatgagggtagagtcaggactgtaactcctcattccaggttccccggagctttgactgttgtgctcctagcctcaagcaatccttctgcctctgcctcctaaggtgctaggattacaggcctgagccactgactgtcctcctcctaggaggctgttgactgagaaggtctggatgtcaaagcctttcaccacaggatatagccaagattactgcagagccaaggcccaaggccatccttccctatgcacagctcttcgtaattcccctgacttctgtgtgtgcaacttgtaagcagctcagcctggagtagaagttggggttctgactttctacagcacctgggacgggaaggatcagaggagcacagggagctgactgccttataggtgtctcacgtcatcccatctgaccctccaacaagcatgtcaggctggcattattcaccccattctacaaagctcagagcagtgaagggccttgcatgtgacatttaccatcatcatcactagtatgtccctactcacatcacagcaattctttgctcaaatctgtaattgctgagactcgaagtaaaacccaaagtcttcacaatagcaatagcctgcaaagctctgcccccctcctctcttctctgacctcctcactgcccctgtcttactcactctgctccagccacagtggcctccttgctagcagttccctccccaacacgcccggcacagtcccacattcccgccttgctctggcttccgctgtggctgtttcctccccgcagaacactcctgccttcctcaccgccaagtctggactcaaacctcacctcctcaagaggcttgcccagacagccttttatattctgcaaactgcctcccactgccacctgcccccttactttttgtggccttgacctttcaacatactacatgatttgcttacaatacttgtctgtcttgccttcaccagaatgtaagcgctctacaaaggcagagggaaggctatcttgctctctgatgtatcctccagcccttagaacagtccgtggtacttagcaggttttcagtacatctgtgcccggcgatggaaagaatgaatgaatagtgagaccgaagatcgcggccgtaagcctctgggcacgggtgccccggggcctggcggaacgctcagggaactacatttcccgtgaagctctgggcgcagagggccgcgggggctgccgggaaaggcatacgtgcttaatcctggtgcagggggcgagcatggccgctccgcgaggtgagccattggctggggtgtcggcgagtgtgttcgtggagcgcgtcctggggacgactcccggcattatcggccaggttgagtccgctcctggcattccgcggaaagatgggtgggtgccgggcagaggtgtggccacctgcgatggggat

SEQ ID NO: 14355 - DNA, 2300 bp, Homo sapien
atggaagattgggaggagtgtgcatgaaggctgtcacacttttgctacaagttcctagtgatcttgtgacattaagtgggtttaggtcggggttcccaagccccaggccatggatggatactggtccatgagtgagcaaagcttcatctgtatttacagtggctccccattgctcacattaccacctgagctccgtccgcctcctgtcagataagccgtggcattagagtcatatagcagcatgaaccctattgtgaaccacacatgcaagggatctaggttgtgggctccttatgagaatctaatgcctgatgatctgtcattgtctcccatcacacccagatgggaccgtctagttgcaggaaaacaagcttggggctcctactgattctaagttgagttgtataattatttcattatatattgtaatgtaataataaagtgcacaataaatgtgcttgaatcatcccaaaaccagcccccgcatttccaccccgtggaaaaactgtcttccacaaaaccaacccctagtgccaaaaaggctggagactgctggtttaaatcacattttctttggcccttggtgatgtccacatcagcataaccaggagaaaaccacttcgttgtttttttgttggttttttttttttttttttttggctggggggtggttggttggttgtttttgagacagcgtcttgctctgttgcctaggctggagtgcagtggcctgatctcggctcactgcaacctccgcctcctgggttcaagcgattctcctgcctcagcccctgaatagctaggattataggcacccgccaccacgcccggctaattttgtattttcagtagagatggggtttcaccatgttggccaagctggtcttgaactccctacctcgggtgatccgcctgcctcagcctcccaaagtgctgggattacagatgtgagccactgtgcccggccagaaaactacttctttggagtccacaggcaactgggtacaaattccaggtttatcacttaactggtaaacttgaccaagtctaagcttcatttgtttaacaagaataactattggcttcattgggaggttataaccattaaatactaagttgagctatatgaacctgctgtttctggaggcaaaaacagtctaacatcatggggagtggggggaatctaccaaaatggtaaggattcctttgtgcttttgatttttgaaaacttcagccctaaattcttccttttcacctctcttgcccaaggcatagtgccacccaacggtctgcgtggccctgggagctcggaggttgcacactgttgacctaccctattgaagccagtaagttagtcaagggacagcctcatgagatttgggagttctacaaggatctggagtttctttccagccagtcacaagcacatcccttgggggctagagaagtcaagagccctgacacatagcctaccacacacagactcagagtgcactttcaccctccttttcaacgcctatttgcctcactgtacaatgagtagtgacattggctctatttttaaatgtggaaactgaggcctagagagggtcaggtcctgtccaatgtcacaggcaccaattggtgttggaaagaaggtggggtttggcgtcagatggatcagcgcaagcactgcctctagatgtgtcaccttcacaaggttctttaacttctggggcctgtttcttttgctagaaaaggtcgctgataacgcttgtcctcatatgactcttcaacccaagtctgctctctggcagccccacatgtggggagacccccaaggagacactgcgagaagcacagagtgcggcgcgccaggactcaaaccgtgggcacccgaccgacgcacacgcgcagccccacgacagtatcagtatttaatttccactagagacagaactaagcctaaccatcaccaggctcaagccgcctaccccaaaaccgagaacggaactgcccggtccccccgaaaagaagggcggaacatttcggccaagtcctcagactaccgaaccggagagctccgaaaggggactacctgcgcctgcgcaccgccatcttgttaaaagagcccgcctctccctcggccggtcactctttcgccacgggcggggttgcaccatccggcagggcggggcccggccatggcgaccgcggagcccagcgggcgcgcgttgcggttgtctaccccgggaccccggcccagcggggctcgggaccgcgcgccgggagctgcggggccaccctccgggcagatcggt

SEQ ID NO: 14356 - DNA, 2300 bp, Homo sapien
caaagtgctgggattacaggcatgagccaccatacctggccatgtttccttttctccttttttttaaaaaattttatttttgagacggagtctagctctgtcacccaggctggagtgcagtggtgtgatctcgcctcaccgcaacctccacctcctgggttcaagtgatttctggctaatgttagtaattttaatagagatggggtttcaccatgttggccaggctggtctcaaactcctgacctcaagtgatctcctggccttggcggctcaaagtgctaggattacaggcgtgaaccaccgtgctcggccttaatttctttatggccagctgttacatagaaaggcaaagagaaaggttagagcaatatttttaggctttatggctggctttgggacaaaggggttctactttctagaccccctcttggggaggagggattctagtttctgtggcatgcctggagggagagtaaggggcaagagacaagagggcagaaggtcagagagaaactgcttcataggccttcactttgtggtattgttttctaagccccagcactaggttggtgggaaacggtgagggcaggtgctttgaaaacattttaaaaatccttttccccgccaggttcctacccactgaagccacactgctagggaggaaaaagagaagggcagatgctgaggccctggagagtcggcctgaagtgaggaagtggcacatgaatggccaccttttctttcctcagtgtgcccagggatagagaatgggagacagcaagacagaatacaatgtctcattaactctgggcagcatccagatacttcaggcctgggagaggtgtccttgactgcccaggggctcaaagttaggatgtagctagtgagataagatgcaacaactgtggaacttgatcaaccctatttcagagccatcgtggattcaggagccctcctgtaggagatgggaaacattcaggtgagagtcctcagaactggggatgtggcgaaaagatccttgactgccagcagcaacctaatttctgagcctctttcctaatctgtgaaatgaagtagtttaactcattttttatgcaagctggtttgtgatataagaatatgtactaataaaatcccttacgcataggccttttttttttttgagatggagttttgatcttgttgcccaggctggagtgcaatggtgcgatctcaactcactgcaacctctgcctcctgggttccagcaattctcctgcctcagcctcccaaatagctgggattacaggcatgcgccaccacacctggctaattttgcatttttagtagagacaggggtttctccatgttggtcaggctggtctcgaactcccgacctcaggtgatccgcccgccttgggctcccaaagtgctaggattacaggcgtgagcaaccgcgtccagcggcattctttcccccattcgctgttttattttatgccacaatgagaaggcggggctaagcaaagtaggtttttgttttgtttggtttttttgagacggagtttcgctcttgttgcccaggctggagtgcaatggcaccatctcggctcaccgcaacctcctcctcctgggttcaagcgattctcctgcctcagcctcccgagtagctgggattgcgggcatgcgttgcgccaccacgcctggctaattttgtatttttagtagagacgggggttcctccatgttgcccaggctggtcttgaactcccgaccgcaggtgatccgcccgcctcggcctcccaaaagtgctgggattacaggcatgagccacagcgcccgggcgcaaagtacgtattttttattatagtttgttgttattgctgtcattcctattttgaggtgattaagtgccctcctgggcctgactcgaacaagatcacggtcggttgctcctccctcgcctccattcctacttacaggatggcagctgcacgtcacctgaccagagacaaggcgggacgcgaggctaacagtttgtcctcagcgcgccgccgtagcccccgccgccgccggccgcgcggtggctcctcccgcccacgcgccagagtcgcagtgggcgggcctacgtgctccgcccgctgtgagcctgtccggcccccgcccgctccggagcaacccgcgagcttacaccggcttctctctgtcctcagcccgcgcgccgccatcgccgtcatgctgggcgccgctctccgccgctgcgctgtggccgcaaccacccgggccgaccctcgaggcctcctgcactccgcccggacccc

SEQ ID NO: 14357 - DNA, 2300 bp, Homo sapien
ctccagcttcctccaggcctgccacattaccctaattcacagcaccccatccttcctccctcactccccgcatctcccgcccccaccccctacaccccttcacggctaggagggagcgcacagccggcgggctgcgacgcgcgctgacagtgtaatgaatggcttcagctgtaattagcgaccccgcggctaatcacgatgtacatttacattttaagtgctgcagagggagcgcgggaaggggaggggaccggcaggagggaatgcggcccttttcggcgttctcccttcaccgactgtggagagcagtgaatgcgagtcttctacatccgacagcagtttaggaggttggggacggctgggtcctcgagggccaacctggccggacgcagaaccgccccgtcctcgccctacacaaacctgaagctcccaggaccctttctccaaatgacagaactccgcccaatcccttccaagtgatcgtgcagcccaaacttgcatactcccggggacggagagctcgctccttccacaaccagcccgttccaacgtaacttccagcctttcgggggctttttctcagggcctgaccttacacagccctcggttctccacgccccgctacgcgctgcggacagtctttgtttcttcccaaggctgctgtgcctccagcccccaccgctgtgtggggcccatggagactggaccgagaccgaagtcccggttcggagcataccccgagggttcctgatcccaccaggagacggggagggggtcagccattcacacattgcggtgccaaggtccagtcgccgcagccactcccaggaagtggtaagagggtaaatcccggttctgaacagcagggaccgagggccgctcccaagaagtgacaaggaagtaaaccctggttttgaacagcagggactgagagctgctgcagatgcccagagggcgagaacagcgggaggagggagaacagcatctggcagccccatctccaactgaggcccagcaatccaaggcactgtcatgcccccagcactttcccggtggcccgcccgccccagctctctgtgtccctccccgccacgccccgtcacagtcccctggctaggaccagatctgccgccctctctcagtcctgactgcgtagggcgggtggaaggaggacgggggaatcccgagagcagttttagggagggtcgggccccttctcagaccccctcccttccatcagtagtcctgacagcccccaatctcatctttctctaatgcttctctcacccggcaggagaccccgggcctctctttcggtcccgtggagtttccgccggagaggcatccagtagttccataatgcccccagggcttcaactccccatcttcctcccttctttctctcttttatttttttttaagtctttttaatttttgtgggtatacaataggtgtctatatttagagggtacatgagacgttttgatacaggcatgcaatgcataataatcacatcctggagaatggggtatccctcccttctcttttgtattttatttaattaattaatttattcatttttcgagacagagctttgctctgtcgccccggctggagtgcagtggcatgatctcggctcactgcagccttcagctcccgggttcaagcgcttgtcctgcctcagcctcccgagcagctaggattacaggagcgtgccacaacgccgagctgatttttgtacgtttaatggagacggggtttcaccatgttgaccaggctggtctcgaactcctgacgtcaagtaatccgcccacctctgcctcccaaagtgctgggattaaaagcgtgagacaccgcgcccggcccctcccttctcttttttaaaacctgcgttcacctagcctcctttcgaaaaggaccccactggatctcaaggggccaatgttgcctgagcgaattccgcctgggaggaagggggcggccacgttggcaaggcatcgtgcctggctcaccctaaagcgcgcagctctaagggtgggctctagggcctgggtggagcgagcctaccgccttttcagaagaggtcacgcccgcttccccacgcgcctcggggaacagcctggcccaaagcctcactcctcacgtcccaggggtggacgggggtccgggagcctcgagctccgggcaggcgtggcgaggctgaagtctgggtcttccgcgccccgcgaggaccacgccgcgacgtaatcgcccgcggggaggcgcggagtggagccgcagccagctcctcccgcactctg

SEQ ID NO: 14358 - DNA, 2300 bp, Homo sapien
taaatactttatttttaatttttaaaaattgttttatccatctatttacagatcattaaatacttactgtgtaccaggcagtcccatatgttacatgtgtctgcatgtattaattcatttcatccttgcaggaaccctaagacacgggtcccattatcaccatccttattttacatatgtggaaaactaaggttcagtgaggattagtaccttctcaaattcacactgcagggaaggggcaaggtctgccttctaggttgatattcttaaccactgctgtatgcttcttctcatggtaggtaaccagcaaatgcctattaagtaaacgtttgtttaagtgatcattgttcccttccatttacctgaataggaaaggtacaatctactgggacaaaggtgggcttctgactttggacctgctcactcttcctacgttagttgtttatcaaataggagacccttctgattcttctgagtggagaaaaattgtccgtggtcatcagacgggaaccccaatatttcccttgtaggacctacatgaaccacaagatatctcctataaattccatgtggtttccagacatcttccttgtggatcccagtgtggacctcagatctctctcctaaaggcctatgtgaacccctatatctttcctgaggcccacatggactcccaacattttccctgtagcagccacacttgataacttcgacaggttcccagttgtcatctcattggctgctctccacagctctgtaaatcagccttggcttgcattatagcagggagagacagcatgtgggtcaaccagggacaggactgacacagaacccagttgtcctgccccgaagcccaggacccttccttcctggttggcctggtggcaggatgatgcttcctgctcagcccttcccaggcaccgaggctctctccctccttttcccctctgccacactagttcttgtctgccttttttcactgccacccccttttcatgccagctgtgggagtgaggccccactcctggcaggatggagccagacaatgggcccttattctaggcaaagaatccctgcagtgtctcccacccactgaggcccccttccaggcctaggatggtgtgggtggggggtggagggtgggtgtatggtgtaggggaaggagcaattggctggcaggacagacagtggccctggccctgcctgtagagatcccacggaggtttactatgtaaacaccaatcacaataaaatcctgtcttcactcccagcccatctctccaagtgggtctctctcaaccctccaaagctctgggtttttaaacatttacccttgcctctactctctcttggtattcatctctgcatatcactgtctctttcattcctttttctgagtctctttctttttctaagcctctcctctctctctctctctctctctgctcctttgcgtaatttgtctctatttcttgcctctttcttgcttcattatgctcccttacctatcttatctttccatgtcttttttctctccaggccttgagctctcatctcagtctctctctccgtgtgtctctgtctctgtttgcagctcttctttctcgtcctcctatgtcgtctttccgtggatctgtgtccttgcctctctgaatatcatctccgatcttccgtcctctgttctctctttccccctgcgcctgcagatctgaaggaccttccgcagtcaccacactctcctgctttcagctctttctcactcctttctggcacgtcccagaggctcctggcataggtataggaggttattctccccagtttacagatatggaagctgaggctctggctgctggtgccaggctcccatctctgggtctcttccttccacctacacgccaggctcttgtccctgaggtgcccgtcaaccacctgatccggccggggcccgggaactagcacctcggacagctcctggaagatgccggggcggccgggtcgtccttctcgcgagctcaggaggagcagccttaggagcagagcggaagtctcgcgagagtgactgctgcaggcagtggcggcgcgggcgcgcgcagagacggcctcgggcgcgcgcgcgcgcgcgcgcgctccccgcccccagccccggagcggctcgcggccggctccgcgccgcatcgctcgggtgcagcgcagctcagcgcagcgctgcggcctttcggcagccgaacggccgcggcaggtgagtctgggcatgaaggctgggaggagagctttgaagggaagctgggcgcggggcgaga

SEQ ID NO: 14359 - DNA, 2300 bp, Homo sapien
aagtgatcctcctgcctcggactcccaaaatgctgggattacaggtgtgagccactatgcccagcctgaagtttttattttaaagcaaacttctcatggaagtctaacacacaggagattgcacaagttgtaactgtatgcttggagaatgttcacaaaatccatacctttgtgtatccagaaccccgaccaagaacagatgccgggcccccagtcgctgccccatcaagggtaatactatcttgacttctaacaccatagatttagtttttcctgttccaaaactttaagcaaatttctgcccagcttttaaatgttgcattgccttagcacttggttgtggaccattttctgctgttgactatataaatgtccaccaaagtcactgttctaacaaggtgattgctgcttggtttccttggccttaacttgccagtgattacttagcatgggtcagccaggcctcctgctgaactcccaggagcagagcatgtttgtaccctccagattcctataagacgccctgtccaggtgtcccccagcgtctctaccctgtatgtccctagcacagctgctcgtcctcccctggaacctccgcctcatctcacacaggcttgtcatgatgggtctccaccatccactcggggttaagtgggcagggagtcttccaattgctccctttcccctactccttaaaaccaagaccccttcaaacttgtctcctaagggtctcaggaagcacatcctgcccaccttgcctttccagcctcatctgctgccccctcatttgcactctgctttggccatagtggctttctttcccttatgatgggtggctcatgcctataatcccagtgctttgggagtccaaagcgggaagattgcttgaggccaggaatttgagaccagctgtgcaacacagcaagacctcctctctacaaaatattaaaaaattagcatggtagtctgtccctgtagtctagctactcaagaggctgaggcaggaggatggcttgagcccaggagtgccactttactccagcctgggtgacagagtgagaccctgtctaagaaaaaaaaaaatgtgaagctccttcctagtaaggaactgtccctgtacgatgctttcccatctgcctagaaggctgttttgcccggggaactcctcttcatgcttcaggtttttactaccacttgtatttaatttccctgaggctgggtgcagtggctcatgcctgtaatcctaccactttgggaggctgaagcaggtggattgcttgagcctaggaattcaaattagcctgggcgatatggcgaaacttaatctctacaaaaaaatataaaaattagctgggcctggtggtgcatgcctgtagttccagctactcaggaggctgcgcttggaggatcacctgagcctggggaggctgaggctgccgtgagctgggattataccactgcactccagcctgggcaacagagagagaccctgtctcaaaaaaagttttttaattaaaaaaatttaatttccctgcctctccagaccagattagatcaccaggacatgatgtgtatgttttcacggtggctgtgcttgccttttgtatgatttactgcagaggtgattgactgtttcatggggagagcagggaccacatctgtctcactcattcttccagcaccatataagtgtcctaataaatgaacaaaggcaaaaggagcaaagggaggctagcctgtgaccaaggccgaggctcagtctgtaattcaaggtcaaggaatagaatgtcacttggctttccctgtatgggatcccctcccaggttcctttcctacccttggatggggttttcagagagtagattttgtgccttgaagcagagggcgggagcagctggtaagatgcagctggtggaagggtggctctgggaggaggggagctgcctccattgcattcacggcactgtgggagtatgtgctgggtcctgtcctggggagcttgcagcccagatgaggagtagagagggactgggttgggtgtggccctgatctcatccttctctggcttttctttccttgcagttcaggacaaagaggtgtgggcaggccactgggccagctggtaacatcatggcaggtaaggagaggggcaggctgtgtgggtaggacatgacagtgagcatagcgtggatggccctcttcctggttcccttatctcccctagtctttggaggccaggttctttccatcttactgtccccaagctttccccactctctccactgaggcctgtctgagaa

SEQ ID NO: 14360 - DNA, 2300 bp, Homo sapien
gtgtgttctgctgtgtcatgtgtcttcctgtggacttgcgtggagcctcacagcgggctgtggggcaggggcatgaaagtatggggggtgggtggatctgtggtctgtcattccccgagacctagagctatacgaccctgtgtggctccttctctgaggcagccttcagtaggtgatgaaattgccacctaggccccctgccttgggaggaggaagtagaagaagcaggctggatcggccgggcgtggtggctcacacctgtaatcctagcactttgggaggctgaggcgggtggatcacgaggtcaggagatcgagaccatcctggctaacacggtgaaaccccatctctactaaaaatacaaaaaattaggcgggcgaggtggcaggcacctgtagtcccagctactcgggaggctgaggcgggagaatggcgtgaacacaggaggcggagcttgcagtgagccgagatcgcaccactgcactccagcctgggcgacacagcaagactccatctcaaaaaaaaaagacacggctggatccctgcgtaagggatggtttggcccagatggtccactgcggctaagggcgggggtagagcagaggccccacctcagctcagggcaggggacccgcagctggttcagccacctcaatgaatacagaggttcctggggcctgtgaaggctagaaaatgaagggggcagggaagcatgccagtgtgtgttcttctgccgccttccctttgcccatttgatgccttccacctggatcgctattgggatcctctatctaacctcctggctgtccttcaagattcatttcaagtcactccttcaagaaggctttcctgcctagaggtgttgcttcctcatggaggatcttaccctgtcattttctgtgtccctgtttgtctcaagaacagggacgcatctgatttatctctgtatcctgtgcacctaaaatagaagaggcttggtaaatattaagtgccacgagccctcttttactaaggacctgccaacatgggccccattcacactaataccatgaagatagcccttttctatacttcgtcataaaaaagtaatacacacacccgggcagcaacttccacacaaacaacacatgtgcaaggagatcaccattatttccagcaaaatgctccccagggccgagcgtggtggctcactcctgtagtcccagcactttgggaggccaaggtgggcggattgtttgagcctaggagtttgagaccagcctgggcaatagagtgagaacccgtctctacaaaaaatacaaacattagtctggcatgatggtgcactcctgtagtcctggctactccataggctgagataggaggatggcttaagcccaaaaggtggaggttgcagtgagtggagatagcaccactgcgcactccagtctgggtgacagagccagaccctgtctcaaaaaaaaaaaaaaaaacaaaaaaaaaaacagctccccaacaagatagcaggctacaacatgcatgtgatgaagctgatttgaagcgctcagtgagaggtatctgcatcaagttgcaggaggagaagagagaaaggagagataatcatgttcctgaggtctcagccctggatcaggaaatcattgaagtattaacatatcctgacattaaggaaatgctgatgtttttggactttggcagtctgtccaacctgcaggtcactcagccaacagtggggatgaatttcaaaacgccacgtggaagctgtttgaatctttttgagatactgtaatattttcaataaacctgggacaacagcaaaaaaaaaaaaaaaaaaaaaaaggccccaagcaacaagcagtgtgtgtggggctgataggagtgaggaaaggaggtcggacagttatgccagcccctatcgagagtcccagcaatacaaagaacagggccagggtttgctccaggatttccccagtggactacaactcccggaaggcagagaagtggactacagctcccagaaggctgcgcgacatacagccagcccggtgctctcgtgaggcgtgccagtcagattccgcgggagagcggcagagataccgcgatatttgggagcggccccgagacgcgcctggcgcgggtgagcagtggaagggggctgggaagctgggttctcgcggcggcgcgggaggggaggttcggggagctgtgtccgcgagcgtgggtccacggctgtctgtgtgtgtccttattttcccctgtgtgcccatgaagctctgtttgcgactgtgcgtgggtaggcggcc

SEQ ID NO: 14361 - DNA, 2300 bp, Homo sapien
ggggcctcagagataaaatttggcttctggttttgcaggaatctacctatcctagcaccagttggctagggtgggacagggtcagggtttgcgatctggcaggtaggtttccctggagaataaagaatgtgcctccatcacctaccaatgatgtgttctgggaagaagctggctggtagcccttctgtaccttgtcagattctaacagggctccccactccctggggtaaactcagttctccaactctggccaagcattgccctggttggggccctgcagtggagcagacattgagattactggcaaatcaaactttgggtgatcttgccctagggaaccagcctgtgcttaacccctgctgagaagtgggataatgcagccaaacatgatcctcagcccacgtgggttgtgctcaagtgctgaaggcaaatcctgggcagagaggctagagagccaaggggcctgtgagtgaagaggagataggcccctgtggatgctcagccatggaggtagccattggacaactcaccagcgctgcttcctgggcagctgcctgggtttcccttgccatgctgattcttttttgagtgcatcttctaggaccttctgtcttggaaggagagccccttactgctctctttcatgtattgactcaaagtttctgctggaaggagcttcagagatcatctggtcctacctctgcatttttcagatgaagggacaggtccagggagggaatgaccctggaccagggtcactccaggtcaggagcacaccatggtcagggcccagggcttctgcttcacaggctaggtatctgtcttctgctcacactgccttggagggtatagttattcattcagcacctgttcaggactgccggctagtggactgctggttggcaattagacccggtcacacattcagggagcttgctggtggagggagaggcaaggaaactgatgtgttaattgagtctgtgatcaccaaaaaggtgcatcccagggaaggactgatctcaaataatttcagacaggtgtcattcctgtcttctcaaactcaacctacagattccccagaggcagctactgtgttttccacaattcctttgcatggtgttctttgtaatcggtcctcagtgatggttgctgatgaagcacgttctgctggcccaacccgccacgtgtaggttttggtgtccatcagccatattatcatgagtgcacacttctagcaacgtctgagagccagaggaagaagcaaaccagctaatctcctggggtggcctgcatcccctttatgctggtttcttcctgggctttgatttgtacggtggtgcccatcttgattaacagggacagggacagagaggcaaatctcttggctccctggagcacccaaacctccctgttgcccagggttccacctcatgagcatctttggaacccatcccttcctgccgcttcctttcaccagtcagcccagtccaccgcagcagctcctctcgccctccagtctctccactaacagggtccctttgacactgtcaccaggtgccagcaccgtctttctaaaaccaaaactcctcaccctggccctcgctgcccacggcattctggcctcaccctgactttcagtctcactttctgcccctctaccaccccccatcacagtccggcctcactagtaagccactccctgttccccaacctgccaccctcctcaggaccttcaccttggcaagattgttccttcctttgaagtgatttcttcctgtctctgaaaaactaactcatccttcaggactcaaccccaatgtcattttttctgggatgcaatctctgacttctagagatggtcaccctgagcagccacgcacctggtacagcccttccccacagcactgcatcattcccttgtgactggcccatgtgtggggaaggtgtctcactttcttatcaaactgtgtgctccctgaagccaggactgctgatcccttccgctgcctcagcctctggcctggggcctaatacgtggtgctccatacattctggtcgactgtatgaatgaagggggtggcccttgttctccttttagatcctaaatcccgacagctttatagagcccaggcctggcaggctcccagaacttgaagccaccagaccccacatggaaccaaaggcctcctgtccagctgctgcacccttgatggagagaaaattccatgttcttgtgggtgtcacggggagtgtcgcagccctgaagttgcctcttctggtgtcaaagcttttggacattc

SEQ ID NO: 14362 - DNA, 2300 bp, Homo sapien
agcctggagctcagggaaggcttcctggaggagggatcccaagccgatttttttttttgacgggggctgtgtcaggtcttggtttgttgcccagcctgaagtgcagtgacctgatcacagcttagtgcagcctgaacctcctgggctcaagtcatcctcccacctcagcctcccgagtagctgggaccacaggtgtgtgccaccatgcctggaaattttttttatttgtcctgctctgttgcccaggccagtcttgaactcctgggctcaagtgatcctccagcctctgccttccaaagtgtgggaggatttcaggcatgagctaccgtgcccagcctctgagctgagtctgaaaggccaacaggaattagcaaggaaagccagacaagcagccaaggcagatggagagcatattccaaagtgtggaggtgtgacctgaaaggaaccttggctggctggggagacaatcgggacaatcaggagacatgccaaagccagactggggaactggaacctgaggccaccgaggaaccacaggagactccaagctaggagtgaccggttacacacaggcattagaaagctctctgtggaggcaggcagggaatatttcctgctgcctccagcaccaagcctccaatggctgggctttggcacagccagagtgagacatcacagtccccccctccctgagtccaaggcccagcagtcctgttcctgaggcctctctcccactgtggcagacccacctccacacaagcacccatctcactggaggcaatggtctgtttgaagcctgggagacagcactgggacccatctactgctgtaccctcaatgccagcataaaacctggagatcctcaatatgtgacagaaggaaggatgggaaggagagaaggaaaatcagcccaccctagctgttaattaaagaatgttcccctcctctgcaggagtccctaaatctttttttttttttttttttttttttgagatacagtcttactctgttgcccaggctagagtgcagaggcacgatctcagctcactgcaacctctgcctcccgggttcaagttcctctgcctcctgagtagctgggattacaggcttgtgcaccatgccggctaatttttgttttttagtagacatggggtttccccatgttggccaggctgatctcaaactcctgaccttaagtgatctgtctgcctcagcctccccaagtgctgggattaaaggcgtgagccactgcacctggccagggtccctaaattattgtgcatggtttgttgttgttgttgttgttgttttcctagccaacaggccagcagatgcagtcttccagaggggcccagtgaaagcctgccccacttctcagtcttagggcctcccctctgagcaagtctgattttctctggaggtagtggggggggggctccttcggagtttgagaggctcccactccctgctcactgtggcaaagcagcaggctgcccccacccccagcctcccctgcagaaggatgccctgatttcccagtacacctttggaaagtggctcacctcaccccaatcagaccccatggccctgtcctcctgcccaggtcctatccaacccagatccctacgacgctctgagtccatgctgatggccaccgacgcagcccagcttcaggctctgcttgctttagtggcagcgggttcctgaacaacaattgtgtctgagccctccctcagaaggcactggagtcacacagtcctccagggacaatcctagctctccatttcttggctatgtggacaagtggcctccccctcctcctctagagctactgttactggttgagggtagttgcccaggttcttggtgttttgaacaaagaattggacaaaaggcacaagcaaggcagcaaaacctccagcaagaggctcaggagcactggttacagaattttctggggtttatataccctctagaggtttcccattggttcaccctagtagcccgcaaccagtctgattggttgaagagtaggcccacgaccagtctgatgggttgtgggaggggaccaatcagaggcactttcactttccagctgccactcagcaactgccatacagcaaaaggagggattgcaactaccatgcagcaactgccaccttgaaagagaaggggttgaagagtagtctctaatatccagcaccagttggccttaggttccctgcctccagaccttattctcctgcaacatcaccactggttgaaaccttactacaaatcaagctgtgaagtcactggag

SEQ ID NO: 14363 - DNA, 2300 bp, Homo sapien
tgtgttaactctactcgggaaggccatataaggacagactgttcccttctctgcttttattcacactattccttctgattagaatatcacatctctgcaagaccacagtcctgataaaaacatgtggagctcccaaggcagttatcttgtattgattgccttcattctctataggctccacagacgaccattggtatagggaggaaaatggcaaggtcagagccttcaggagctcatagtctggggacactctatgagcttcctagagtttacaagcaatttcccacactgatgttggccgacaccacagttgctaaggcaggtctctcactgctctctttttgcaatgaggaaatttgaggctcagaaagttacaaagtagctcccaagtcccccagtgttgcctcctttctttggcagtccagggtgtttaagtgatgccgaaaaggaacagacatactgttgagtggggctgctgtctgtgtgaggtgtccctgaattaacacaaggctcagcagtgctgcaaatcttaactagcccctattgtctcagatggctgctcatcctggcctggttgggtcccattccaactcagggaaattggagagaccactgggcacatctgagcacacaacctgagcgtcctagaccccaagggctaagaacacagccctccttccaccccactagcagggcagggacagggtcgccggcgcggtgctggaggaggaggggcgagcagagttggtaaggggcaagagcagtgaatagcctgtgacccacggggctgcaggctggggttaagggtatgatgtttggtgtgacccctagctgtccgcgcgcagatgtattttcctgacgctaaggtgtggctgcaggaagggccccaggctgggagccaggagatctgggattttgtcccagcctgctgagtgacctggggaaagccccaaccctctctgagtgtctctccctatatggttcccgactctatttctaaggtccttccagctctaaatgaagtgacactctccccccacctcccgcccccgctccccaggtgacctcacttcctcttcctacctgcagcgcccagcccctcctcctcagctccagctgctccagctgcttggtgattcttggaacctgcagcctcaggcctgctctgctctgactcaggcagaacttacctttgggatctgaggggatagttttgcttcctgaactgactctgacctttggcatgtccacctgccctccccttccccactgcacacacctgttcccagtcctcgggcagcccaggagctttgacggaccagattccttcagataaagtagcagcactgaggggctctcatccacagtcagatggtccagggagaggcaccccttcccccctccagcctctctttgcaacacaccattcctggctgggcgtgctccactccacccgcctcacaggctgcgcgccggtctgcctcatggagggagcctcacccaggctactttgcaaatcccccagcaccctcattcccggcccttccagggatggggagattgccgcttcctcagacagttgccgtgccctagcaggagtctggaaattgccctcattgactacaacgaaatgaggggacagatcaaggagcccttctccagccccctaatacactagtgctggacaggggaatgccggcacctactgtgtgccagatatttgcaaacacccttttccaagcttacaccgccaccgctatgaggaagacagaattccacttttgcaaataaggaaactgaagctcagcgaggtcaagcggcaggcgcaaggtcacatcgcagcaagtggcagtgaatgaacgatctaagggagcgactgagggcgcgtgacgggcccgccgggcactggttcgtggagcgtggcggttacgggcggtgcacagcgcccgcagcccgctcctagcgagctggccccacgcgggccctccgcacccgctgcccacaggagcgcaggctcccagaggcggggccgggctcttccccaaccctgcgagtcgccccgcccccgccccgcccccagcccgccccgcccgggaccgcagacggcgcccagcggcggcgcgaacggcagctaggagggttgctccgggcttggtgctcactgcgacttcccgcgcagggcccggtcggactaggacccgcggcctgagagacgctggaggatgcggacgcggaggccgcctggggtagcggcggcgggagtcctggcgctctgcaggtaggagctcgcccgctcggcg

SEQ ID NO: 14364 - DNA, 2300 bp, Homo sapien
cagactgatgtccccagttacctctcctaggggactgctctccagagccaagtccagtatctcagcattggctttgggcctagggacctgggctggaggcccgactctgccatttttgacaagatcagcaggtcagaggagtgtcacaagaaatctgtgaatttgtagacaatactcagattccatgttttggctgcagtgggcatcactgtggcatcttggaataggaccctgtggtgggaggcaggaggcctgcttctcgttgtgtctatttcattggtgactttgggatgaatgggtctcctcatctgtatatgagggggtggcggcagggtatgtcaagtgaccctgagacccagtgcccctacaaattctgaaatcccaagaaggaggggatcttgggagttgtatggaggaaaatcgaacagaaggggctcctggagtggggatgggtgggggttctgtgtagaataattcattaaacaaagggttctgcagcttaaaatatacgagttggggtcaggagcagtaggtggttcatgcctgtgatttcagcattttgggaggccaagatgggaggatcacatgagtccaggagttcaagaccagcctgggtaacatagtaagaccctgtttctacataaaatactaaaatgagccgggtgtggtagcaggcacctgtggtcccagcaacctgggagttgggagaatcacttgagcccaggaggttgagactgcggtgagccaagttcatgtcattgcactccagcccgggcaacagagtgagaccctgcctcaaaaaatacatacacgagttggaaacctctgtcacgtggctcatgcactcacagtcttaactgagcatcatttaagcgccaggttcttaggtgtagccgtgagctgatgagagcagcagccctctgttgctttgcctgtagcctgttttcctgacagcccctgcctttctctctctatcccaggtcagaagttgagtagcaggggcctaggagggctcgaagccttcacagcgatggcagagaagcgacccctgagaaccctggggcctgtgatgtatggcaagctgccccgcttagagacagactccgggctcgagcacagcctgccccactctgttggtaaccaggatccctgcacctacaaggggtcctacttctcctgccccatggcaggtactcctaaggccgagtctgagcagttggcgtcctggaccccatacccacccttgtactctaccggtatggcaggacccccacttcaggcagacaacctgctgaccaactgcctgttctaccgctcgccagcagaaggccctgagaagatgcaggactccagccctgttgagctcctgcccttcagtccccaggctcactcctacccaggcccaccactggcagcacccaaacctgtctaccgcaaccctctgtgctatgggctctcaacttgtctgggggaaggagcagtgaagaggccactggatgttgactggactctggcgactgggcccctgttgccctcagctgacccaccctgctctctggccccagctcctagcaagggccagactctggatggcaccttcttgcggggggtgccagctgaggggtccagtaaagactcctcagggagcttctccccatgccagcccttcctggagaaatatcagaccatccacagcacgggcttcctggcctccaggtacacaggtccttaccctaggaactccaagcaagcaatgtctgaggggccctcaagtccttggacccagctggcccagcccctggggccaccctgtcaggacaccgggcccacccactacccaccaccccaccacccaccaccccaccctccacaggccctgccttgccctccagcctgtcgccacccagagaagcagggcagctacagcccagcactcccactgcagcctctggggggccacaaggggaccgggtaccaggctggtgggctgggcagcccctacctgaggcagcaggcagcccaggcaccttacattcccccactggggctggacgcttacccctacccctctgcccctctcccagcaccctctccaggcctcaagctggagccgcctctcactccacggtgcccattggactttgccccccagacactgagttttccttatgcccgggatgacctctctctctatggagcatcccctgggcttggagggacaccaccttcccagaacaatgtgcgggctgtgccacagcctggtgccttccagagggcatgccagcctttgccagcgagcc

SEQ ID NO: 14365 - DNA, 2300 bp, Homo sapien
ggaggccaagatgggaggatcacatgagtccaggagttcaagaccagcctgggtaacatagtaagaccctgtttctacataaaatactaaaatgagccgggtgtggtagcaggcacctgtggtcccagcaacctgggagttgggagaatcacttgagcccaggaggttgagactgcggtgagccaagttcatgtcattgcactccagcccgggcaacagagtgagaccctgcctcaaaaaatacatacacgagttggaaacctctgtcacgtggctcatgcactcacagtcttaactgagcatcatttaagcgccaggttcttaggtgtagccgtgagctgatgagagcagcagccctctgttgctttgcctgtagcctgttttcctgacagcccctgcctttctctctctatcccaggtcagaagttgagtagcaggggcctaggagggctcgaagccttcacagcgatggcagagaagcgacccctgagaaccctggggcctgtgatgtatggcaagctgccccgcttagagacagactccgggctcgagcacagcctgccccactctgttggtaaccaggatccctgcacctacaaggggtcctacttctcctgccccatggcaggtactcctaaggccgagtctgagcagttggcgtcctggaccccatacccacccttgtactctaccggtatggcaggacccccacttcaggcagacaacctgctgaccaactgcctgttctaccgctcgccagcagaaggccctgagaagatgcaggactccagccctgttgagctcctgcccttcagtccccaggctcactcctacccaggcccaccactggcagcacccaaacctgtctaccgcaaccctctgtgctatgggctctcaacttgtctgggggaaggagcagtgaagaggccactggatgttgactggactctggcgactgggcccctgttgccctcagctgacccaccctgctctctggccccagctcctagcaagggccagactctggatggcaccttcttgcggggggtgccagctgaggggtccagtaaagactcctcagggagcttctccccatgccagcccttcctggagaaatatcagaccatccacagcacgggcttcctggcctccaggtacacaggtccttaccctaggaactccaagcaagcaatgtctgaggggccctcaagtccttggacccagctggcccagcccctggggccaccctgtcaggacaccgggcccacccactacccaccaccccaccacccaccaccccaccctccacaggccctgccttgccctccagcctgtcgccacccagagaagcagggcagctacagcccagcactcccactgcagcctctggggggccacaaggggaccgggtaccaggctggtgggctgggcagcccctacctgaggcagcaggcagcccaggcaccttacattcccccactggggctggacgcttacccctacccctctgcccctctcccagcaccctctccaggcctcaagctggagccgcctctcactccacggtgcccattggactttgccccccagacactgagttttccttatgcccgggatgacctctctctctatggagcatcccctgggcttggagggacaccaccttcccagaacaatgtgcgggctgtgccacagcctggtgccttccagagggcatgccagcctttgccagcgagccagccctgctcagagcctgtgaggcctgcacaggaagccgaagagaagacctggctgcccagctgcaggaaagagaagctccagccccggctcagtgagcactctgggccgcccatcgtcatccgagacagtccagttccctgtacccccccagcactgcccccctgtgcccgggagtgccagtctcttccacagaaggagggcgcaaggccacccagctctccaccaatgcctgtcattgacaatgtcttcagcctggccccctaccgtgactatctggatgtgccggcacccgaggccacaactgagcctgactctgccacagctgagcctgactcagccccagccaccagtgaaggtcaggacaaaggctgcagggggaccctgcctgcccaggagggcccctcagggagtaaacccctaaggggctcacttaaggaggaggtagccctggatttgagtgtgaggaagcccacagcagaggcctcccctgtcaaggcttcccgttctgtggagcatgccaagcctactgcagccatggatgtgccagatgtgggcaacat

SEQ ID NO: 14366 - DNA, 2300 bp, Homo sapien
caactgcctgttctaccgctcgccagcagaaggccctgagaagatgcaggactccagccctgttgagctcctgcccttcagtccccaggctcactcctacccaggcccaccactggcagcacccaaacctgtctaccgcaaccctctgtgctatgggctctcaacttgtctgggggaaggagcagtgaagaggccactggatgttgactggactctggcgactgggcccctgttgccctcagctgacccaccctgctctctggccccagctcctagcaagggccagactctggatggcaccttcttgcggggggtgccagctgaggggtccagtaaagactcctcagggagcttctccccatgccagcccttcctggagaaatatcagaccatccacagcacgggcttcctggcctccaggtacacaggtccttaccctaggaactccaagcaagcaatgtctgaggggccctcaagtccttggacccagctggcccagcccctggggccaccctgtcaggacaccgggcccacccactacccaccaccccaccacccaccaccccaccctccacaggccctgccttgccctccagcctgtcgccacccagagaagcagggcagctacagcccagcactcccactgcagcctctggggggccacaaggggaccgggtaccaggctggtgggctgggcagcccctacctgaggcagcaggcagcccaggcaccttacattcccccactggggctggacgcttacccctacccctctgcccctctcccagcaccctctccaggcctcaagctggagccgcctctcactccacggtgcccattggactttgccccccagacactgagttttccttatgcccgggatgacctctctctctatggagcatcccctgggcttggagggacaccaccttcccagaacaatgtgcgggctgtgccacagcctggtgccttccagagggcatgccagcctttgccagcgagccagccctgctcagagcctgtgaggcctgcacaggaagccgaagagaagacctggctgcccagctgcaggaaagagaagctccagccccggctcagtgagcactctgggccgcccatcgtcatccgagacagtccagttccctgtacccccccagcactgcccccctgtgcccgggagtgccagtctcttccacagaaggagggcgcaaggccacccagctctccaccaatgcctgtcattgacaatgtcttcagcctggccccctaccgtgactatctggatgtgccggcacccgaggccacaactgagcctgactctgccacagctgagcctgactcagccccagccaccagtgaaggtcaggacaaaggctgcagggggaccctgcctgcccaggagggcccctcagggagtaaacccctaaggggctcacttaaggaggaggtagccctggatttgagtgtgaggaagcccacagcagaggcctcccctgtcaaggcttcccgttctgtggagcatgccaagcctactgcagccatggatgtgccagatgtgggcaacatggtgtcagatctgccaggcctgaaaaagatagacacagaagcaccaggcttgcctggggtgccagtgaccacagatgccatgccaaggaccaacttccacagctctgtggccttcatgttccgaaagttcaagatcctccgtccggcacctttgcctgcagccgtggtcccgtccacgcccacctcagctcctgctcccacacagcctgcacccacccccacatctgggcccattggactgcggattctcgctcaacagcccttgtctgtgacctgcttcagcctggcactgcccagccctccagccgtagctgtggcctcccctgcccctgctccagctccatcccctgctccggctcgagctcaggctccagcttcagcccgggatccagctccagctccagctccagttgcaggccctgctccagcatctacttcagccccaggggactccctggagcagcattttacaggactacatgcgtccctgtgtgatgctatttctggctccgtcgcccactctcctccagagaagcttcgcgagtggctagagacggctgggccctggggccaggctgcgtggcaggactgccagggtgtgcaggggctgctggccaagctgctgtctcagctgcagcgcttcgatcgcacccaccggtgccccttcccccatgtggtgcgagctggcgccatcttcgtgcccattcacctggtgaaggagcggctcttccctc

SEQ ID NO: 14367 - DNA, 2300 bp, Homo sapien
tattacactcaccatccgaggtttgcaggacttttgttttaatattgaatagatggaactgtttacttctgcatctttgcaggcatacaaaatgtgcctaccaggactctgctttatatctattgaaagcaagaagtaatacagtaaaactttgcctggctagaggctttggaagaatggagtattctgatttaatgctattgaagtgtgaaggtgaaaagaatgaaaaacttacatttcctgttgaatgcaacttgaaaatacagccagtgattccacttttcttctctagtaagtttggacattctgatctacttggtgttttattatagaactgctagtgtgcccgagacttacattgtgaagacactttttaaaaaacttgagaggtaagagggtgtaaatggtattgtgtgagatcaggctggatgagaactgacacttgtaaacatactttttaggctgaatctctgattgccgtttgttttcttatttaactcataaaaataaaacacattggatggagggtgggagcaggaaggagatttatgtcttttaattgcatgccattgtttcatatcaagacagaacatatggtatccctggctttggacctacagaaggaaacacatttttctgcctgctgtatgccagaggttcttgaacacctggagggatgactgcagcacagattgctgagccctactccagagtttctgattcaccatgtccagggtggggcctgagaatttgcacttataaaaggttctcaggttctgctgctgctgctagtccagagactacatttttgagaaccactcttgtctactaactgtaaattgtagaactctagaacaaagcttagtttggtgtaggaaaagaagctcacaggttatggagcaaatcatgaaagattcaacccttgatcccagcctagtgtggaattcaggtaacaatcaatacacagtgacataacacaattcttggttttcatgattgcaagtcatagccaagtatcaagtgagaaattcagtttcatttgcaaggcttagagaggccaggtgattctagaaaaataggccttgtatttgctttaaaccagtaaagagctttgagtgcttattaaatggaaagctttgtgtttttatttatttttgactattttattttatttttttgagatggagtctcagtctgtcacccaggctggagtgcagtggcgtgaccttggctcactgcaacttccgcctcccgggttcaagtgattctcctgcctcagcctccccagtagctgggattacgggtacccaccaccacacctggctagtttttgtatttcgagtagagacagggtttcaccatgttggccaggctggtcttgaactcctgacctaaggtgatccacccacctaggcctcccaaagtgctgggattacaggtgtgagccaccacacccggcccaaaagctttgtgtttttaaagatattagacatgtttcttgttttttaaaaaatcttaataatgtaggagaataagagaaatgttttttccaaagccgagaaatcattgtgattattttaccttattgggatgttggataatatagtccacttcattcattaatcatcaaacatgctatggattttccatttttataggatttgtatcttcactggggtaatactggtaattcttatactccctctgaagatgaaaaatgtaggccaaaatcatagaccatgcatagaagctggataatgaagacagctctggaggaacatgtagacacacacacactgacacacatatatataaagtataaatacatatttttttaaagtttatttttaacattttaaagcaaaaaccagccctcccctctcccagagtaggcaggccccgcccctctccccaagtgggcagggacagcagtcgcatgggcagctttccttgtgatgtcacaggttcctctgggcacactgctgcctggccacgcctcctttccctttcatctttctcattgaccaatgggattggagcattaaggccacacccctattctgcattctagtgtggccctggttacgcctcctctggctcagtcacacagcagccttgtaggtgactggaggtgttcgctgatgtggccccaaccctacctccctccccaccccatgatgttagaagaatctcgacagaataaattggcagcagccaagaaaaaggtaaaaagccaagaaaaaggtcatggccccccaacctagccagagatcccctctgatgacaagaccactcccaga
